United States Patent Application Publication US 2005/0228172 A9 - sequence listing, part 147

SEQ ID NO: 683700 - DNA, 581 bp, Homo sapiens
tgaggaactatcactgattgaaggacattaaagagattgcaacatgcagtcatggtttgaatccttgggacaactgatgaaatttaaatgaggcctgtagattcaatgacgataatgtatcagcattcattttgatggtcatattgtggttttgtaagggaatgtccttgtttacaggaatcacacatcaaagtatttggggtaatgaagcatcatattattgactaattatttaatgattaagggaaaatgaaattatttgtgctattattataacttttatctaaattggatataatttaagaattgaaatcatcttaaaataaaataaataccacaaaaacccaaagttggaaagaacagaaatattcatcaaaaggtgaataaagaacaacttacagtgcattcatatagcataatactatttaataaataaatgcaacaaactactaatgcatgcaatcgcattgataaatctcacgggtactgtgcttaataaaataaggcagatacaaamaataattactgtgtgattttgtgaataagaaattctagaacaagcaaaattaatctataatcaa

SEQ ID NO: 683701 - DNA, 572 bp, Homo sapiens
agatttgattctttttcctatgctatacaatgtacctgacctctggagtctgtgatcttaatcactctaaaattaagttcaaaggactctgttgttttattttcatctcaaacagtacttttacttgtttgatgtggagtttgattaactaacttagggtgaccaaagttttaattcttttttttrttattattattattttttttgagacagggtctttctctgtcacccaggctggagtgcagtggcgcaatctcagctcactgcaagctctgcctccccggttcacgccattctcctgcctcagcctccctagtagctgggactacaggcgccagccaccaggccgggctaaatttttttgtatttttagtagagatggagtttcactgtgttagccgggatggtttcgatctcctgaccttgtgatcagcccacctcagcctcccaaagtgctaagattacaggtgtgagccaccacgcctggcccgaacttttaattcttaaagtaatttgccaaacaccaagaagttagacttctagaatgctacattttgcctacacaagtgtaa

SEQ ID NO: 683702 - DNA, 971 bp, Homo sapiens
tgatctctgcactcaagatacttgcaagtctatggggaaaacattcagtaagaaacaatgatgaggcactgtgacaagtatgacaataggataaggacagagtacagtgtaagcattataggaggggcagtaattctagattctgggtcrcaaattatcccaaaacatagtggctagaatattgtgttaatgttgatgcattagaagcctaccattgagacactgtaatcttcagagattgggaaaatattagaggtttcagataagacgcaatggctcacacctgtaatcccagaactttgagaggccgaggcaggcagatcacctgaggtcaggagttcaagaccagcctggccaacacgatgaaaccccgcctctactaaaaatacaaaaattagccaggtgtggtggcgcacgcctgtaatcccagctactaggaaggctgaggcaagagaatcacttgaacccaggaggcagaggttgcagtgagccaagattgcaccattgcactccagcctgggtgacagagtgagactccatctcaaaaaaaaaaaaaaaaaaaagcaatatgccattatccactccacattgccacattgtcaaagatctaaacagaacatttgtaggtaaggtgaataagctacaattggccacaattgtttattcacattcaagaagctatgaagtgtgttttactggctagagagagattttctgactggaaagaaccaaaatcacaaagcaagcaaggaaaaacaataaggatttaaatagtaagataaattaatatagtactaaaatctttttcaaattttttctgttttattaagggatattaatgggggaaaaataggcagaaaactattctggtacaatcagcaatggcagcatacaaattattgttcagcaatagccattggtgaagaattaaacatttctgattttaaagttacaagcaaaatagatctatg

SEQ ID NO: 683703 - DNA, 1369 bp, Homo sapiens
ctaggggaaaagactccatcttaaacttggttgaagtagacagtagctcttacaaccaacttgcccttcattgagcctgagataaagacaacattctaagagcaagtgaaaaagaaaaaataaataacatggaacaaggctctagcttggcattgtgtcttcatcaagctgcagcggaaatgagattcatcagttgaataaaccaaaaaatcctcacttttattaagcaatttaattagtactaactgatgcatggacctctacccaaaatataaagaggctctctagcatagtataggagatttagaatccagcacctctggattcgaaacctaattctgccactacctaaatatatgaccctgggtaagtgacttaatctttgtgcaattagttttcttattgtaacacacaagcagtaaaatctgaaatatccatgacaaatctatgaaaggctttgaatacagtatgtgttgggctgggtgtggtggctcatgactgtaatcccagcactttgggaggccgaggcaggcagattacctgaggtcaggagttcaagaccagtctgaccaacatgaagaaaccccatctttactaaaaatacaaaattagccaggtgtggtggcgcatgcctgtggtcccagctacccaggaggctgaggcaggagacttgcttgaacccgggaggcaggggtcacagtgagccgagatcatgccattgcacttcagcctgggcaacaagagaaaaactctctctcaaaaaataagtaaatgaataaataaatgcaaaaaaattttgattattgttattattttctacacaacagaaatgatgaaccattctgaaaatccttattggtattcataagaaactaaatataaatcgtagaaaaaaaaacaagaatacagaacttttttttctggttttgttaaataaattcaaatattccaatgctaccaattgtatagctttgggaaagtcatctcacctcttattacttcagctctaaaatggtttgtttggaagatgaatgtcaatcagtatctcttctatttctaaacctctgattcattcattcatataactgaacagttccaggtgaatttgtatcaaatcttataaatatattaatcaacatgctccttacaggaaaaatgaaaaagtcatagctcattctttcgacctggttagttatcttgaaggagtaatttsggaaaacagtttttactaaagaaaagcttcttggagataataattgttttgattataatggcagttgcttgcctatcttctttccttccttcctttctccctgaataatttgtccattaggagggatcaagaaaggtagctgtcagtcagggttag

SEQ ID NO: 683704 - DNA, 655 bp, Homo sapiens
ttctttcctattttgtctgtctgaaaatgtcttttatattgccttcatttttgatggatatagaattgttttcatagatttccccttatacatcttaaagaagtcatttcattgtcttcaggcttccgtttattttctgatgataagtcatccatttttcttatcagtctctcctctctcctctgttgtctttctctcttgctgctttccttatttctttttaaataatttttatgatttttttttttgccttgcccagggttccattgaggttcttggatgtgtaggtttgatatttcttactgcccggtttagaaaatcttagtcattatctcttcaaatgtgtcttctactccattttctgtttattttttgggattcgaattaccttatgtcagagcatttgatactgcccctggagatttcagattctctgtttcacttttcccacctgatttccatttgtgtgtgtttggatcatttctgtccatcttcaaaaccattcagtaggaagtttcaaaccttcccacatcttcctgtcttcttctgasccctccaaactgtttcagcctctgcctaggttatctttagagagaaagagagatggggtggggtgggatgggttgaggaactgccaaacacttttaaaccacca

SEQ ID NO: 683705 - DNA, 599 bp, Homo sapiens
tccaaatactgatagtttgtgggcttataatttttagtagtcacatacacattattctattttgctgtttgctttgccagatcgcaacaggatcttgtttatatgtgcacatttacacataatatatacgaacatgtttgtttatatttacttacctatgtattttttatatattgctatgaatagactggcataagctatatagtcttccattggagctgtttcattattttatccaaaatcactagatcaaaggctgcaggttattttaaagatggtgtttcatatggtcagaatagtaggttctctggaaagttaaaactgaaatgcaccaatttttcagcatttcatgcctaatttcattagttgaaaatgtttgtaacagattaaattggggctcatttgcayaactaatctgatgtatttctccctatgtaaagagcatgctttgtacctgtgctaagaattatagttatatcatttcttcattttaaaatataagcatttctatcactcattttcccctttctggtgatctcctcttagggttttaccagagttcattatgcaaaatttccactgttaaaaatctgaccaca

SEQ ID NO: 683706 - DNA, 1170 bp, Homo sapiens
tcttgctctgttgcccaggctggagtgcagtggtgcaatctcagctcactgcaaactccgaatcctgggttcaagcaactctgtgactcagccacccaaatagctgggattacaggtgtgcatcaccatgactggctaatttttgtatttttagtagagacaggatttcaccatgttggccaggccagtctcraactcctgacctcaagtgatctgcccacctcggcctcccaaagtgctgggattacaggcgtgagccagtgtccctggccaaatgttaattttcaaaggtagattaacagtacagttttaagatactggaatactgttagtctcttattgtactcttttttttagtgtaaaaatttatttcttaccacatgtcacaaaaaatatgtgactatttttggcctataaaaattgcaattccatacacgtcagcctaaaagtacaccgataaccctagattaaatattttcataatctaaagctagaaccatttaatctatgcaatttctctcttccctatgtgaatcaccctgaatttatctttacttaatttgcaatgcagaaatacaagtgctcagtaaaagaacaactatataaagtgtgagtacacacttattgaacattttaacattttccagaacgtgaagatctctaagtaacaaacattaagatacacaaatattcaaaatctcacagttatattccataacatatttatcattattatttggaggctaaaacagaaagatatcactaagcagaaatatcttaggacttgaactggctctgacaggaaactcagtctcaaacctgatgcttcaagagccatctcctcacttccttctcctcaccatgactaattttccatgtctgtttcattattatataaatgtgtttttattaaaagctgctttaaatatttttcagggaaaggcatagtacaagtaaatagaagtgaacataggtttttctttttttattcacctaagcaaaaccatacccattcacccagtaagcaatgaattaagctgctttcttaaaatgtgttatcaattatgttcaacattggtgggaagctttgtctctaggccattaattattgtaataagctgcagattccatttaaaatacatataaagatcacctttcctacacagccaa

SEQ ID NO: 683707 - DNA, 664 bp, Homo sapiens
ttggcaatgagttgtctgttgtgctcttgatgtgctggggaccaaactggtgagatcaccagagataatacgatttcaagcagcactgtccaacagaaatagaaacatgggccacaaataagagccacatgtataatttaaaattttttaatttttaatttttatgggtacatagtagtatatatatttatggggtacataagatattttgatacaggcatataatgtgttatctaatttaaaacttctaatagccacaaaaacttttaatagccacatttaaaaagaaaaggtaaaattaattttagtaatatattttattttacctaatataggcaaaatattatcacttcaatgtatgaccaaaattttaaaattattaatattttatattcttttgttcacactgtctttaaaatactgtacttcacacatatagcacttcttaattgcatcatatttccagtgctcaaaaatctatatatggctagtatttaccatattggacagcacagatatagaggaaaaaccaaaagcactgggattaacatagacctaagtctgaattctagttccataactcactaagctctgtgrccatgagccagttatataaacactctgagccttgttgtcctcatcagtaaaacggaaagaatataac

SEQ ID NO: 683708 - DNA, 618 bp, Homo sapiens
gaagaagcagatttccagaaaaaaggaaaaagtgccatagggtggcaggggagacaaaggaagtaccttagttctaggtcmggtccttaatccagcccatggactatacaacgatttttttttttttcctaggatggccagaagatggcccattttaacctcacaataaactcccttggaatgactcttcctcgtaaccaatagagctaaaacaataataccacaattggaaaggtcgttaccaagaccactgcagattttattgtacaaaaagcagaagtttccaactgtcctttgtagctaccaggatgaaactctttccagatatgcttttccagatgtaaaatgcagatgggaccatagacaactgaggaacaggcccactttgcagcacataggtttactaagtaggtttgaaaatgtacttcaaacaatatgagatgttttcctccaaaggaattatctccctctgagtccccctatataacgtttcagaagccacagaaagcagcacactatagttggaaacaccgtacactttagagttagacccaaattaaagttctggctcttctaaatatgaactctggacttggacaagttatttaacctctcttt

SEQ ID NO: 683709 - DNA, 520 bp, Homo sapiens
cctgggcaacagggcgagactcagcctcaaaaaaaaaaaaaaaaaaaattatacatgaaaagaaacacttttaaaattactagagaccttaatatttaaaataaatgtatagtttgtccttttcctttataaagtaaaaaataatttactattctgtattggtctgttttcatgctgctgataaagacatatctgagactgggtaatttatataggaaaaaggtttaattaataacttacagttccacgtgactggggaggcctcacaatcctggcagaaggcaaggaggagcaagtcgcatcttatgtggatggcggcaggcaaaaagagagagcttatgcagggaaaactcttgyttttaaaaccatcagatctcatgagactcattcactatcatgagaacagcatgagaaagacctgccccatgattcaaccacctcccaccagggtcctcccgtgacatgtgggaattgtgggaattacaattcaaaatgagatttgggacacagccaaaccata

SEQ ID NO: 683710 - DNA, 2669 bp, Homo sapiens
tgatgattatacagattataagccattgcaaagcaagaatgagtagggcggaatgatttttagctaaaggggacaragtaaacagaactgaaactatccaatttaactctagcattcagaaagccaaaaatggatgccagtctgagagtaaatgaactaaattttttaatgtgtttggtttttggcaagtttagatttacaagtccaagatatgagtctggaaaaaaaaaaagatgcagtaagagatggaagttgtaaggattggtaataatttaaagtcatgagaatgtgtgcatttcataggaaataagtataaagaaaaatggatgttcaaagccataaaaattgttgctagattgagctagaatgtattagtacttcccccaaagaattcagaaaacaagtaaaacatgtattacttgtttcatttatgtagaaatatttcatgcatgtagaaataaatgttatttatgtagaaatgtatgtagaaataaatactatgtatatggaaataaatagtatgtttcatgtacgtagaaataaattttcatgcattgatttcttcaactgctttactagatacctatttgtgccaggctctctgctaattacaaggcaatatagaaatagaaatagagcagtaaaggaatctcaattgatttttaatttactcaaccccatcaaaacgtaattatttggcattaagtaatgaatttccctgtggatgaaggataaatttgttttctataataacacagctgtttcttacagaacttatctacaaggaagtaatgaattcagaagaaaagactaaaaatggtgtagtaaaaggacagccttctccttcaggtactcactctccgtgaataaccaataaactagtacttgtgtaatttcttggcctttgtgtaggggttgcaagaaataacataacattgcttaaagagcagatggacaaatatcacatggttgtgtccttataatgattttagttttatttcttttgatattcagtgtggcattcattctgattattctgatggtaatgatccagcacaaaaactttttcataaataattttaatagtaatgaatcctgaagaaaatgttaacatgggctaaagggtaaatgtgcctcatcaaaattcagagccataatgcccttttgaccatcaagtcaatgtggagctcagtaatcctttcagccgctacctcttccctcattcattcttagtgtttgaactcttctcaaggttgatgtgacaatagttgaaacatctaccaagatgggctccggttaaagtcagcttggaaaatttttcgtttgctagccacagaatctaatacacaattgtgcatatatattttttactgatcctagtaatgtgctttagtatgacttgagacaatttacttattaatgctaatatattttttcctaagacctatgctctcactataaagagttttagaaaatgtgatggtttattttcagctttaaaaactacattcaactcctgctagcaaaaatgggggctacaaatgcctagttttgagaaaaactgattagggtgttgttttcctaaattattttaggaaaaaagatgtagaatgaaataattaatcaattattcatatcgatactactctttgaataactaatttacaccccaaaccactatgatacccaaacagatgcaattcggttatgacatgcttttctcaccagtagacttgaaaaaatactcagttttatcccaagtttttcccttcctcaaagaaggttaagggaatcacaggagttgttttccataccaccctctctactcattcaccctcgcatacagattgacacagtccacagaagctgcttcaaactaatccacgtttggcctgttgctcattaaaaaacttgaagacagaatccaaaagcctcaagatgccacctgctaaggcagaatgactccttgttttaagaattcctataatgaccagaacatattgtcatgtactcattaagcagcagaaataacagaatgtagccacgggtaacctagcatgttaggctgggcctggacaaattttagtagaacctattctattcatcttcagttcaagttatcattacttcatttccttttcataccaccttatcccaaaagactttttatatcttcccaaagaataggatctttcctttctataggtcctactagtccctgtatgttaaatatttgacctcttgtcttattatcccttattgattgtaatttcattgagaagactgtatgcatttatctttgtgtcccatgtagtgcctgggtgctgtgccttgcacatagtagtagctcaataaatatatattaatttgaaaattgccactcaatttctccctcagcatatttcttagtactattccaaacacaaaattcaagacaagatcatgtaactttaatacagtatactattcagcatgttcttacaccattattataaatatttattcactctattaatctccatgaagataaacaggccaagcataaagtatataaattcttgctattggcattttttcatgcttcacataaaggtttgcagctttcaggtgtttgatttattcattttgggaaatatatattcatggatgttttgcaggcctgcttagtg

SEQ ID NO: 683711 - DNA, 2669 bp, Homo sapiens
tgatgattatacagattataagccattgcaaagcaagaatgagtagggcggaatgatttttagctaaaggggacaaagtaaacagaactgaaactatccaatttaactctagcattcagaaagccaaaaatggatgccagtctgagagtaaatgaactaaattttttaatgtgtttggtttttggcaagtttagatttacaagtccaagatatgagtctggaaaaaaaaaaagatgcagtaagagatggaagttgtaaggattggtaataatttaaagtcatgagaatgtgtgcatttcataggaaataagtataaagaaaaatggatgttcaaagccataaaaattgttgctagattgagctagaatgtattagtacttcccccaaagaattcagaaaacaagtaaaacatgtattacttgtttcatttatgtagaaatatttcatgcatgtagaaataaatgttatttatgtagaaatgtatgtagaaataaatactatgtatatggaaataaatagtatgtttcatgtacgtagaaataaattttcatgcattgatttcttcaactgctttactagatacctatttgtgccaggctctctgctaattacaaggcaatatagaaatagaaatagagcagtaaaggaatctcaattgatttttaatttactcaaccccatcaaaacgtaattatttggcattaagtaatgaatttccctgtggatgaaggataaatttgttttctataataacacagctgtttcttacagaacttatctacaaggaagtaatgaattcagaagaaaagactaaaaatggtgtagtaaaaggacagccttctccttcaggtactcactctccgtgaataaccaataaactagtacttgtgtaatttcttggcctttgtgtaggggttgcaagaaataacataacattgcttaaagagcagatggacaaatatcacatggttgtgtccttataatgattttagttttatttcttttgatattcagtgtggcattcattctgattattctgatggtaatgatccagcacaaaaactttttcataaataattttaatagtaatgaatcctgaagaaaatgttaacatgggctaaagggtaaatgtgcctcatcaaaattcagagccataatgcccttttgaccatcaagtcaatgtggagctcagtaatcctttcagccgctacctcttccctcattcattcttagtgtttgaactcttctcaaggttgatgtgacaatagttgaaacatctaccaagatgggctccggttaaagtcagcttggaaaatttttcgtttgctagccacagaatctaatacacaattgtgcatatatattttttactgatcctagtaatgtgctttagtatgacttgagacaatttacttattaatgctaatatattttttcctaagacctatgctctcactataaagagttttagaaaatgtgatggtttattttcagctttaaaaactacattcaactcctgctagcaaaaatgggggctacaaatgcctagttttgagaaaaactgattagggtgttgttttcctaaattattttaggaaaaaagatgtagaatgaaataattaatcaattattcatatcgatactactctttgaataactaatttacaccccaaaccactatgatacccaaacagatgcaattcggttatgacatgcttttctcaccagtagacttgaaaaaatactcagttttatcccaagtttttcccttcctcaaagaaggttaagggaatcacaggagttgttttccataccaccctctctactcattcaccctcgcatacagattgacacagtccacagaagctgcttcaaactaatccacgtttggcctgttgctcattaaaaaacttgaagacagaatccaaaagcctcaagatgccacctgctaaggcagaatgactccttgttttaagaattcctataatgaccagaacatattgtcatgtactcattaagcagcagaaataacagaatgtagccacgggtaacctagcatgttaggctgggcctggacaaattttagtagaacctattctattcatcttcagttcaagttatcattacttcatttccttttcataccaccttatcccaaaagactttttatatcttcccaaagaataggatctttcctttctataggtcctactagtccctgtatgttaaatatttgacctcttgtcttattatcccktattgattgtaatttcattgagaagactgtatgcatttatctttgtgtcccatgtagtgcctgggtgctgtgccttgcacatagtagtagctcaataaatatatattaatttgaaaattgccactcaatttctccctcagcatatttcttagtactattccaaacacaaaattcaagacaagatcatgtaactttaatacagtatactattcagcatgttcttacaccattattataaatatttattcactctattaatctccatgaagataaacaggccaagcataaagtatataaattcttgctattggcattttttcatgcttcacataaaggtttgcagctttcaggtgtttgatttattcattttgggaaatatatattcatggatgttttgcaggcctgcttagtg

SEQ ID NO: 683712 - DNA, 2669 bp, Homo sapiens
tgatgattatacagattataagccattgcaaagcaagaatgagtagggcggaatgatttttagctaaaggggacaaagtaaacagaactgaaactatccaatttaactctagcattcagaaagccaaaaatggatgccagtctgagagtaaatgaactaaattttttaatgtgtttggtttttggcaagtttagatttacaagtccaagatatgagtctggaaaaaaaaaaagatgcagtaagagatggaagttgtaaggattggtaataatttaaagtcatgagaatgtgtgcatttcataggaaataagtataaagaaaaatggatgttcaaagccataaaaattgttgctagattgagctagaatgtattagtacttcccccaaagaattcagaaaacaagtaaaacatgtattacttgtttcatttatgtagaaatatttcatgcatgtagaaataaatgttatttatgtagaaatgtatgtagaaataaatactatgtatatggaaataaatagtatgtttcatgtacgtagaaataaattttcatgcattgatttcttcaactgctttactagatacctatttgtgccaggctctctgctaattacaaggcaatatagaaatagaaatagagcagtaaaggaatctcaattgatttttaatttactcaaccccatcaaaacgtaattatttggcattaagtaatgaatttccctgtggatgaaggataaatttgttttctataataacacagctgtttcttacagaacttatctacaaggaagtaatgaattcagaagaaaagactaaaaatggtgtagtaaaaggacagccttctccttcaggtactcactctccgtgaataaccaataaactagtacttgtgtaatttcttggcctttgtgtaggggttgcaagaaataacataacattgcttaaagagcagatggacaaatatcacatggttgtgtccttataatgattttagttttatttcttttgatattcagtgtggcattcattctgattattctgatggtaatgatccagcacaaaaactttttcataaataattttaatagtaatgaatcctgaagaaaatgttaacatgggctaaagggtaaatgtgcctcatcaaaattcagagccataatgcccttttgaccatcaagtcaatgtggagctcagtaatcctttcagccgctacctcttccctcattcattcttagtgtttgaactcttctcaaggttgatgtgacaatagttgaaacatctaccaagatgggctccggttaaagtcagcttggaaaatttttcgtttgctagccacagaatctaatacacaattgtgcatatatattttttactgatcctagtaatgtgctttagtatgacttgagacaatttacttattaatgctaatatattttttcctaagacctatgctctcactataaagagttttagaaaatgtgatggtttattttcagctttaaaaactacattcaactcctgctagcaaaaatgggggctacaaatgcctagttttgagaaaaactgattagggtgttgttttcctaaattattttaggaaaaaagatgtagaatgaaataattaatcaattattcatatcgatactactctttgaataactaatttacaccccaaaccactatgatacccaaacagatgcaattcggttatgacatgcttttctcaccagtagacttgaaaaaatactcagttttatcccaagtttttcccttcctcaaagaaggttaagggaatcacaggagttgttttccataccaccctctctactcattcaccctcgcatacagattgacacagtccacagaagctgcttcaaactaatccacgtttggcctgttgctcattaaaaaacttgaagacagaatccaaaagcctcaagatgccacctgctaaggcagaatgactccttgttttaagaattcctataatgaccagaacatattgtcatgtactcattaagcagcagaaataacagaatgtagccacgggtaacctagcatgttaggctgggcctggacaaattttagtagaacctattctattcatcttcagttcaagttatcattacttcatttccttttcataccaccttatcccaaaagactttttatatcttcccaaagaataggatctttcctttctataggtcctactagtccctgtatgttaaatatttgacctcttgtcttattatcccttattgattgtaatttcattgagaagactgtatgcatttatctttgtgtcccatgtagtgcctgggtgctgtgccttgcacatagtagtagctcartaaatatatattaatttgaaaattgccactcaatttctccctcagcatatttcttagtactattccaaacacaaaattcaagacaagatcatgtaactttaatacagtatactattcagcatgttcttacaccattattataaatatttattcactctattaatctccatgaagataaacaggccaagcataaagtatataaattcttgctattggcattttttcatgcttcacataaaggtttgcagctttcaggtgtttgatttattcattttgggaaatatatattcatggatgttttgcaggcctgcttagtg

SEQ ID NO: 683713 - DNA, 818 bp, Homo sapiens
tatattttccaaatttacaaatcaaataagttctttccctcctatgagggaggatgaataaagggacggtgtaggtgaagaatgttacaaatttgagttctcttcatatggaaggaaacatcaggaataaagatccctgccaaaataaataattttatttgtcctaatattaaataactaataaawgtatttatttaagattggaataaaagtagagatcagggagctactagaacttttgataaaggacttgatctattctcttgatcattatttctcaagggggatcattatttgcattttgaaagaaaatattttttgtgcaaaatcaacctccctttgtggataatttagcattcctggttgctgagcattcaatgacagtatcactttcctggagtcactcttacaataaaaaatatttctgcatgttcttaggtattttctaagtggtggcaatttcctcaatcgctaaccactattctaggtgatccaaaagaattctcatacttcacttggaattttgaaatatgagcaaaaattggattagcaaagagggaaaaaattgtatctcaagcagaggaaacatattagatggtggggaggagcatagcccattaaagtactgagaaaacatctttgagcctagagcccagacagtggaagaagtactggcagaggaggctggtgagtcagatgttgagagtgtaaacgactgaagtgtttttttgttttttggtgttttttggtgttttttggtgtttgtttgtttgtttgtttgttttgagttggactctcgctctgtcgcccaggctgta

SEQ ID NO: 683714 - DNA, 818 bp, Homo sapiens
tatattttccaaatttacaaatcaaataagttctttccctcctatgagggaggatgaataaagggacggtgtaggtgaagaatgttacaaatttgagttctcttcatatggaaggaaacatcaggaataaagatccctgccaaaataaataattttatttgtcctaatattaaataactaataaatgtatttatttaagattgsaataaaagtagagatcagggagctactagaacttttgataaaggacttgatctattctcttgatcattatttctcaagggggatcattatttgcattttgaaagaaaatattttttgtgcaaaatcaacctccctttgtggataatttagcattcctggttgctgagcattcaatgacagtatcactttcctggagtcactcttacaataaaaaatatttctgcatgttcttaggtattttctaagtggtggcaatttcctcaatcgctaaccactattctaggtgatccaaaagaattctcatacttcacttggaattttgaaatatgagcaaaaattggattagcaaagagggaaaaaattgtatctcaagcagaggaaacatattagatggtggggaggagcatagcccattaaagtactgagaaaacatctttgagcctagagcccagacagtggaagaagtactggcagaggaggctggtgagtcagatgttgagagtgtaaacgactgaagtgtttttttgttttttggtgttttttggtgttttttggtgtttgtttgtttgtttgtttgttttgagttggactctcgctctgtcgcccaggctgta

SEQ ID NO: 683715 - DNA, 818 bp, Homo sapiens
tatattttccaaatttacaaatcaaataagttctttccctcctatgagggaggatgaataaagggacggtgtaggtgaagaatgttacaaatttgagttctcttcatatggaaggaaacatcaggaataaagatccctgccaaaataaataattttatttgtcctaatattaaataactaataaatgtatttatttaagattggaataaaagtagagatcagggagctactagaacttttgataaaggacttgatctattctcttgatcattatttctcaagggggatcattatttgcattttgaaagaaaatattttttgtgcaaaatcaacctccctttgtggataatttagcattcctggttgctgagcattcaatgacagtatcactttcctggagtcactcttacaataaaaaatatttctgcatgttcttaggtattttctaagtggtggcaatttcctcaatcgctaaccactattctaggtgatccaaaagaattctcatacttcacttggaattttgaaatatgagcaaaaattggattagcraagagggaaaaaattgtatctcaagcagaggaaacatattagatggtggggaggagcatagcccattaaagtactgagaaaacatctttgagcctagagcccagacagtggaagaagtactggcagaggaggctggtgagtcagatgttgagagtgtaaacgactgaagtgtttttttgttttttggtgttttttggtgttttttggtgtttgtttgtttgtttgtttgttttgagttggactctcgctctgtcgcccaggctgta

SEQ ID NO: 683716 - DNA, 893 bp, Homo sapiens
  misc_feature 2, 3, 4, 5, 6, 7, 8, 9, 10, 11, 12, 13, 14, 15, 16, 17, 18,19, 20, 21, 22, 23, 24, 25, 26, 27, 28, 29, 30, 31, 32,33, 34, 35, 36, 37, 38, 39, 40, 41, 42, 43, 44, 45, 46,47, 48, 49, 50, 51, 52, 53, 54, 55, 56, 57, 58, 59, 60,61: n = A,T,C or G
  misc_feature 62, 63, 64, 65, 66, 67, 68, 69, 70, 71, 72, 73, 74, 75, 76,77, 78, 79, 80, 81, 82, 83, 84, 85, 86, 87, 88, 89, 90,91, 92, 93, 94, 95, 96, 97, 98, 99, 100, 101: n = A,T,C or G
tnnnnnnnnnnnnnnnnnnnnnnnnnnnnnnnnnnnnnnnnnnnnnnnnnnnnnnnnnnnnnnnnnnnnnnnnnnnnnnnnnnnnnnnnnnnnnnnnnnnntatctaaacattgtatgcatctccaaacattcatcagcaaaagttagaaggtataatagctcaaggcattcaagcataacttctgaccaatcactgactgaataattagctatatggacccagatgtgaccccaggaaatctagttttaaaaataaaaatgaggatgacaacgataacaaaaacatgaatagaggtatcagcaatacactacagaattgactctatagaatcagtccaaaatagtcactaaacaaacaaaagaaaaaaaagaacaataacaatccctgagggggattcagaatccagagttgattgtacgtatagcctaaaatgaccaattcttaagaaaatttattattattattatttgagacagagttttgctctgttgcccaggctggagtgcagtggtgcgatctcagctcactgcaacctctgcctgccaggttcctgcaactctcctgcctcagccttctgagtagytgggattacaggttcacaccaccatgcctggctaattttttgtatttttagtagagatagggtttcaccaccttggccaggttggtcttgaactcctgacctcaagtgatccgcccaccttggcctcccaagtgctgggatcatgggcatgagcaaccatgccaggccatttaacaaaaattattaaacagacaaagacactggaaggtgtgacccatatacaggaaaaaaggcaatcaaaagcaatagtttcttaagagatctagattttcgtgagagaagacaaaaattcaaacaactgttgtaaa

SEQ ID NO: 683717 - DNA, 893 bp, Homo sapiens
  misc_feature 2, 3, 4, 5, 6, 7, 8, 9, 10, 11, 12, 13, 14, 15, 16, 17, 18,19, 20, 21, 22, 23, 24, 25, 26, 27, 28, 29, 30, 31, 32,33, 34, 35, 36, 37, 38, 39, 40, 41, 42, 43, 44, 45, 46,47, 48, 49, 50, 51, 52, 53, 54, 55, 56, 57, 58, 59, 60,61: n = A,T,C or G
  misc_feature 62, 63, 64, 65, 66, 67, 68, 69, 70, 71, 72, 73, 74, 75, 76,77, 78, 79, 80, 81, 82, 83, 84, 85, 86, 87, 88, 89, 90,91, 92, 93, 94, 95, 96, 97, 98, 99, 100, 101: n = A,T,C or G
tnnnnnnnnnnnnnnnnnnnnnnnnnnnnnnnnnnnnnnnnnnnnnnnnnnnnnnnnnnnnnnnnnnnnnnnnnnnnnnnnnnnnnnnnnnnnnnnnnnnntatctaaacattgtatgcatctccaaacattcatcagcaaaagttagaaggtataatagctcaaggcattcaagcataacttctgaccaatcactgactgaataattagctatatggacccagatgtgaccccaggaaatctagttttaaaaataaaaatgaggatgacaacgataacaaaaacatgaatagaggtatcagcaatacactacagaattgactctatagaatcagtccaaaatagtcactaaacaaacaaaagaaaaaaaagaacaataacaatccctgagggggattcagaatccagagttgattgtacgtatagcctaaaatgaccaattcttaagaaaatttattattattattatttgagacagagttttgctctgttgcccaggctggagtgcagtggtgcgatctcagctcactgcaacctctgcctgccaggttcctgcaactctcctgcctcagccttctgagtagttgggattacaggttcacaccaccatgcctggctaattttttgtatttttagtagagatagggtttcaccaccttggccaggttggtcttgaactcctgacctcaagtgatccgcccaccttggcctcccaagtgctgggatyatgggcatgagcaaccatgccaggccatttaacaaaaattattaaacagacaaagacactggaaggtgtgacccatatacaggaaaaaaggcaatcaaaagcaatagtttcttaagagatctagattttcgtgagagaagacaaaaattcaaacaactgttgtaaa

SEQ ID NO: 683718 - DNA, 1388 bp, Homo sapiens
gacctcagcaaggccaaagagttttctcaaattattgttgcaatataaccagttttgttgctataaaaatgtaaataaattatatgagtagcttatatctttcacatagagatggtttctaccatattttcggaatttaaatgtccacaggtatgacagaacataagccagcaggggttgctgacrctggcatgaaaatgttgatgattaaaatatcaccatagtatgaggtttactattcctaccatcatttaagaaaaaggttaaattacttaattttagctgcaatttatttttccaattattctttattgttttccccaagtagcataatgcatgatccaaaaatacaaaatgaaacgaaccaagagaaaaacctaatttaactggttgttgctgacattttgccttttctcagaaagcagcctcagttaaaaataactcaaaggcatttttggtgaacactctgacctagaataaaaatatctcagtaagctagcaattttctattttatagttggtcctgagaagaagcagccagagtgatatttgtgttcattacgctgtataaaaaattataatctcaagcttagagagagtcactaattatgtgacgttgacatgcttttgaatatttatttatcactgtgtatgaaatgaatttgtttcaaaacaaaaaaaaatcctacagaaagacaaagagattattttgtgaggttgtgagcaggtaagctagcctgcttaacatggagacttcgctcactggtcctctttccactcattaaagagtttctctgaattatctcattcttaaccatgacttcaacatccctacacactgatttccctaaaattccacctcagactccaaatcaggctctaccctgagttccaaactgctctattcaattactgtattgtattagttatctattgttgtgtaacaaattatccaaaaacctaatagcttaaaacaacagacagtctctcataataatttctgtggatcaggaatcagggccctacttagctggtcctctagcacagggtctctcacaaggttgcaatccaggtgttgctttgattgtagtggatttaaaggctcagctggaggagaatctgcttccaagatcactctcatgattgttggaaggattgagctcttgccaggggttagcctgaggcctttcttaaatttctttcctgtacagcccactccactgggcagataatcaggcagagggcttccctaggagtgagagcataagagaatggcaagcaagaaggacatcacaatcttcttataacttaatcttggaagtgtcaacccatcccgtctgctgtattctgttcatcagaagtgagtcatttggtccactcttcctcaa

SEQ ID NO: 683719 - DNA, 1388 bp, Homo sapiens
gacctcagcaaggccaaagagttttctcaaattattgttgcaatataaccagttttgttgctataaaaatgtaaataaattatatgagtagcttatatctttcacatagagatggtttctaccatattttcggaatttaaatgtccacaggtatgacagaacataagccagcaggggttgctgacgctggcatgaaaatgttgatgattaaaatatcaccatagtatgaggtttactattcctaccatcatttaagaaaaaggttaaattacttaattttagctgcaatttatttttccaattattctttattgttttccccaagtagcataatgcatgatccaaaaatacaaaatgaaacgaaccaagagaaaaacctaatttaactggttgttgctgacattttgccttttctcagaaagcagcctcagttaaaaataactcaaaggcatttttggtgaacactctgacctagaataaaaatatctcagtaagctagcaattttctattttatagttggtcctgagaagaagcagccagagtgatatttgtgttcattacgctgtataaaaaattataatctcaagcttagagagagtcactaattatgtgacrttgacatgcttttgaatatttatttatcactgtgtatgaaatgaatttgtttcaaaacaaaaaaaaatcctacagaaagacaaagagattattttgtgaggttgtgagcaggtaagctagcctgcttaacatggagacttcgctcactggtcctctttccactcattaaagagtttctctgaattatctcattcttaaccatgacttcaacatccctacacactgatttccctaaaattccacctcagactccaaatcaggctctaccctgagttccaaactgctctattcaattactgtattgtattagttatctattgttgtgtaacaaattatccaaaaacctaatagcttaaaacaacagacagtctctcataataatttctgtggatcaggaatcagggccctacttagctggtcctctagcacagggtctctcacaaggttgcaatccaggtgttgctttgattgtagtggatttaaaggctcagctggaggagaatctgcttccaagatcactctcatgattgttggaaggattgagctcttgccaggggttagcctgaggcctttcttaaatttctttcctgtacagcccactccactgggcagataatcaggcagagggcttccctaggagtgagagcataagagaatggcaagcaagaaggacatcacaatcttcttataacttaatcttggaagtgtcaacccatcccgtctgctgtattctgttcatcagaagtgagtcatttggtccactcttcctcaa

SEQ ID NO: 683720 - DNA, 1549 bp, Homo sapiens
tagaactctgctttataaaacactgactgctttatgaaatattaacttaagtggctctttatttcacattcttagcacccatggcagttcttcaatgtcatcctaatctttgcagtgaagatttcatgcagtggccaaattttcaattaaacacaattctactcaaatttaaatcacacacatcatttatcacggctgctaaacctgttggttaaataacttttatgttccactccagaggcacctcatttttgtgatgaattaagaggtccctataaagtagccttatctacctgttcctatctctcatgagtgtttcaagagtatatgatcstcagatgctgaggttgaaaagagaaaacagaaacagcagcatgaagggcaaattaactggctactttagcagaacaatcaaagttgcattctatcacagggtagttgactgataatctaattctccgatttgtaagttaagggattcaattttgtcagaatggctcaaattcaggagggaggtggaaagttatttcatagcagcaacaaaaacaacagcaacaaaagaccaattgtaattaaaaaaatcaacaataatatatctgaagaattaatgggtactatgtaaggcattctaataagcaaaacatatgcactttatcactaattttaagttcaagacttctgtacgagatacataataatattatatatatttggtgaataaaaaactagattaactagatgtccaagaaactagtgggtgaactagaatgcaaatttacaaatgtgccatgagaactataactagcaaagtgacccaagagtactgtcttccactaaaacaatctacacaggaaataaaattaatcagagcaaggagagtggttagttgaatgaacctgatagttaatgacatcaaactatgatggcctgaggcattcatggagagtgctggggaaatgttgacaaatttttcttctcagactcccatttctttacactcaggctaactatcttcaggaatattaatatcattgatccacctatatttatttcatatcaattcaattcttgttatgtgctcctgactgtaccccccaccaccccaacaatcaccttgattaggtggacctttcttaaatctcctccaggataaaccgagagaccatttcacaggatgaggtacttcatcgaatgactaatatactacattacttattgattcttactagtatggttctcggggattaatatgtccatattttaaaaccctctcacttatgcccatctacttattacatcagaaaccagacaatgtaataagtaccctaagctatggtggaaaataatttgtaatcctattcaatcaactgataaatatttattgagagtttactttgtatcaggcaatgtactaagtgctatttcacttattccattctataaacatttgtgtccagtactagaatgtgctgaacaatggaaatctgcaaagaatttactcagtaatacacttaaaaaccaaccaaccaaccaaataaaatacatccca

SEQ ID NO: 683721 - DNA, 3294 bp, Homo sapiens
ccatctccacaaaaaataattagctgggcatggtggtgcacgcctgtaatcccagctgcctgggaggctgatgtgagaagatcacttgagcctggcaggtcaaggctgcagtgagccaagattgcaccactgcactccagcatgggcaacagagtaagaccctcctccaaaaaaaaaaaaaaagacactctgtgtgacatttcctgctaccccattctgccttttgcaacattatagaaaatccctactttggttctggtaccatctctaggtttgctaattgggtcacccaaatgggcgattagactatgttatcttggagactgtgagtgaacagagcactttcttaagccagtgatgcagaaacaagcaaatttctcacgtctcccctctactatcgggtaaccctaagcattctttaacccttaatgaggacatgctcaacctacaaaattgattgcctgaataggaaaaaaagaagtttgaagataacttttgggtctgaaaccagaggatgtgaaataagcaaaagcttgcctaggaactgtgaatgaacatgctgctaaaactgacactgctcattactgcactaacatttgtagttgagagtagaatagagagatccataatggactttattactttaggtaagacaggcaggggtgatgctcttcagggcaacactgatggccaggcaggtttgggctcagcttgagggatacacagcatccctgccctgaaaaatgacatctcctctccctgtaagccctctgcatgcccccagaatgaatagaaaagagaatatattttgccagaaccattttatttctctttcctttggtactatttttttttttctttcaggcaaaaccttattttcttactgtttggcttgctctgtcattttcattttttgttctttattttcacagacatcctacctgactctttcttctctgaaagggagggtagatgtctgccaagaagggatggagtgctgctctcagttgcaaaagggatccagaagccaagaacgaagggctcaactagaaatcagtcaggctcagagaggaaagtcaagacggaggcattgctgcaagagaaaactgaatttacagagacaggcaagcccgaaaagaatagacatatgtttgaaaaggcatatattgaaaatgaaagaaacaaaaatgtatgagtgtacaggggaaaaaaattagattgaatatttcccagcaactctgacaaaagatgagatgtcttgtctatgatcagtgaacaccatgactgtgtcaatttccctttctgatcaacatggatccaaaaatgaaaaatgaacccagaaaatataacacggttaaaaaagaacagtgaacagggactcagaagatctgcatgagagccttggttctgctaccaataccagtctgcctaaatgagtcacttactatccctgtgtttctttttctagaaatgcaattgaatctaaactatattaagtctaattcatgctggctataaaagtttatgattttttaagtcaccatttagaaaaaaataattgtcacaaaatacctgtgtgcccatagatgctgtaattaatttgctgaataagcatgtacatgttcctaccttattacattttattctccatttatagtacacataagagaactacagggagtacctccaaagtcatcagtttctgaccttgcacggtagggaaaatgcatttcaaactgggagacttaagtttaacaaccttttgtatctgagcactaatgagcagtcagtggctaccctggagccaactgcccccttctgtgtctggggccataaaacctgagtgctcatgtggctgatggtttacttgtttttgtttttctttaagatcccatctccaggaaaatttttttgacataattcatataacctatttcatagaaaatttctaacagagaacccagaatatgtagattcttaataaatgctagttttcccccttgacattttcacaatccatggcaaatcacaatagcacaaatatatggaatctacttctatccttaaatcttatatagcccggctcacatctgtaatccaagcactgtaggaggccaaggtggaagtgtcacttgaggccacaagttcgaggccacaagttcaagaccggcctgcacttagggagaaccctgtatctacaaagaattaacaaattagccgggtgcggtggctcatgcctgtaatcccagcactttgggaggccaaggtgggcggatcacgaggtcaggagttcgagaccagcctgaccaacatggtgaaaccctgtctctactaaaaatacaaaaattagctgggcatggtggcaggcacctgtaatcccatctactctggaggctgaggcaggagaattgcttgaacccaggaggcagaggttgcagtgagccragatcgcatcactgcgctccagcctgggcaacagagcgagactctgtctcaacaaattagccaggcatggtggtgtatgcctcttgccccagctatttggaaggctgaggcaggaggattgcttgagcccaggagtttgaggctgcagtgagctatgattgtgccactgcactccagcctaggtgacagagcaagaccctgattcaaaacaataatactaaataaatgaaaaacctcatacagttaacatatcaatttcactgagtgtcattccctacctttctctttaatctctagctttactctcaaaaaatagtgaaatcatggagtgaaaatgatttaaactaagagccagcaaacttattttttctgtaaaggaccagacaggaaagagtttaggccatatgggatctgtcacaactactcggcaacattcaactctgatgctgtaacaggaaagcagccagagagagtctgtaaacaaatagatatgactgtgtgccagtatgctatattcacaaaaatagacaacgacccctatttggattatagtctgcagtttgctgacccctgatttaagtgaatttgccttgatttagtaaaacttccataggatgttattggctctatcttaaagtgaaggaagaagggaggaaaagaaagagggaagaagatgagtacaagatgcagagaaccagcttcacaggcagaccactaagtgtggttacctggtgaccacgggctctaggtattttcattcttgtgtttggggatttactatgatcacactaaactaagctgtctttgttctgcaggttagaaaacacattctaaccttcaaataatggg

SEQ ID NO: 683722 - DNA, 655 bp, Homo sapiens
aatattatcaaaactatgatatttatttgaaatatgtaaataaaatttttatattctcttgcataagcatataattattttagaaaatataaataagtaaataaaaataacacaacagaaattgagaatgttaaccctttgaattaacatgaacatttcagatattttttgtatggatccctttgcagttttttaaattatcaggttagatgtaaaattktccttttagttttttttgtaaatatttttccatgtcagtaatgtgacagcaggtttttaagtactgcatactttctttatatgctcttcattctattaatgtaccattgttttttaattcaaagatttgatattatgttgcagtgagcatttcaagttagtgaaatatttctgcataaatttgaatatttccttaggtaaaattcttagaagtaagaatcttggaagtaagacagcattgtcataatttttctcacttgtccaattggcaatcaaaatacgatcttaattgataagtttagcagcactataaaatgccaattttcctgcacagaaaaaaagattttgtaatttaaaatatatatttcattttggtgggaataaattcatatctcatctataagctaaagacaactacttcataatatttttacaa

SEQ ID NO: 683723 - DNA, 655 bp, Homo sapiens
aatattatcaaaactatgatatttatttgaaatatgtaaataaaatttttatattctcttgcataagcatataattattttagaaaatataaataagtaaataaaaataacacaacagaaattgagaatgttaaccctttgaattaacatgaacatttcagatattttttgtatggatccctttgcagttttttaaattatcaggttagatgtaaaattttccttttagttttttttgtaaatatttttccatgtcagtaatgtgacagcaggtttttaagtactgcatactttctttatatgctcttcattctattaatgtaccattgttttttaattcaaagatttgatattatgttgcagtgagcatttcaagttagtgaaatatttctgcataaatttgaatatttccttaggtaaaattcttagaagtaagaatcttggaagtaagacagcattgtcataatttttctcacttgtccaattggcaatcaaaatacgatcttaattgataagtttagcagcactataaaatgccaattttcctgcacagaaaaaaagattttgtaatttaaawtatatatttcattttggtgggaataaattcatatctcatctataagctaaagacaactacttcataatatttttacaa

SEQ ID NO: 683724 - DNA, 587 bp, Homo sapiens
agaacaggagatattaaggtgtttagcatttgaaagcatggtcagctccagatatatttagaacttgcattatagactcttctaggaatgtcaggaaacagatgtgaggtgcatgttctggttcaaatggaaaggcagaaattataaaagacactgaaactaaagaaagaccatgaatatctgtataaaattggatggaaggaatctttggaagaatacttccccggagtcctgtrttatcaccatgggatagagatcttttgcactcattgccattcactctctttattttagttgatctgtgaattagtgatgaacgtgtcttgaatgtacacatgatgacaagggaatcatatattttgtaattggctctgaaaatttgctgaagcatgcacaatttaaactagccagccagccgttctctcctgctgattcgatggtatcaaggacacagcatctaaccctcacattttacttggctgcaaacctccctctgaacagggtccacggagcatggatcgtggtcttatgaaacaaatctttcctccttaaatgtcagtgtctcattagacctttgctttggttca

SEQ ID NO: 683725 - DNA, 580 bp, Homo sapiens
tttctggtcttctccccaaattacattttcttactgttgctrgaatactgtttctctagaccactcttattttcccgattacgtaaactgaagtataatacgcatgccgtgaagtaagtaaactaatgcagcttgatgaatttattcatgtcgtgaccactccgatcaagatatggaacatttccaagaccatagaaggcttccattgactctcttctagtcaacaagcctctcactagcagagataataacttttctgacttttatcatcattgattccttttatctattcttaaaatccagctaaatgaaatcatacagtagatagacttttgtgtatatttttgcctcaaaataatgtcagtaaaatacacttaggttcttttttgttgctgtgtagtattccatctcataaatagaccacaatttatttatgtattctcatattgatggagtattttcagctttggatttttgttagtaaagctcattattcctgtacatgtccattgttgggcaggtgcactcagttatcttggtttgcctttagtggacatacatactaatttctttttgtttt

SEQ ID NO: 683726 - DNA, 580 bp, Homo sapiens
tttctggtcttctccccaaattacattttcttactgttgctagaatactgtttctctagaccactcttattttcccgattacgtaaactgaagtataatacgcatgccgtgaagtaagtaaactaatgcagcttgatgaatttattcatgtcgtgaccactccgatcaagatatggaacatttccaagaccatagaaggcttccattgactctcttctagtcaacaagcctctcactagcagagataataacttttctgacttttatcatcattgattccttttatctattcttaaaatccagctaaatgaaatcatacagtagatagacttttgtgtatatttttgcctcaaaataatgtcagtaaaatacacttaggttcttttttgttgctgtgtagtattccatctcataaatagaccacaatttatttatgtattctcatattgatggagtattttcagctttggatttttgttartaaagctcattattcctgtacatgtccattgttgggcaggtgcactcagttatcttggtttgcctttagtggacatacatactaatttctttttgtttt

SEQ ID NO: 683727 - DNA, 633 bp, Homo sapiens
aagtaatttcggggttatctattttaattaatttgattttcaggtgctcattgcacactggacatatacacagatggacaatattgatgtgggcagtctattgaaagtacccctacctggagttaaataagaccttttcttagcctatacctatattatttaaacaatcactgttttggtactatggtgaggggagtaggcagtagggattgaggaaggagagactccagcaaacatgttagttggagtcttggaaagaaaataacgtggactgattaaaatttctagtttttatccttaaaaagaaaatgtagacatctttttaaaattaaagaatgcaaaaatgtattgtgctaaatctcccttacttaggttatcctgttattcttaaatttatacacatacaggttctgtaagtactcagagttcagctaaaaccttgaaaagcagtaatgtgttttctcatataccatatttcccccattacrtttattgaatatgacttcacatttatgtttgtgcagtggttacagtgttgtatgtttttctaacgctttctacaatgatattaagttgtaatagcaaaaagttctactggggcatctactgaaaatatgcctagttttcagatca

SEQ ID NO: 683728 - DNA, 1168 bp, Homo sapiens
tggggaccgagtctcagggctattgcaaacattatataaagtaytggagtcatttcttattgaaaacttttatgattggcaatttgccattttctctgataccgaatgttattttctagctcaaaaaaaagtgttacagtattaactccacaccacagattcattaatttcacaaccctaaaaaataaagccatatttgaaacaacttctactagtttgttattttataaaggaggaaagtatctttctgaacatgtagagaagttttagtttgttgctcatccacattccaaatgataattgaagacctctgtaatatcagagatgctttgaaatgctggtgctgctgaatattttttttaagaggatagcaagaaagtagggctccttcctcttttgccctaattggttctggttaagctggtactatttagcagatgaatctggggcatgtacccttccagaattagctgaatttcatagttcctaaattctaaacggaaagttagatttctttctaaagagtagcactgtaattctagcaaagagacagaagtagaggaaatacagaaagtaaaatgtcagattaattaacagcccaaacctaagaaggtttgcaataaaacatgtggtacctaagaaagtaaaaagaaataaatcaatatattctatggatggtaatttcctaaccaaatctagttattttttttaagtttctccaaatccgcccaccctaattcccatagtctgaggtggactctattttggtacagcccttgccacatacattttttattttaatgtagcactaactaagccttggcacactctccgttgtatccagagagtaatgtccaagggcgcctcgtgccaaattccccagaactctactgttccttctaaagtaactatatcatctcctcagttcacgaccccttattatggacatcttcagttactcttggaagagtggagactcagcatccagagattcaaggtaaccttttggccgagggacccactgtcaacagactgaacacgtacaaactctgtgctttgctggaattaaaaaatgaatgaagaaccttggaatccatccctgtcctctaagtcacagtcaccgggagaaagattctgtggagaagttctagtaacacccgatagacat

SEQ ID NO: 683729 - DNA, 428 bp, Homo sapiens
ggatataagtttgctgacaccaagctcatactttacaaatgtaatatcttcataaaacaaaaatactgggccgggcgcggtggctcacgcctgtaatcccagcattttgggaggccgaggcgggcggatcatgagatcaggagatcgagaccatcctggctaacagggtgaaaccccgtctctactaaaaatacaaaaaattagctgggcatggtggcaggcgcctgtagtcccagctgctcgggaggctgaggcagaagaatggtgtgaacctgagaggcagaacttgcagtgagcccagatcacaccactgcactccagcagagcaagactcaaaaatatatatatactgaatctcaaaagctagagcctaagagatgccccttraaaaagaagcttacaagtgtgaattttcttccctccagccc

SEQ ID NO: 683730 - DNA, 2115 bp, Homo sapiens
ctttacctgatagagcctagagttgtataagcttttcagtcttcctctttggccatactgtttttgctaatcgttttataacctttaaattgttggaactgtttgaggccaggactataaccccgttcatgccttggctgaaggtggtaggaaagagtttctctgtctttaaggaaagcctgcttagcttttggccatgggcaattgacttttcaccttctcagctggtttacacacaagattctctgtgaggcaaaaagccagatacagcctatttcaattgcctcacacccggagaagggaaaagtggtccatctttacaccatggtgtagagctgcagcaaacagaaaatcttcaaggcagtgtcagcagctaataacatccacccacacacacttgaattcactttatggggcttactcccatatgaagtaaygccaaaaaacattgacctgtataaacatgatcaagttctattatcataccactggaataaacagcagcagtttagaaaaaaaaaaagttcttagttaacagaactatgatcaacatacttttatgtgaggggctccatttctaccaacaaagagcgatgttttaagagtgaatttctcgcttaaaccttgttactttagttagtttatcaatgtatagccctggctgctgatttttggctagcatggctttccagggcagaggtttcagactcccaggcaggtgaggacttaggtctctccgagaaatgatgtagtagagctttctcatttgaaagaacaggaaatcaggcaacaaaggttactaagggtcaggatgactcatgcagccatatgcatgagggctatatagggagctgtgagtatggaggtgggcggagtctgccagtaagaggcaccaacgcctcaccaccttcccagaggaccatgtgagagattgatttttttctctactttttgttggtgggatgtgaaatatcgttaatcaccaaatgctgactatccatatggatagtgggaacccttggggtgggcaaaaattatttctttgggctcattctcctatccagagagctgggaaattagatgcttcatagcctggtcatttctgatttccaagtactctatccacatggtatcaaaaagaactattcctttttttctttttctttttttcttgtttccattttccctccctccctccctcctttccttccttcgttccttcctttcttccttcctttccttccttcctaccttccttccttccttccctttcctccatccttttatgcagccagccagccagccagccagccagccaatatttactgagtactttccacagccataggcaaatggctgtggtccaggaatagagagggtcgaagccttttccaggagggcagggccagagtgatgcagagaagtgagggagctgacaagaggtggcaaccagtaggaggtgaagggtgatggagaaggaggagtcagggataacttctgactggaagacttttcctccccattttgtatagatctacagtctctgctagaaactctggaacttgggtatcaccagaaacaaatgaaatgtgaaagatattgtttatctatctatctatctatctatctatctatctatctatctatctatctatctaatctatgtatctatgtatctatgtatctatgtatgtatgtatctatctatctatctatctatctatctatctatctttaaaatgcttagacacactgcactaaggttctgctgggcaaatttttcacttgataactgtcatcaatcaatgtgctatcatcaagtgattgtgtaccagtttacttagtcaaaagttataagaagcaaaaatggcttaactgtgtcaatgagccctaaaaaatcatacaagacaagctagtgaaacagaacggagacttgaggagaccaagtctaaagacagagaacactgatgaaatggaagacgaattgggaatgagatatgtaaaaataccctgggactaattatatagaaatgctgaggatatatcattcatgaacctgtaaaagcatacaagaaatatttttctaacaaagaacacctcagtgcatgatagtta

SEQ ID NO: 683731 - DNA, 2115 bp, Homo sapiens
ctttacctgatagagcctagagttgtataagcttttcagtcttcctctttggccatactgtttttgctaatcgttttataacctttaaattgttggaactgtttgaggccaggactataaccccgttcatgccttggctgaaggtggtaggaaagagtttctctgtctttaaggaaagcctgcttagcttttggccatgggcaattgacttttcaccttctcagctggtttacacacaagattctctgtgaggcaaaaagccagatacagcctatttcaattgcctcacacccggagaagggaaaagtggtccatctttacaccatggtgtagagctgcagcaaacagaaaatcttcaaggcagtgtcagcagctaataacatccacccacacacacttgaattcactttatggggcttactcccatatgaagtaacgccaaaaaacaytgacctgtataaacatgatcaagttctattatcataccactggaataaacagcagcagtttagaaaaaaaaaaagttcttagttaacagaactatgatcaacatacttttatgtgaggggctccatttctaccaacaaagagcgatgttttaagagtgaatttctcgcttaaaccttgttactttagttagtttatcaatgtatagccctggctgctgatttttggctagcatggctttccagggcagaggtttcagactcccaggcaggtgaggacttaggtctctccgagaaatgatgtagtagagctttctcatttgaaagaacaggaaatcaggcaacaaaggttactaagggtcaggatgactcatgcagccatatgcatgagggctatatagggagctgtgagtatggaggtgggcggagtctgccagtaagaggcaccaacgcctcaccaccttcccagaggaccatgtgagagattgatttttttctctactttttgttggtgggatgtgaaatatcgttaatcaccaaatgctgactatccatatggatagtgggaacccttggggtgggcaaaaattatttctttgggctcattctcctatccagagagctgggaaattagatgcttcatagcctggtcatttctgatttccaagtactctatccacatggtatcaaaaagaactattcctttttttctttttctttttttcttgtttccattttccctccctccctccctcctttccttccttcgttccttcctttcttccttcctttccttccttcctaccttccttccttccttccctttcctccatccttttatgcagccagccagccagccagccagccagccaatatttactgagtactttccacagccataggcaaatggctgtggtccaggaatagagagggtcgaagccttttccaggagggcagggccagagtgatgcagagaagtgagggagctgacaagaggtggcaaccagtaggaggtgaagggtgatggagaaggaggagtcagggataacttctgactggaagacttttcctccccattttgtatagatctacagtctctgctagaaactctggaacttgggtatcaccagaaacaaatgaaatgtgaaagatattgtttatctatctatctatctatctatctatctatctatctatctatctatctatctaatctatgtatctatgtatctatgtatctatgtatgtatgtatctatctatctatctatctatctatctatctatctttaaaatgcttagacacactgcactaaggttctgctgggcaaatttttcacttgataactgtcatcaatcaatgtgctatcatcaagtgattgtgtaccagtttacttagtcaaaagttataagaagcaaaaatggcttaactgtgtcaatgagccctaaaaaatcatacaagacaagctagtgaaacagaacggagacttgaggagaccaagtctaaagacagagaacactgatgaaatggaagacgaattgggaatgagatatgtaaaaataccctgggactaattatatagaaatgctgaggatatatcattcatgaacctgtaaaagcatacaagaaatatttttctaacaaagaacacctcagtgcatgatagtta

SEQ ID NO: 683732 - DNA, 610 bp, Homo sapiens
gccttctgggtagctgggattacaggcacccaccaccactcccggctaatttttgtatttttagtagagatggggtttcaccatgttggccaggctgttccttaactcctgacctcaggtgatctgcccacctcagcctcccaaagtcctaggattacagatgtaagccacagtgcccggccagaaattatttactttttttaaaaaaaaaatgaatgattttcaaacattggcactttgataatttttaataataatgaggcatctgtcaattgacctctacatttaaatatagtgggacattactgwtaagtatttgggagctagtcaaacaactcaggaattttagtaaaactttccatctagtttttccatataaacatttctttttctttctttctttcttttttttttcttttcttgaattagtgaggaagttttttcaactcttcacttggtccgcaaactctttagtttctggctgaaaattgatgtgtaagttgttcatggggtgtgattggccttttggtcaataacatttggcatcttgtaacactcatctggcaaaggactgaagacaaaagacctaagagttcttttgtgaaggccc

SEQ ID NO: 683733 - DNA, 610 bp, Homo sapiens
gccttctgggtagctgggattacaggcacccaccaccactcccggctaatttttgtatttttagtagagatggggtttcaccatgttggccaggctgttccttaactcctgacctcaggtgatctgcccacctcagcctcccaaagtcctaggattacagatgtaagccacagtgcccggccagaaattatttactttttttaaaaaaaaaatgaatgattttcaaacattggcactttgataatttttaataataatgaggcatctgtcaattgacctctacatttaaatatagtgggacattactgttaagtatttgggagctagtcaaacaactcaggaattttagtaaaactttccatctagtttttccatrtaaacatttctttttctttctttctttcttttttttttcttttcttgaattagtgaggaagttttttcaactcttcacttggtccgcaaactctttagtttctggctgaaaattgatgtgtaagttgttcatggggtgtgattggccttttggtcaataacatttggcatcttgtaacactcatctggcaaaggactgaagacaaaagacctaagagttcttttgtgaaggccc

SEQ ID NO: 683734 - DNA, 610 bp, Homo sapiens
gccttctgggtagctgggattacaggcacccaccaccactcccggctaatttttgtatttttagtagagatggggtttcaccatgttggccaggctgttccttaactcctgacctcaggtgatctgcccacctcagcctcccaaagtcctaggattacagatgtaagccacagtgcccggccagaaattatttactttttttaaaaaaaaaatgaatgattttcaaacattggcactttgataatttttaataataatgaggcatctgtcaattgacctctacatttaaatatagtgggacattactgttaagtatttgggagctagtcaaacaactcaggaattttagtaaaactttccatctagtttttccatataaacatttctttttctttctttctttcttttttttttcttttcttgaattagtraggaagttttttcaactcttcacttggtccgcaaactctttagtttctggctgaaaattgatgtgtaagttgttcatggggtgtgattggccttttggtcaataacatttggcatcttgtaacactcatctggcaaaggactgaagacaaaagacctaagagttcttttgtgaaggccc

SEQ ID NO: 683735 - DNA, 584 bp, Homo sapiens
cacctccaccagagctaggagccgtgagtgaggccaggtgcagagattggcacctgctctcagcgtctgatacgaaggagaagttgacagatcatatccctccctagcgcytccttcaatgatgggtctccaatccccagttacctctatgttaacacaatttccaaaaatgtgacaattccaagaaggaagttccagttcatctttagaatgacttcctcatctgtaaagtgataatcatacagcaatatgatgatgcaaatcatgataacctggctggtgtctctctgaagctcttgggggtgccgggcattgtcctggccaggttacctccaagccttataacaataaagacaaggaaacaaagactcagaggtgtacaagaccccatggcgagtaaatgacaaagccgggtgtatgagttacctactgctgtgcaagccaccccaacctgtgagggagagaacagcggacgtgttagctctcagcattcgccacccaagaatctggagtagcttggcgggtggtcctggctcagggtctctcatgaggctcctgactcctggttcagggtcagctcattc

SEQ ID NO: 683736 - DNA, 604 bp, Homo sapiens
ttgaacgccggcaatcacagtcattccgctcccttgtctacataactcaacccttgcgaggggctaggaaagcgggcggcaaacaaccttgagggccgaagttaacttcagcgggagtgaacgacaggggtgggctccactttatccagtgcactcggaagccggagggcccccaccaaaaagagcaaggggaaccctcgccctcaacaaggcctgcatctccggactggagctcaagtatagcccagcgagtgtcaagaaacgaaattctccaagggtggcggaatcaagccccaagtcccatgtstcactggaccggtgaggaaccgaactcacctgagaaacgaacacccacacctcacgctcacgccgaccggaagtctttgcacttccgtcttccgggcggaggccacccggggcggacgcattgcacgccgggagacaaaatgtctcaagaagccttgagaggcgggattttggaacccgggcgctgacgagcttccgccattggtgtgatcgcggacctagaaacttggtccgtcccatacaggtgtagaagtcggatttggagaatgctgacgggtgtccggtcaaggttaggccc

SEQ ID NO: 683737 - DNA, 614 bp, Homo sapiens
ggggctaaatgaagtgttggaaccaagtcaaagaaggaaacatcaaaaacagagacatgaaatacaaaacatagggtgctagatttagcaaataaaaatacaggatgctctgggccacacttatattaaaaattattcattgttatttgaaattcaaatcatctgagtgtcttatattttacctgcaactctgacaagtactactgcacctgaacctgatactcaagaagtggcaatggtccttatcagaaatatattggaaggaaattgatagggaaggtgtgtggcgagcttacaaaaatcaaacrtgagtgctcatcacacaggaaactggctgactaaagttcagccaatatcaaaggctgccctggtgaaaaagactttgcagtggaccctggagtgatcagggtgacatatccttcctctcttatttcctatataagatacgatccttcatgcaaacaatacaacagatgaaaacagaggaaagaggctgggcaaaatcatagattgagtaataattgtttaattccacactctgactgttataacttcagttataacttgtatcaatcttccttccttttttaaaaaataaagcaaaacaacaacaa

SEQ ID NO: 683738 - DNA, 614 bp, Homo sapiens
ggggctaaatgaagtgttggaaccaagtcaaagaaggaaacatcaaaaacagagacatgaaatacaaaacatagggtgctagatttagcaaataaaaatacaggatgctctgggccacacttatattaaaaattattcattgttatttgaaattcaaatcatctgagtgtcttatattttacctgcaactctgacaagtactactgcacctgaacctgatactcaagaagtggcaatggtccttatcagaaatatattggaaggaaattgatagggaaggtgtgtggcgagcttacaaaaatcaaacatgagtgctcatcacacaggaaactggctgactaaagttcagccaatatcaaaggctgccctggtgaaaaagactttgcagtggaccctggagtgatcagggtgacatatccttcctytcttatttcctatataagatacgatccttcatgcaaacaatacaacagatgaaaacagaggaaagaggctgggcaaaatcatagattgagtaataattgtttaattccacactctgactgttataacttcagttataacttgtatcaatcttccttccttttttaaaaaataaagcaaaacaacaacaa

SEQ ID NO: 683739 - DNA, 615 bp, Homo sapiens
tttttttttttttgagacagagtcttgctctgtcaccaggctgcagtgcagtggtgtgatctccgctcactgcaagctctgactccctccgactccctggttcaagcgattctcctgcctcagcccgagtagctgggattacaggcacatgccaccacacccagctaatttttgtatttttagtagagacggggtttcaccatgttggccaggatggtcttgatctcctgacctcgtgatctgcccgccttggcctcccaaagtgctgggattacaggcatgagccactgcacccggcctgaatgtttttttgaggcacaattttggatatttgtgaggtcttaactaaggattttacaattatactctttatgtatttttttgattacctgagtcagaagcctttcatttttttgtttttttttttttttgkgagacggagtctcactctgtcgcccaggctggagtgcagtggtgcaatctcggctcactgcaagctccgcctcccgggttcatgccattctcctgcctcagcctcccgagtagctgggactacaggcgcccgccaccacgcccagctaagtttttgtacttttagtaggcacaggatttcac

SEQ ID NO: 683740 - DNA, 1342 bp, Homo sapiens
ggtcaagaaaaataggaaaatttactcttggttgttaaacatgctgtcgcttttatacaaagatgatattgcatgtacatcctggcatgtacttggaattgttccttaaagtgatgatgattgtttaattttttaaagagtatgtatactatggttctgtttatggaaccccatttttttctgtttgttaatgtaactgacctattcataaatgctttagaattttctgccacatgctgaaactcctacccacttcctctgaatggcttgttttcyctctctgaaaaactacaaggtactcatcatcattgaactgtattaaaagatatacctaaatgcattcatatctctccatagaactttcatataaaaaggatagaaaacatttctttaaagccataagaagaagcactttccccatttaaaaatgttagttttcagtctcctggtgacaaaaaggagctaaatcttagatgcagtgaagttctattcactttgaatattcattgttatggtggtttctctgcctgattggttaaagaagacaacacaatttgtaattgacttttttttttttaccaccaaacaactaattttgtcttctaaaaaaagctctagggtttattaactgtgcaatcacaatttactgaggtcctctcatcaaattagccctgaaacaatgcaatttttcctttattttacttctatttcaagaagggctttccagtatgcctcttattaagaccgacagtcactctcctctaatttaggtgtttttctcatggcaacaattcgttattacagctgcagaatttttaaaatccaattctgggcttccttttccttatttcctatggcatcataaaatgtgttaccttcaaattgtagtaatctcaggctcttcaaagcaatatgctctgttgtcctttagaaaaaggaatttcaatctaggaataattcgctaaatttctgagactatttgcttgtttgtcttatttattcatgtattttacacttaggctttataataacaagcttcaataaactatagtgttaaaatctttttttttaagtgttcatttctttcagcatgtccagcaagataaatttactatagttcacctttctccattttacctacagggtcatgggattcgtacagactctcaccaatacctatatcaaaacttgcttctacagaatcacagaaatattctttatctagttcctagcacccaccttaacacttgcccctcaaaggaacagccaatatccccaatgccaaatgagtgtgtgaatggaaatccagaaatagagccccgaagatcaatagatgtgactg

SEQ ID NO: 683741 - DNA, 1163 bp, Homo sapiens
caaggctgctgcctccttctgttccaatcccgactgccccaggacagcctccctttgatgaaagcatatttttaacacctccccaacacagaaagagaaggccagccaggaactccacagcccacagtcatatcttgttagaatgttaatgatggagttctgtgctttcattatatgtatttttatttttgtgagacaggttctcactctattgctcaggctggagcggcagtcactcatcttttgtgggcttaactgccatcatatgcctgactttagcgtctggcatgaattaatcccttattcatgctattgaggaaaaggcagatatgggcttagaattttcctattatgagcctcaccaggcatctcattccttctgggctgatttggtcctgatggccacagcagggagtggggacagctggtctagcagggtagctaagctacatatggagaagactggagaactagggcagaagaggaaaccaagggtaacctctctagaacacttgatatataaccagctctggtaacatatatgcagtacggccatattttaacctactttatgtgtttaatttccataaaaacaaccaccccagtggtgatgacaataaccaacactaacatgttttatcaattagaaagtattgttgttccaagtgaaagatagatggaaatgggcttagaacatagggattggggtgcccggatgcatgtctcgttcaggtgaggcgtgatgcagtgcctcygacgatgccactgcaggcctgatcccctccaggctctggtccgtcttccacggcttcgccttcaacccgaggctctccagtggggcagatggcatctctttcctggaagctccaaccaacgttgctgatgagtcactggctctgactgggtgacatgcacatgcctgtttaaacacctgtccagagggtgaggcatgctgttcggactttggagtcaaaaagacctgggttaaaatcgtgattcccaccattctccccaccccttgcctacctgcctggctctggcaagccacctccccttctgagtctcggtttctgcattcggaaagtggggataacggcagcactcacacagtggagctgtgaagatgaaacaagagaatgcggggagggcagcgagcacctctg

SEQ ID NO: 683742 - DNA, 1916 bp, Homo sapiens
acaattatcactgtttaacttacagtatattttatttggttatattatttattgtctgaatctcccagcagaaggtaagttccgtgagggcaggggattttgtctgttttatcctctgctgtaaccccagcatctaaagcagtgactggcgctgtgtatccacttaatatttattgaagaaatgaaagaaagataacattagtaaatatctaccaaattttgaactcctataaagtcattttttttagataaataacaccagaaatatttatgtttaactcaagtaagcgtgaagaacttgtgattagctgaaagcagacttcttattgctggttaagtgaccatattatattaccagctacttggtagagatgcattcattacagaacagattttttttagaggtgagtttgggagctgaaaataataagcataaagtgacagcttcagccatacctcaactatttctacaaaggcttgtttaaatgtttagtgttccttccattatatttagcatgtggtaggatttagtacatcttaacaactttttgggttttacacattttccaaattttctacataaatagatattatttttgaaacaggaaaaaatgttttgttatgttttgtaaattaaaaaataaatgtctgggagaccaggcgtggtggctcatgcctataatcccagcactttgggaggtcgaggaggggggattacttgaggtcaggagtttgagaccggcctggccaacatggtgaaaccccatctctagtaaaaatacaaaaattagccgagcacagtggcgggcacctgtaatcccagctactcaggaggctgaggcaggagaatctcttgaacccaggaggcagacgttgcagtgagccaagattccgccattgcactccagcctgggcgacagagggagactcagtcacacacacacaaaataatgaaattttaaaaaattaaaaataaaaaacgaatgtctggaattgaagaagaaagtcttatggttatttatgaggccaggcgcagtggcttacacctgtcataccagcactttgggaggccgaggtgggcggatcacctgaggtcaggagtttgaaaccagcctgaccaacatgttgaaaccctgtctctagtaagaatacaaaattagccgggcgtggtggcgcatgcctgtaatcccagctactcaggaggctgaggcaggagaatgcttgaacctgggaggtggaagttgcagtgagctgagattgtgccattgcactccaacctgggcaacaatagcaagactttgtctcaaaaattaattaattaaaataaaataaaatgatgaataagtgaatgaatgaatgaatcaaccgatcaatcaataaacaaacaaacaaatcaagtgtctggattttaagcccttcagggtcaaggtcttactgagttgatctgtgatttcccatattctgtttccacatagagccttggttacagtaggcatttaataaatatttgttgaactatatacacaacaattacaatgtgtttcttttcttttgtatgtttatcagggatctgtttatatctacacttttggtaaggagccaaccttaaataaagtcctagatgcttgtgatgggaaatttcaggcaattgactttatcacacctggaacccaatacttcatggtaaagaatattttactgtgtcacagtaggactaaagatacgatgatgttgcaagatttaaatcccyatttatatgttattgggtaactttgaaagttcatgggcaaagcaatgcgaataggaggcagaggctgtccttgaagactgtggtggagatgccagacacttccatcttcaaatctaccccccggttagaatgataccctcatattgtgacttcataatatcatctt

SEQ ID NO: 683743 - DNA, 1916 bp, Homo sapiens
acaattatcactgtttaacttacagtatattttatttggttatattatttattgtctgaatctcccagcagaaggtaagttccgtgagggcaggggattttgtctgttttatcctctgctgtaaccccagcatctaaagcagtgactggcgctgtgtatccacttaatatttattgaagaaatgaaagaaagataacattagtaaatatctaccaaattttgaactcctataaagtcattttttttagataaataacaccagaaatatttatgtttaactcaagtaagcgtgaagaacttgtgattagctgaaagcagacttcttattgctggttaagtgaccatattatattaccagctacttggtagagatgcattcattacagaacagattttttttagaggtgagtttgggagctgaaaataataagcataaagtgacagcttcagccatacctcaactatttctacaaaggcttgtttaaatgtttagtgttccttccattatatttagcatgtggtaggatttagtacatcttaacaactttttgggttttacacattttccaaattttctacataaatagatattatttttgaaacaggaaaaaatgttttgttatgttttgtaaattaaaaaataaatgtctgggagaccaggcgtggtggctcatgcctataatcccagcactttgggaggtcgaggaggggggattacttgaggtcaggagtttgagaccggcctggccaacatggtgaaaccccatctctagtaaaaatacaaaaattagccgagcacagtggcgggcacctgtaatcccagctactcaggaggctgaggcaggagaatctcttgaacccaggaggcagacgttgcagtgagccaagattccgccattgcactccagcctgggcgacagagggagactcagtcacacacacacaaaataatgaaattttaaaaaattaaaaataaaaaacgaatgtctggaattgaagaagaaagtcttatggttatttatgaggccaggcgcagtggcttacacctgtcataccagcactttgggaggccgaggtgggcggatcacctgaggtcaggagtttgaaaccagcctgaccaacatgttgaaaccctgtctctagtaagaatacaaaattagccgggcgtggtggcgcatgcctgtaatcccagctactcaggaggctgaggcaggagaatgcttgaacctgggaggtggaagttgcagtgagctgagattgtgccattgcactccaacctgggcaacaatagcaagactttgtctcaaaaattaattaattaaaataaaataaaatgatgaataagtgaatgaatgaatgaatcaaccgatcaatcaataaacaaacaaacaaatcaagtgtctggattttaagcccttcagggtcaaggtcttactgagttgatctgtgatttcccatattctgtttccacatagagccttggttacagtaggcatttaataaatatttgttgaactatatacacaacaattacaatgtgtttcttttcttttgtatgtttatcagggatctgtttatatctacacttttggtaaggagccaaccttaaataaagtcctagatgcttgtgatgggaaatttcaggcaattgactttatcacacctggaacccaatacttcatggtaaagaatattttactgtgtcacagtaggactaaagatacgatgatgttgcaagatttaaatccctatttatatgttattgggtaactttgaaagttcatgggcaaagcaatgcgaayaggaggcagaggctgtccttgaagactgtggtggagatgccagacacttccatcttcaaatctaccccccggttagaatgataccctcatattgtgacttcataatatcatctt

SEQ ID NO: 683744 - DNA, 1243 bp, Homo sapiens
gtcccatagaatgttagcaagaattgtagctatggctgggcgtggtggctcacacttgtaatccaggcactttgggaggccaaggagggaggatcacctgaggccaggagttcaagaccagcctgggcaacacagtgagactatgtttctactaaaaattaaaacatgaactggtcatggcagtgcgggtctgtagtcccaccttctctggaggctgaggcgggagcatcttttgaacccaggagtttgagcttgcaatgagctatgatcgtgccactgtactccagcctgggtgacacagcaagactctgtctcaaaaacaaataaacaaagaattataactacaatgtaggaaatattgaaatctgaaaacatgaccaatgtacttgaattatgcgatctgttcctttaaatgccaaaatatttattccaggagattctagtgaaattgaaatttatcagaataattctaatggagaggatcccctgatttatgtaactctttcacatggttttgcacaatcaggattttttgtgagctaaaaatatattaaatactcattgtctttctgagtgataagcaagccaagatttcatgcataatcttctgctatgttatcctgaaacagaaggctcagttaaccttttgtggccttaaactctgacactttcttcttttgaaataactgccttgtctaactttttaagtttttttttttttttggcttgtttttttgtttgcttgttagttttttaaatctagtttcaggtgggttcagtggctcatgcctgcaatcccagcactttgggaggccgaggcgggcagatcattttaatccaggagtccgagacaagactgtacaacatggcaaaaccttatctctacaaaaaatacaaaaattagttggatgtggtgatgcatacccgtggwccctgctacttgggaggctgaggtgggaggatcacttgagtccaggaggtcaaggctgcagtgagctatgatcatgccactgtactccagcctgggtgacagagtgagactttgtctccaagaaaaaaaaaattaagttccatcaaaatcaaagatttattgtgcttgttatataaccacatttttctctaatatcttttacaattctttgagatatattactgccacttttattatcaaactagcagcctgctcactggctttcctgttctgaacattggcatgagttttaaaactatgacacttgtcttg

SEQ ID NO: 683745 - DNA, 587 bp, Homo sapiens
tgaggcttacagccttaaaatactcaaagagctctcacagaggagaggaaatagacttattcaaactctgcctgaagggtgaagtttccagaaggactattttggttcaacataagaatgactgtctaacaaccacccaacaatgggtggaaaacttccttagaggtgctgagaaagggcccsggcttaggaccgttcaagcagaggacagcagggatgttgtaataagaattccagcagtgggcttgaggttcagctgatgacctccaaggttccttccagctctaagattggatgattctatatctgtaattttccatttccctattgagaagaaattttccacagtgaaaattgttttagtatttgataaaagctgtgggatgatttttgcttttgttgactttaacagggggcttactactctgccccagtggcgtaacaagacacaaacacatcagtgatatttattgggcaggggagagaggcgtttattgttgggtgggaaagtcctgcttgcttacatggggactggcatggaggtgttgggaactccaaatcttgcctcacattgtttctgaaattcc

SEQ ID NO: 683746 - DNA, 587 bp, Homo sapiens
tgaggcttacagccttaaaatactcaaagagctctcacagaggagaggaaatagacttattcaaactctgcctgaagggtgaagtttccagaaggactattttggttcaacataagaatgactgtctaacaaccacccaacaatgggtggaaaacttccttagaggtgctgagaaagggcccgggcttaggaccgttcaagcagaggacagcagggatgttgtaataagaattccagcagtgggcttgaggttcagctgatgacctccaaggttccttccagctctaagattggatgattctatatctgtaattttccatttccctattragaagaaattttccacagtgaaaattgttttagtatttgataaaagctgtgggatgatttttgcttttgttgactttaacagggggcttactactctgccccagtggcgtaacaagacacaaacacatcagtgatatttattgggcaggggagagaggcgtttattgttgggtgggaaagtcctgcttgcttacatggggactggcatggaggtgttgggaactccaaatcttgcctcacattgtttctgaaattcc

SEQ ID NO: 683747 - DNA, 1813 bp, Homo sapiens
tcctgaaggccttcgagtattttactatttggtacaagacttgaattgtttagttttcagtctcattggattacacttcaagattaacccaatttaaattgtatgtttttcaagctgtttgtatatttaattaagggatgggaggggttatttgtcatttacaatattggttttttttattaatgtgaagctaacaaaaaaaattgtatgtaaactgaaaataagaaaatacattagcaggcttaatggttacccttacttgagtccacatgggttggacagtccccactgtccccacattaaattctgtaaataaaagccaccttttgttaaaaatttgctctaataaaacataccaaatcctgaaaaaaaaaaaaaaaaaaaaaaaaaaagacagggtctctctctgtgacccaggcaggagtacartggtgtgatcatagcttactgcagcctcaacctcctgggttcaagggatctcccctctcagcctcccaagtagcagctgggactacagacacgtgccaccatgcctggccaatttttgtggttttttgtagagacagggtctcactatgttccctaggctggtcttgaactcctggcctcaagcaatctgcccacctcagcctcccaaagtgctaggattacaggcattagccacatagcttggccttgtttttttaagttgagataacaacggtatgtgtgatgattaaaggcatgtcaatcatttgagatttaggccaatgcaaagtaagcgctcagcaaatgttagctattgtttttctcctgctaaatgcaccttgttgcttctgctgtccctttgtggcacagatccaagccccttcagcaccccaggaataccccagcagtattcccattaggagcagtctgtgaagcactgggaagaagcaggggggaagggtttgattttgcttcctggtcctcttctgacatgctttaagggcacacttggccactggagggcagcatccactcgctcgttttttaggaaggccattctaaaaaagcattttccagctgcagaggtgcagaagatggaaggaagccttcatgggggcttactggacacggggttagttcttttatcctagtagttcattttatgcatcctattccaggcagcccttagtaaacagatataacctatcacagaatacacagaataggttctataatttttttttttttttttttttttttagagggagtgtcgctctgttgcccaggctggagtgcaatggcgcaatctcggctcactacaccctccgcctcctgggttcaagcagttctccttcctcagtctcctgagtagctgggactacaggcgcatgcaaccacgcctggctaatttttgtagttttagtagagatggggtttcaccatattggtcagcctggtctcgaactcctgacctcaggtgacccacccacttcggcctcccacagttctgggattacaggcatgagccaccgcacccagcctaagttctataaaatattaatacaacctataaaatataacctatataacctatagagagatgttttccttaaagaactgttttctcattgtcttgaatcataaaatgagaattttgtttctaaacctggggtcccctacaggcaccgaggtctccacaggtgacccctgctgtgccacatgcctgcatgcctggacccccactcctgcaggcacacaggagcttcctgttctcccgcttggtccgtgggggctgccaatgaagaacaagggggcagctgaaggagaggtggcagctccttcccaa

SEQ ID NO: 683748 - DNA, 986 bp, Homo sapiens
cagatattagaaaatttagcttctctttttaatccaaataacattttgtaatgtgctaacagtcttctctactctgttaccgataaacttccctcttttatgaaaacaaactgaaatacattttaatatgcatatagtttaattataaacttttatgaagtcactaataatagtacacactaaataatagtagataccatttagaaaattataaatataatcttgaaaatatatttatgacaatgcctgtttcttacacctatttgccccttaatttaaatgttatgaagagctaacacatttgcatatagacaaaagcacaaagataacaaatgttttcagaagactaaattattttcacttaagtttttaaaatattacccattgattacctctgtatattattagctcaaatgtctgtagttaaatatgtatattagcacagaacaaatatactatcattcaaatacttataagataagtgcatataaatttgatttctaaaaacagtacaactctgttgatattaaaagtttactayggaattatgtcaaacattcttaatctggtaagatatccatgagtccatactaataacaataaatgactaaatacattttaaaatgaagaagagataactcttctatacaaaaaattccaaataatttatgtagatattccatcctacatgagggagagcataattcccaccccttaaatttgccatgcacatagtgacttcctttcaaacagtactagatggaacacaacaacaaagaacacctttacagtacagcaggaaaactggcaaacagcacttcagacaagtgatcaacgttagcatcaaaactcaaaaatcatggagatcctcaggcctgcaatcccagcactttgggaggccgaagcgggaggatcacgaggtcaggagatcgagaccatcctggcttacatggtgaaaccccgtctctactaaaaatgcaaaaaat

SEQ ID NO: 683749 - DNA, 635 bp, Homo sapiens
acattattcttaatgtacattgtatatatattgggctagataatatgaattttcctatttttaattatcattaaaatattaaaattacacagamtatattctttataagttgaaattaaatttgaaattaaatagcatacttctaaataatccatgaattaaataactcacaaaaaattagaaaataatttgaatcaaattaattaaaaatacaatactgtatatcacaattaagagagacaatgcagtgcttagaagaaagctggtggtcttgaattcttgtagcaagaaagaagaaagacctaaaatttagaaagtagaaatgagaaatgagttcctaatttaagatattaagaaagaaaagataaaattaaaaccaaagtatgtagaataaaggttataatacaaataaaagcagaaaactttgaaaaggagaatgaacatggaatgaaatcgatggatttaaaagctgatttcttgaaaagataaaatgaatcagcttctaactagactgataagggataaaagaaagaagacgctcattggcaataacatggcaatgttattaacagtttttgggtttttttttttctgttttttgaagtgtgagacagatttttactgttgtgcattcc

SEQ ID NO: 683750 - DNA, 573 bp, Homo sapiens
tgaccccagggcggagatcgaaattcttcttcacaatctctaatagctctctctcactcttctgagaggtaccataatggaaaatggagatagataatggatgagaaactccaatagcataagagacctaaaaggattcaaatgtcgtaagaatcagtgattgcaaagacccatayacttgtataatacgttggtataaaacaagtagttaagtagattactactaaataccctcccacttacatgacttttaatcgttcgttatataaagagtgtatacctgaacaagaaccctccggcacagacctcctttaacaagggattttgccacccaacgagcagcataagcagctgaacggtcgaccttggtataatcctttcctgaaaaggcacctcctccatgagcaccccaaccgccataagtgtccacaatgattttgcgtccagtcaaaccagcatcaccctgaaattacaggatttaagttactttacgcctagtgctttccaagtggattaggttgcctattctgaattcattcagcaaatatcctccgatgattcacatgtaggttt

SEQ ID NO: 683751 - DNA, 573 bp, Homo sapiens
tgaccccagggcggagatcgaaattcttcttcacaatctctaatagctctctctcactcttctgagaggtaccataatggaaaatggagatagataatggatgagaaactccaatagcataagagacctaaaaggattcaaatgtcgtaagaatcagtgattgcaaagacccatatacttgtataatacgttggtataaaacaagtagttaagtagattactactaaataccctcccacttacatgacttttaatcgttcgttatataaagagtgtatacctgaacaagaaccctccggcacagacctcctttaacaagggattttgccacccaacgagcagcataagcagctgaacggtcgaccttggtataatcctttcctgaaaaggcacctcctccatgagcaccccaaccgccataagtgtccacaatgattttscgtccagtcaaaccagcatcaccctgaaattacaggatttaagttactttacgcctagtgctttccaagtggattaggttgcctattctgaattcattcagcaaatatcctccgatgattcacatgtaggttt

SEQ ID NO: 683752 - DNA, 609 bp, Homo sapiens
tgaaatcatttgaagcttaagtcaaatcattttaccataatatgtgttggctttggatgcctgggaaaagtttttcagaggcatggtattccttttcaataggaagacataattcttatcttatttcggaaaaaaatttattgaattgcagtttttaatatttattcttagctctcgcttttgttttcattttgtcttttaatacatgtattagaactactttccctatctttttttctttcaattcctccctcatttacgtctttctttatttttgcttgattttaatttcattttttctattttctactgcctatttcttttaccatattatttagaatatgtattaattttcattttctatttagttttgtcttcacttttgaaatttatttctaaatcatttctcaactctgagagagttcagaagttccttactgacataatttaaaawttttttttctagttctcatttattcttttttcataaattaatttccttgcttattttgaaatattaagctagtcttcccaccaaaaaaaatgttaagtcggaaggtcatgttattttggtatgtctttgctgtttgaaaatagtttattttgctc

SEQ ID NO: 683753 - DNA, 979 bp, Homo sapiens
tctactaaaaatacaaaaatcggactgttgcggtgatgcatgcctgcagtcccagctactcgggaggctgaagaaggggaatcgcttgaacctgggaggtggaggttgcagctagtggagatcacaccattgcactccagcctgggcaacagagcaggactccatctcaaaaaaacaaaaacaaaaacaaaaaacaaacaaacaaacaaaatcttggagcttaaagattttgtaagtcaacattcaccccaccacacacacatgcgcgcacgcrcacacacacacacacacacacacacgcacacagagtccagtaccttgtaaggatggaggtaagcacttttcacccattctttggtttgaatgtagcaacagaagaaacactgttgttctggtttctcatttgatacaatgttaaagggaaaatgaaaggattcataaacatcaacatgtgttccttttccagaggattttctaatttcagctctgccaatgtaaaccatagctcacatccgtaataaccgtgtttccactttcccagtaactcttgccattgtgatttgggtgtaacaaccagcacgtgtacactctacccttctatgatgcaaaacaagacattaataacataatctgagcatactttgaagttaaattctttctccatttgaatttttaaaaatttgaggaaaatattattgtgtatgtgtttgttagatttttgttttgttctctagatcatataaatacaataatgtccctaatccatagttaagaaaagcccctgctttgaaatacgggacttccttgtataataccatagtgatgtatagaaggatttatcctataaatcatcaattatttaataaagaagagttgtgtcctttcttggatttagtgctatgaagaatataaatgtatctatatgtagatataatttgagaacttgtttcacaatagctacctcgcaaatatacccttg

SEQ ID NO: 683754 - DNA, 653 bp, Homo sapiens
ccaacctgtgtgacaaaagcaaaactccatctcaaaagtaaataagtaaacaaataaataaataagaataaacaatctaggacactgttgatgatataaaattgcatggagaatgactaaaatttgtgtatagtgtggtacaatttttactaaataagtccataaaaatgactgaaaatacaggaatttataacattccttatctctaaatcgagattatcagtaattttcttcctcctaattcttctcattttcatgtttcccaaaacccctttctgcaaatataaattgcatttgtagttacaaaaactattaaaacattttatatatatatatatatatacacatatatgtgtgtgtgtgtgtgttatatataggtgtgtgtrtttgtatgtgtttgtatatatatattcttacaggtgtacatatgtgtatgtatatttataatatataattacagaaaaagttcaataagaaaatgtgtatgggtggttcatgcaattcttattttcactttttggagaaagaattctgaggtcatctttgatttaggtagtgatgctccttattttttaatgagggatggtagcttattttcttaattatctctattggaattttggctcaaaacattttgcaaagcattctgattt

SEQ ID NO: 683755 - DNA, 653 bp, Homo sapiens
ccaacctgtgtgacaaaagcaaaactccatctcaaaagtaaataagtaaacaaataaataaataagaataaacaatctaggacactgttgatgatataaaattgcatggagaatgactaaaatttgtgtatagtgtggtacaatttttactaaataagtccataaaaatgactgaaaatacaggaatttataacattccttatctctaaatcgagattatcagtaattttcttcctcctaattcttctcattttcatgtttcccaaaacccctttctgcaaatataaattgcatttgtagttacaaaaactattaaaacattttatatatatatatatatatacacatatatgtgtgtgtgtgtgtgttatatataggtgtgtgtgtktgtatgtgtttgtatatatatattcttacaggtgtacatatgtgtatgtatatttataatatataattacagaaaaagttcaataagaaaatgtgtatgggtggttcatgcaattcttattttcactttttggagaaagaattctgaggtcatctttgatttaggtagtgatgctccttattttttaatgagggatggtagcttattttcttaattatctctattggaattttggctcaaaacattttgcaaagcattctgattt

SEQ ID NO: 683756 - DNA, 995 bp, Homo sapiens
tttacagttgaggtgtgtgaatcttcccattcttgatttatctctgagttgccctactttggaaacttctctctatacagaaatattttaaggctttgtgctttgtcaaatcattaacaatgtcttatctatttttacattccaaaaatttgttggcatgtctcatccactcttattaattttgaacttgtgatattagaccatttcatttgtaaacagttattatattggagcttgaagtagattagaaataaatacatgtatttagtctgccatgcttgactaaaatttttatggtgtattttctattttttttaaaagctacagctctcatattttactcagtttttctttcaaaattaagaaagaatggtatttgtaagttgatactatatatcccaggtgttcctatagggaattccaggatttgactcattggagatactatgcaggggaattgagcatttgatagcaatctgaaataaaatcactcattcatcaattaattaattcatatatattgaatatttactagctgctgggtttgggtttgcaggattgcaaagaagaaacaggaggattttgtgttagagaaaattaaagaagataggtatgattcaaggcatgatgaataaaagtaaacaggaagaaagctagggtaaarggagttcttacatttcttaaactaggctaaacattggtttcattcattatataaatagaaagctaatgaaactttttaagcataagagcaccacaagttaacatgtttaattaaacaaataaacttaatattggaaaatggattgaagtagccgggagacgacaccccaacaccacttagaagattactataatgatctaattgagagatgattgagacttagaaaaaatgtggtaatagaaaaggtgacagacttgaggtttattgaggaaaagatcttaaagaatttgatctatattgggcatgagtggtaaaggagacaaattttcta

SEQ ID NO: 683757 - DNA, 906 bp, Homo sapiens
ggtaatcccagcactttggaaggccaaggcaagcggatcacgaggtcaggagtttgagaccagcctgaccagcatggtgaaacctcgtctctactaaaaatgcaaaaattagccgrgcatggtggcatgtgtctgtagtcccagctactcaggaggctcagactagtgaatcacttgaactggtgaggtggaggttgcagtaagcagagatcatgccactgcactccagcctgggtgacagagcgagactccgtctcaaaaaacaaaaacaaaaaaaagttttgaaaggtaaggaccaacaatgccttggcgggaggaattgagtagggtagtgggaacagtaggcaggctggagagggttgacaaagataataggagataaagaattggagatactggtgcagacagcaattacatgaaatgtgtattcttttaaagatgtgaggtgttatagcctatttgtcagtaggaattatctaattgagagacagagacaaagttgctacagtgggaataactgaaggaacaaatgtgttgagaaagtaaagtccacgtttggagaaactgacttcaggggaccgcagggtcacattctctgctgcaaaaaggagaaacaagaagaaatgagatacagaaggtggtggtaggatgaatttctgtttcatggcttccattttgtcagtaaagcccttcatactagttatccaggttgttgaggttgaagggagtggggaagatgctaaagtattactggtaatgagaggataattttttaaaatatagtgagatagtattgttgtgtagagttacgtgcctatttgaagttggttctatgagtaatagagtaacttgtctgaatcatcatctgcctcagtaaggcacaatcacaagcagtctccactgagc

SEQ ID NO: 683758 - DNA, 906 bp, Homo sapiens
ggtaatcccagcactttggaaggccaaggcaagcggatcacgaggtcaggagtttgagaccagcctgaccagcatggtgaaacctcgtctctactaaaaatgcaaaaattagccgggcatggtggcatgtgtctgtagtcccagctactcaggaggctcagactagtgaatcacttgaactggtgaggtggaggttgcagtaagcagagatcatgccactgcactccagcctgggtgacagagcgagactccgtctcaaaaaacaaaaacaaaaaaaagttttgaaaggtaaggaccaacaatgccttggcgggaggaattgagtagrgtagtgggaacagtaggcaggctggagagggttgacaaagataataggagataaagaattggagatactggtgcagacagcaattacatgaaatgtgtattcttttaaagatgtgaggtgttatagcctatttgtcagtaggaattatctaattgagagacagagacaaagttgctacagtgggaataactgaaggaacaaatgtgttgagaaagtaaagtccacgtttggagaaactgacttcaggggaccgcagggtcacattctctgctgcaaaaaggagaaacaagaagaaatgagatacagaaggtggtggtaggatgaatttctgtttcatggcttccattttgtcagtaaagcccttcatactagttatccaggttgttgaggttgaagggagtggggaagatgctaaagtattactggtaatgagaggataattttttaaaatatagtgagatagtattgttgtgtagagttacgtgcctatttgaagttggttctatgagtaatagagtaacttgtctgaatcatcatctgcctcagtaaggcacaatcacaagcagtctccactgagc

SEQ ID NO: 683759 - DNA, 906 bp, Homo sapiens
ggtaatcccagcactttggaaggccaaggcaagcggatcacgaggtcaggagtttgagaccagcctgaccagcatggtgaaacctcgtctctactaaaaatgcaaaaattagccgggcatggtggcatgtgtctgtagtcccagctactcaggaggctcagactagtgaatcacttgaactggtgaggtggaggttgcagtaagcagagatcatgccactgcactccagcctgggtgacagagcgagactccgtctcaaaaaacaaaaacaaaaaaaagttttgaaaggtaaggaccaacaatgccttggcgggaggaattgagtagggtagtgggaacagtaggcaggctggagagggttgacaaagataataggagataaagaattggagatactggtgcagacagcaattacatgaaatgtgtattcttttaaagatgtgaggtgttatagcctatttgtcagtaggaattatctarttgagagacagagacaaagttgctacagtgggaataactgaaggaacaaatgtgttgagaaagtaaagtccacgtttggagaaactgacttcaggggaccgcagggtcacattctctgctgcaaaaaggagaaacaagaagaaatgagatacagaaggtggtggtaggatgaatttctgtttcatggcttccattttgtcagtaaagcccttcatactagttatccaggttgttgaggttgaagggagtggggaagatgctaaagtattactggtaatgagaggataattttttaaaatatagtgagatagtattgttgtgtagagttacgtgcctatttgaagttggttctatgagtaatagagtaacttgtctgaatcatcatctgcctcagtaaggcacaatcacaagcagtctccactgagc

SEQ ID NO: 683760 - DNA, 671 bp, Homo sapiens
aaagtgttgccccagaaagcatgaattcattgattcatccaagttgtgcaaacacaagcttagagtgggatttcatgggaagtctctgtgcagcatgtgaaaagctcttgaagtagccatgggaccaccctaatgtggatggccttgagagagagtctataaccctgcacctgcaggaggctggaaggagtccgaatagagctggttgccatgtaggtgagaaaggaagattagagctgtctgatatgagtctgaactctaaatattgaagtgatggaaactgagtcttctgagggacmagcacagtcaaatttccaaatgtctattatttataaatgatcacatcctagtctcccaacattttccataacagtggctccaataaccacaggagagacaagacataaatctacatgttctattcagtaattaggcaaacattatcatcgttcacttaatcaaactcttcttggctttaatctgatattatttctttaccatatcttcaaaagcaataagattcttctcatttaatttttacctggaaatttatattatatcaagaggtctcatagactccaaaaattcaatacctggaaggaaccctaatgagtcacttaatttaacttcctctctccagacagaactatccctcaaccatccaactgtgc

SEQ ID NO: 683761 - DNA, 603 bp, Homo sapiens
aaggtgggggagatcaggagctggggaagagagtgaagatggagactgtgcaggagtgcagggtgagatctgtcacccctcccaccagcaatgctattacagggaatgcmgcattaccacatcttccaatttttcaaaagaagacagatatatatatatgtgtgtgtatataatctatatcatcaaattttggtaacactttaaaacaatttcaaatcgtgatcactgcaacatctgcaaacaacattcatttcaaaactctatttaagcattcagagtctttccttagcctccatacttattctagtaaatatgtgacagtgggctagaacagcattgtatttttccaacatagtaagggttttgcatttagataagccagtgattttgttgttccctccccttagtccctatgacacccaaatggaaatttacgtgacatccttgtggtaggtacatctgagcaatccatattatttgttggtccaaatcaggccaagccaacaaacatggtggcactcatccacatcatcttgaaatcctacagcaggactctgatttggacttcagtgacatgcagttagttgaaataaaaggacttga

SEQ ID NO: 683762 - DNA, 1661 bp, Homo sapiens
tgatgcaatctatttcttggtatggaaaataatatcaatgttaagtattttaaataccttcatattaattatgccaatacacctgccgttaattttaaatacaagccaaagtcatattttagctaatagtagataatctcttcatccttgatgaggagaatttttaaaactttttgtaattatttattaggaagataccttgacatgctaatgaaaatatgaaaataagttataattaccacccttataaatatgtagtgaattttaaagttcatattttaataatgggatgcatccatggtggattgaaatgtattgctaaagaagactaacaacaacactaactattttataatcatagttttatttacctcattagggtttatggacacttactaagaactaggtactggggatacaaaattgaataaagctgggatctcgcttcaagttgcttatttcaatcgtgggtaatgtcatgtaacaaatgaatgaatgacaaagggagaaatgtacagaatatagcctgagattacaaaagagtaaaaattagttctgttgttggtgtcagagaaaaggtatttatggcaggcttcaaaaaatggctcagaatgagctaggaagataagactgttaaaggtattccaggcagagaactctgatcaagataccttgtcattctacaaagaaagataaatctatttaataaaaggctggggagaaatcaaggtgaggcagaagaaataggttagaaacaagttacataagatcttctgtgctctgttagggaattttgaattaattccgcaagaagtgggaaattactaaagattttagtgctggtagatggcctgcagtagctggagagaaattgtagtgctgtgctatggagaaaaaattgatgaatggaaatatgtttattgtggaatatttcagtctggagagaggccagctaaaagaaaatgaaggaatttcyagttgggggggggtcttgagtttgcaagttggtgtaatagttgactaataatgtaaatttgggcaaggttattggtgcttccaagcctaacatactcacgtaaaaaataatggtgagtgagacctccctaaaaggttgttgtgaggattagatgaagaaaaataatgttcacatataggagggctgttaagtattagttctctttcctaaaagtaatctagacagtttaactcctaatctgtaactaaaatgataatacttagtctttgttttaaaagattgctaaactaggacatccataaccatagataaccagtatttgatttctatatttttactctttaattttttaaaaaatttctgatagctaagataaaattccttaacaagtatattaattttatttcttcacttttagttataagagagaatggaaaaaacaatgacgatactactcagtgaagtattatttgtgaatgtgaaggtagtgataaaaagtccttttgagctttcttttcagagtaagcgatccctctttcagtatttatgtaggggtggtctaagtgagctaaatatccaaatcacaggggaaatttaagtgtttgtttctggacctaaccccagacttcctgagtcaaaatatctgggtctagaatgccaaaattatgtgtttatcatctcaaca

SEQ ID NO: 683763 - DNA, 613 bp, Homo sapiens
taaaaaagtaaaagcttgcagacctctaaattgaattatttactctttagggtcagataccatattttgtacatatctaacatcacccagattgaagaaaacataaaaggtgctcaaggataattcactgttgctcactccccatgcatgactgccaattcaaaacaggcataagctttactgacaaaatgaatattgtgacccggagggattttgcagcatgtgagcagggctcctgatgttcagtacagagtggttgcacattgagcacatgctccgtataattaattattctgcttactctaccttcattctacatacttcattctacatatggagkcagtttagcttgaaagagagatgataataaaaaagaaacacacacacgcacacacagcacaatagaaaaaataataatacatcccagaaaagacaaagaaatggaaacaacagtaatttctaacataaaatgattacctactgtgtgacaaacacatattatcatctattaattttttcttggccaggcatgttggctcatgcctgtaatcccagcactttgggaggctgggataggaggatcacttgagcgcaggtgtttgagaccagcctg

SEQ ID NO: 683764 - DNA, 1314 bp, Homo sapiens
agtgccacttgatacatttgtttatttggtttgtatgtcccaactagaagataagcttcagaagagcatagacttttgtaaatctgcacttaaaatagggcctggtacacagcaggcactcagtaaatacgaaatgaataataggatcattcagctaataggtgctcgagctagaactgaaacctggctgttctcttgtctgtctcccttcctccctccttccatctctttcgctcatgccattcaatagtcctcccgcttttgggaaggggatatagaagtgttcggactattcaattaaagattcagtaggttaatggattttttttaacacctctttgaccrcataaacatctgtttctgttatttacttctttattgctgatcccctgaccatcaaacaatcagcactttttaccttccctaggtagaagacggctacatgcattaagtaacatcattttgctcatttataggaagctaagactgtctcctattttggtctgccatccaaaatacattataccaaaagcaaaatgagattaaatttccctacatgacacaacttaatttgaaattcagcagaacagaaaaaaatgtgctttaaatcaaagagaatttggattttatactcttctgattataggacaggaaatagctaactactttgaagactgttttgattaaactgatgttaatgaattttaaaatatctttattaaattaatttcttaatttaacagttattgtatgctttccattaaaagaaatgacttatttttatgcagtacaggatataaaaagtttgaaaacaatttttaataattgcattaacacaaagcttctagttatagaagtgtttctcaatccatattcataaataatgggtaccttggaattatttttaattaaatcaaggatgtgtataaagcaaagaaatagaattctagatggcactgtgccatccttgttctttgatggacattagcaagtgggaaaaggcttcattcacttggttacactttgaaataagtggccaatcattattaattcattttgcactcattgtaatggcataaatcatcataaattcatttggtttaaagtgcatataatatattctcccataggaatttggttgtaattgagctactaattaaagtatttttaaaatatgacctttttccccttcttcactattcagatccagcaacctgcagtggctatgtcttcattgatgattttcttttaagtatgaggaatgaaattgtcttaactaggccagttgactagcctaggggggaccaaagcccg

SEQ ID NO: 683765 - DNA, 1314 bp, Homo sapiens
agtgccacttgatacatttgtttatttggtttgtatgtcccaactagaagataagcttcagaagagcatagacttttgtaaatctgcacttaaaatagggcctggtacacagcaggcactcagtaaatacgaaatgaataataggatcattcagctaataggtgctcgagctagaactgaaacctggctgttctcttgtctgtctcccttcctccctccttccatctctttcgctcatgccattcaatagtcctcccgcttttgggaaggggatatagaagtgttcggactattcaattaaagattcagtaggttaatggattttttttaacacctctttgaccacataaacatctgtttctgttatttacttctttattgctgatcccctgaccatcaaacaatcagcactttttaccttccctaggtagaagacggctacatgcattaagtaacatcattttgctcatttataggaagctaagactgtctcctattttggtctgccatccaaaatacattataccraaagcaaaatgagattaaatttccctacatgacacaacttaatttgaaattcagcagaacagaaaaaaatgtgctttaaatcaaagagaatttggattttatactcttctgattataggacaggaaatagctaactactttgaagactgttttgattaaactgatgttaatgaattttaaaatatctttattaaattaatttcttaatttaacagttattgtatgctttccattaaaagaaatgacttatttttatgcagtacaggatataaaaagtttgaaaacaatttttaataattgcattaacacaaagcttctagttatagaagtgtttctcaatccatattcataaataatgggtaccttggaattatttttaattaaatcaaggatgtgtataaagcaaagaaatagaattctagatggcactgtgccatccttgttctttgatggacattagcaagtgggaaaaggcttcattcacttggttacactttgaaataagtggccaatcattattaattcattttgcactcattgtaatggcataaatcatcataaattcatttggtttaaagtgcatataatatattctcccataggaatttggttgtaattgagctactaattaaagtatttttaaaatatgacctttttccccttcttcactattcagatccagcaacctgcagtggctatgtcttcattgatgattttcttttaagtatgaggaatgaaattgtcttaactaggccagttgactagcctaggggggaccaaagcccg

SEQ ID NO: 683766 - DNA, 3597 bp, Homo sapiens
aaggacacatttttatttcagttatcctcccctaaatatgagattttcattcatgggatactagctagcccatgaatttagccaaggatatatcagtagttcatttctataacagaggagaagacataagtcagtatagctgaaaggatcagcattttaaaagaatgatggtagttgatgaatcaatttcacctattaccatgttacactaataagagagaaaaaaggatacttagaaatgaagggtagtaaatatggagcaaataaactaaaatgatataacagagtatacaatcaacgtatggaatatactactaccgaatgttatctcattgaataatgtgaatagattcttcaaacatccaggggattttatgaccatagaccacatttatcttcatataagttaaaaaaatggtaatcggccgggcgcggtggctcacgcctgtaatcccagccctttgggaggccaaggcgggcggatcataaggtcaggagatcgagcccatcccggctaaaacggtgaaaccccgtctctccttaaaatccaaaaaattacccgggcgtagtggcgggcccccgtagtcccagcaacttggaaggctaaggcaggaaaatggcgttaaccttggaggcggagctttcagttaaccgagatcccgcccctgcactccagcctgggggacaaagcgaaaccccgtccccaaaaaaaaaaaaaaaaaaaaaaaaaaaaaaaagatggtaatcaaatctcatgcttctggaaggaaagtgattgcctattatacattattttggataatgttttatttggtttcctctgaattatcggctggcataggaaggatactaataaattgtcttttattctttgggattttttgtttgactcactttgtggctctggtctcccatcgttttgtattgcagttaatcgcgcacatatccaagcattttccatcctcaaattattaactccatactaaggagaactaagttgatcaaacgtgtattttccaaataactattaaagtaagttacatatgataaggggtcaataagtaatgtgctatgcattcttctctcttagggaaaaagtgagctattgaaaagattcaaatagtattcttctgaaacggtgcttagagaaaaagagtatttttttcatctatatttagttataggtaacatgattgattagctgtattatgcagttttattttttccaagattttatcaagttgtttttctgagacatagaaaagatattattattattattattattattgttattattattattattagtttgagacagtttcactcttgttgcccaggctggagtgcaattgcgcgatcttggctcaccacaacctccgtctctgggttcaagtgattctcctgcctcagcctcccaagtacctgagattacaggtgcatgccaccacacctggataattttttttgtatttttaatagagctggggtttcgccatgttggccagtctggtctctaacttctgagctcaggcaatccacccaccttggcctctcaaagtgctgggattacaggcatgagccatggcacctggccccatttagcttctctttcaaaattagcctggaatctcacctcaccacctgcacttggataagtcgccaacacagcccaaagccaatcattgaccacgtggctcactgtaatagcctcctaactggtctccctgcctccactgttctgattcatttcatcgtggcaaccagaattatctgtttatagtaacagacacatcatgttatcttcctgatctaaaccttcccttggcttgccatcttttgtaaaataaaatccaaagatttttgtctttttcaggaccctacatgacctggattatgattgtattttcagcttcatttcctctcgcatgttttctatgttgctttgacccagtcctattctcgccctgctattctgcaagcgcatgcctacagtacccacttttaccattgttctcctggatacttaaagggctgtgtatttcattctgattagtcacctcctcaaagaagtcttgcatggtgattcctatctaaaataggaaccccagccatagtgataccaattattactacctgacattatgttttattttatattttatttgctccttgtctgaattcctcactaaaatgtaatgttcatgagcacgggaacgtcatccactgcaatattcctagtactaagagtaacacctatcacctagtaggtactctgtaaatactggatggattaatggatattacatttatttatatttatgtaaaatatgtttaaagactacatatattgcttgctaaatggagtccaatcaatttgaatgcatgtgcatacatacaggtgctcctaatttgttacacgtgtaattagataagtggcaatttaattgggagggaagagcaatataacctggtaaaaataaaatggagagatgtgaacaaatgagagaagagaaactcaaggaaagatgaaaaggaaacacatgaaaatatggagaatcagtagactaacactcgaaagaaaaagaagcagtgtatgtggggacaacgagtaaagcaaaagagtaatttgtaaagaaaacacatagctctacttcataaggtgtggatattgggatatagcaatgggtgaaacagagtagacagtcagcctggagaccgaaggatgctagttaagatgtgttccttaaagtgctttgcttctgggccrtctgcctcaccaagatattcttcctataacaaatgagagcaggattgctagcaagttaaatgactctggctcctattttttaattttccccccagattcttaacaatgaaagttgttcaggcctgtaagtcagatcatgacatctctataaactcatacatattatttccctggcgccagaagttgatgtgtcatggaaagatggcctacagctatgccttataaagctgaaaaaataaagcacacgatgttcctcctgttgtcaggcattctccttacaactaaaccatgctgtcccccttcattctgtttgttctgacaagtctgcatgtcaggccatctattcccttttacagagctatgttgataaagtgcttggtcatactaaaagtcctggagatctcatcagtgcaagattttcattgaaccagctgcttataaaatttttcatggcaagtcagcaaagcttaagtgtgtagccatggtcagagtacggcttaaatgaactggccaggcagttgctctgtgggttatttgtaacgtgcatgacatctatactcaatgttttgacatgcttgttaatttatcacttgaatcctagaataaactcagaaattgtttttctctttgttttttctatttagaaagtggtcacaattacaattaaattcattttttttgaacttcattagactcttgatgttatcaagggatatctccagaaatatgttaattagattaacgcatctaatccccatatgtgttaatatcactcaagtactttccatgcaatataagaaaaagacttttaaaaactccagttggct

SEQ ID NO: 683767 - DNA, 3597 bp, Homo sapiens
aaggacacatttttatttcagttatcctcccctaaatatgagattttcattcatgggatactagctagcccatgaatttagccaaggatatatcagtagttcatttctataacagaggagaagacataagtcagtatagctgaaaggatcagcattttaaaagaatgatggtagttgatgaatcaatttcacctattaccatgttacactaataagagagaaaaaaggatacttagaaatgaagggtagtaaatatggagcaaataaactaaaatgatataacagagtatacaatcaacgtatggaatatactactaccgaatgttatctcattgaataatgtgaatagattcttcaaacatccaggggattttatgaccatagaccacatttatcttcatataagttaaaaaaatggtaatcggccgggcgcggtggctcacgcctgtaatcccagccctttgggaggccaaggcgggcggatcataaggtcaggagatcgagcccatcccggctaaaacggtgaaaccccgtctctccttaaaatccaaaaaattacccgggcgtagtggcgggcccccgtagtcccagcaacttggaaggctaaggcaggaaaatggcgttaaccttggaggcggagctttcagttaaccgagatcccgcccctgcactccagcctgggggacaaagcgaaaccccgtccccaaaaaaaaaaaaaaaaaaaaaaaaaaaaaaaagatggtaatcaaatctcatgcttctggaaggaaagtgattgcctattatacattattttggataatgttttatttggtttcctctgaattatcggctggcataggaaggatactaataaattgtcttttattctttgggattttttgtttgactcactttgtggctctggtctcccatcgttttgtattgcagttaatcgcgcacatatccaagcattttccatcctcaaattattaactccatactaaggagaactaagttgatcaaacgtgtattttccaaataactattaaagtaagttacatatgataaggggtcaataagtaatgtgctatgcattcttctctcttagggaaaaagtgagctattgaaaagattcaaatagtattcttctgaaacggtgcttagagaaaaagagtatttttttcatctatatttagttataggtaacatgattgattagctgtattatgcagttttattttttccaagattttatcaagttgtttttctgagacatagaaaagatattattattattattattattattgttattattattattattagtttgagacagtttcactcttgttgcccaggctggagtgcaattgcgcgatcttggctcaccacaacctccgtctctgggttcaagtgattctcctgcctcagcctcccaagtacctgagattacaggtgcatgccaccacacctggataattttttttgtatttttaatagagctggggtttcgccatgttggccagtctggtctctaacttctgagctcaggcaatccacccaccttggcctctcaaagtgctgggattacaggcatgagccatggcacctggccccatttagcttctctttcaaaattagcctggaatctcacctcaccacctgcacttggataagtcgccaacacagcccaaagccaatcattgaccacgtggctcactgtaatagcctcctaactggtctccctgcctccactgttctgattcatttcatcgtggcaaccagaattatctgtttatagtaacagacacatcatgttatcttcctgatctaaaccttcccttggcttgccatcttttgtaaaataaaatccaaagatttttgtctttttcaggaccctacatgacctggattatgattgtattttcagcttcatttcctctcgcatgttttctatgttgctttgacccagtcctattctcgccctgctattctgcaagcgcatgcctacagtacccacttttaccattgttctcctggatacttaaagggctgtgtatttcattctgattagtcacctcctcaaagaagtcttgcatggtgattcctatctaaaataggaaccccagccatagtgataccaattattactacctgacattatgttttattttatattttatttgctccttgtctgaattcctcactaaaatgtaatgttcatgagcacgggaacgtcatccactgcaatattcctagtactaagagtaacacctatcacctagtaggtactctgtaaatactggatggattaatggatattacatttatttatatttatgtaaaatatgtttaaagactacatatattgcttgctaaatggagtccaatcaatttgaatgcatgtgcatacatacaggtgctcctaatttgttacacgtgtaattagataagtggcaatttaattgggagggaagagcaatataacctggtaaaaataaaatggagagatgtgaacaaatgagagaagagaaactcaaggaaagatgaaaaggaaacacatgaaaatatggagaatcagtagactaacactcgaaagaaaaagaagcagtgtatgtggggacaacgagtaaagcaaaagagtaatttgtaaagaaaacacatagctctacttcataaggtgtggatattgggatatagcaatgggtgaaacagagtagacagtcagcctggagaccgaaggatgctagttaagatgtgttccttaaagtgctttgcttctgggccgtctgcctcaccaagatattcttcctataacaaatgagagcaggattgctagcaagttaaatgactctggctcctwttttttaattttccccccagattcttaacaatgaaagttgttcaggcctgtaagtcagatcatgacatctctataaactcatacatattatttccctggcgccagaagttgatgtgtcatggaaagatggcctacagctatgccttataaagctgaaaaaataaagcacacgatgttcctcctgttgtcaggcattctccttacaactaaaccatgctgtcccccttcattctgtttgttctgacaagtctgcatgtcaggccatctattcccttttacagagctatgttgataaagtgcttggtcatactaaaagtcctggagatctcatcagtgcaagattttcattgaaccagctgcttataaaatttttcatggcaagtcagcaaagcttaagtgtgtagccatggtcagagtacggcttaaatgaactggccaggcagttgctctgtgggttatttgtaacgtgcatgacatctatactcaatgttttgacatgcttgttaatttatcacttgaatcctagaataaactcagaaattgtttttctctttgttttttctatttagaaagtggtcacaattacaattaaattcattttttttgaacttcattagactcttgatgttatcaagggatatctccagaaatatgttaattagattaacgcatctaatccccatatgtgttaatatcactcaagtactttccatgcaatataagaaaaagacttttaaaaactccagttggct

SEQ ID NO: 683768 - DNA, 3597 bp, Homo sapiens
aaggacacatttttatttcagttatcctcccctaaatatgagattttcattcatgggatactagctagcccatgaatttagccaaggatatatcagtagttcatttctataacagaggagaagacataagtcagtatagctgaaaggatcagcattttaaaagaatgatggtagttgatgaatcaatttcacctattaccatgttacactaataagagagaaaaaaggatacttagaaatgaagggtagtaaatatggagcaaataaactaaaatgatataacagagtatacaatcaacgtatggaatatactactaccgaatgttatctcattgaataatgtgaatagattcttcaaacatccaggggattttatgaccatagaccacatttatcttcatataagttaaaaaaatggtaatcggccgggcgcggtggctcacgcctgtaatcccagccctttgggaggccaaggcgggcggatcataaggtcaggagatcgagcccatcccggctaaaacggtgaaaccccgtctctccttaaaatccaaaaaattacccgggcgtagtggcgggcccccgtagtcccagcaacttggaaggctaaggcaggaaaatggcgttaaccttggaggcggagctttcagttaaccgagatcccgcccctgcactccagcctgggggacaaagcgaaaccccgtccccaaaaaaaaaaaaaaaaaaaaaaaaaaaaaaaagatggtaatcaaatctcatgcttctggaaggaaagtgattgcctattatacattattttggataatgttttatttggtttcctctgaattatcggctggcataggaaggatactaataaattgtcttttattctttgggattttttgtttgactcactttgtggctctggtctcccatcgttttgtattgcagttaatcgcgcacatatccaagcattttccatcctcaaattattaactccatactaaggagaactaagttgatcaaacgtgtattttccaaataactattaaagtaagttacatatgataaggggtcaataagtaatgtgctatgcattcttctctcttagggaaaaagtgagctattgaaaagattcaaatagtattcttctgaaacggtgcttagagaaaaagagtatttttttcatctatatttagttataggtaacatgattgattagctgtattatgcagttttattttttccaagattttatcaagttgtttttctgagacatagaaaagatattattattattattattattattgttattattattattattagtttgagacagtttcactcttgttgcccaggctggagtgcaattgcgcgatcttggctcaccacaacctccgtctctgggttcaagtgattctcctgcctcagcctcccaagtacctgagattacaggtgcatgccaccacacctggataattttttttgtatttttaatagagctggggtttcgccatgttggccagtctggtctctaacttctgagctcaggcaatccacccaccttggcctctcaaagtgctgggattacaggcatgagccatggcacctggccccatttagcttctctttcaaaattagcctggaatctcacctcaccacctgcacttggataagtcgccaacacagcccaaagccaatcattgaccacgtggctcactgtaatagcctcctaactggtctccctgcctccactgttctgattcatttcatcgtggcaaccagaattatctgtttatagtaacagacacatcatgttatcttcctgatctaaaccttcccttggcttgccatcttttgtaaaataaaatccaaagatttttgtctttttcaggaccctacatgacctggattatgattgtattttcagcttcatttcctctcgcatgttttctatgttgctttgacccagtcctattctcgccctgctattctgcaagcgcatgcctacagtacccacttttaccattgttctcctggatacttaaagggctgtgtatttcattctgattagtcacctcctcaaagaagtcttgcatggtgattcctatctaaaataggaaccccagccatagtgataccaattattactacctgacattatgttttattttatattttatttgctccttgtctgaattcctcactaaaatgtaatgttcatgagcacgggaacgtcatccactgcaatattcctagtactaagagtaacacctatcacctagtaggtactctgtaaatactggatggattaatggatattacatttatttatatttatgtaaaatatgtttaaagactacatatattgcttgctaaatggagtccaatcaatttgaatgcatgtgcatacatacaggtgctcctaatttgttacacgtgtaattagataagtggcaatttaattgggagggaagagcaatataacctggtaaaaataaaatggagagatgtgaacaaatgagagaagagaaactcaaggaaagatgaaaaggaaacacatgaaaatatggagaatcagtagactaacactcgaaagaaaaagaagcagtgtatgtggggacaacgagtaaagcaaaagagtaatttgtaaagaaaacacatagctctacttcataaggtgtggatattgggatatagcaatgggtgaaacagagtagacagtcagcctggagaccgaaggatgctagttaagatgtgttccttaaagtgctttgcttctgggccgtctgcctcaccaagatattcttcctataacaaatgagagcaggattgctagcaagttaaatgactctggctcctattttttaattttycccccagattcttaacaatgaaagttgttcaggcctgtaagtcagatcatgacatctctataaactcatacatattatttccctggcgccagaagttgatgtgtcatggaaagatggcctacagctatgccttataaagctgaaaaaataaagcacacgatgttcctcctgttgtcaggcattctccttacaactaaaccatgctgtcccccttcattctgtttgttctgacaagtctgcatgtcaggccatctattcccttttacagagctatgttgataaagtgcttggtcatactaaaagtcctggagatctcatcagtgcaagattttcattgaaccagctgcttataaaatttttcatggcaagtcagcaaagcttaagtgtgtagccatggtcagagtacggcttaaatgaactggccaggcagttgctctgtgggttatttgtaacgtgcatgacatctatactcaatgttttgacatgcttgttaatttatcacttgaatcctagaataaactcagaaattgtttttctctttgttttttctatttagaaagtggtcacaattacaattaaattcattttttttgaacttcattagactcttgatgttatcaagggatatctccagaaatatgttaattagattaacgcatctaatccccatatgtgttaatatcactcaagtactttccatgcaatataagaaaaagacttttaaaaactccagttggct

SEQ ID NO: 683769 - DNA, 669 bp, Homo sapiens
tgtgtgtgtgtgtgtgtgtgtgtgtgtgtgtgtgttggtttagattttgcttcaataaaggcagtcaaatcacaaccttgcttagaaatgagacttttcttcaaaaactgtaaacaggattttagatacatatctaggcaatatgcaaatgtaggcttctttaaatcaaaggtagttctgggcaggtattttaaccatgagttatatagtttggctctgtgtccccacccaactctcttctcaaattataasccctatgtgttgagcgaggaacctgtaatcctcatctgtagagagtagaggaagggaggtgaccagatcatcggggcggttccctccatgcttttcttgtgataactagtgagtgctcaaagtatctgatggttttataagtgtttgacagttcctcctataagcttgctctcttttgcctgccaccatgtaagatgtgcctgcttccccttcccctgtgattgtttcttgaggcctctgtgtgagttcctccatgtggaactgtgagtcaattaaacctctttcctttataaatcacctagtctcaggtctttatagcagtgtgaaaatggactaatacaataagcaaatgcttatttcatgtagaactggtaaaataggtttaactaataattaaattaaacatcaaaccacctc

SEQ ID NO: 683770 - DNA, 669 bp, Homo sapiens
tgtgtgtgtgtgtgtgtgtgtgtgtgtgtgtgtgttggtttagattttgcttcaataaaggcagtcaaatcacaaccttgcttagaaatgagacttttcttcaaaaactgtaaacaggattttagatacatatctaggcaatatgcaaatgtaggcttctttaaatcaaaggtagttctgggcaggtattttaaccatgagttatatagtttggctctgtgtccccacccaactctcttctcaaattataagccctatgtgttgagcgaggaacctgtaatcctcatctgtagagagtagaggaagggaggtgaccagatcatcggggcggttycctccatgcttttcttgtgataactagtgagtgctcaaagtatctgatggttttataagtgtttgacagttcctcctataagcttgctctcttttgcctgccaccatgtaagatgtgcctgcttccccttcccctgtgattgtttcttgaggcctctgtgtgagttcctccatgtggaactgtgagtcaattaaacctctttcctttataaatcacctagtctcaggtctttatagcagtgtgaaaatggactaatacaataagcaaatgcttatttcatgtagaactggtaaaataggtttaactaataattaaattaaacatcaaaccacctc

SEQ ID NO: 683771 - DNA, 613 bp, Homo sapiens
taagtagcaggctaagtagatagcacttaaggctatccaaaactccttaagacgtattaaaaaaacacaacataaccttaaactagtactgaacagatgcctgaaagaaacaagagcaaatygtctcaggaggtaggtaataggatgacatgatccttgacctcagcttattcctaaaaggattttttaaggtcagtaaataccacacagttaaaataacccaacccacaaggaaataaagctcattgagccaaggacaagtcaaaatacaaacagctaccaaactatctaattatctataaagctattatacttactatgtttacagaaaaataacaagtttgaatcttagggaaaaggagatgaaatgagcaaataatacaactagaaattataaatataataactgactatatggggtgaatagtagattagacataattaaagaaaaaattagtaaaatggaagataggttacaattacctagaaagcagcatgaaaacagaaaaataggtaaatcatagaagagggtataagacttagatgattaagatgttctaacacacttactgggaatcgcggaaagagaaaatattttaagaagactgaaatt

SEQ ID NO: 683772 - DNA, 656 bp, Homo sapiens
tgttgagtgagcaaatccaggcgagagatgttttagggatgctgtctctgaacacacttgctccacacacgagtgaactgagtgtggcctgagacccctggtccagctgagcgccctgcttctgtgttggcaggacacatttcacaggcaaacgtgtgagtgtgagcacattctggatcattcgtctttttctcttggaaataaattataataagattttcactcgcaaactcaccaaaacgtgtgttctcccttcgaggtcatggaaaattctctcacataataacataggataaagacagatttggcttcctgaattcattttatgaaaatcagacttggaggcattctagaaggagtccaaagaggaaaatttgatttcaggaaccttttgtcatcaactttttcaacactgrgttggcaagctacctcttaagcctgccagagccaatgtttcatcacatccatttctcattgaaccactgggtttcttctacttcaaactaaaaaccctgcaggatattgtgtctataaaaataattttagaaagatttttccaaccttatatttaaaaggatttttttgtctgtttgcttaattaaattcattttattttaaaagccaaaccaaattgttttgtgttgtagtgttttgtg

SEQ ID NO: 683773 - DNA, 1298 bp, Homo sapiens
ttgacagagtggtgagtgagctgctgcagcatcgtccagtacatgtactgcaggcaatggacgcgaggtggaatgagcagckgcaggcttagcctagcatcccggaggcagctgggcacagcctgccctgctcacgaccgccttccctggcctttccccggtccccagctcccccagccagctctctccagtcccttatagtaaggacacattgtcctcctggggagctgcccagagacctcccccaagctcttccatctccttcacaaactccaacctcagctcctctgctacctcaagcccacactgaccaccttctccaagcagcatcccctaagggctgaccttactgctcagtccctcagcctgcaacatgcccttgtgtacaacactccactctgccctgggaacaccctccagtcccgtattgggagaatctaagtccacaccacagcagaggcttctcgtgagcaaagccctcgctcccattctcccatgccgggccttgggatggacactgggcaatggagctgaacgattcaaacacgatgtcagggcaggccaaggagcgagggagagctgtgggcggtcaggctgtgggcagagggggccaaggcaccacgtgcccaccgagacgctcagatgcaatgcacgcccatgcctgtcccaggccacagcttctcacattgccattcctacagccacacatcccggcataggaaacccaaaagatggattcttgcccacgagcccctgcaaggaggccccttaatttcttcttactagccctaaggagcccagaataatattaaattagaagggaaattagggaaactagaaatagttcaatgattcagaggatattcaaaaggccaagaaacaaatgaaccataaacatatgactaacatgcccagctgcattagtcattagggaaatgcaaactgaagtcacaatcccaggcacggtttgaacgaaaaggcaaacaccaccagagctgacgaggatgtggagcaggcaaaatgcttacatgctgctagtgggagtatatactggtataaccacttcaaaaaactgtttggaagtacccctaggctgagtctatgtgtactctatgacccagcaagcctattactggatatacactcaatagaaatgtgcacatatgtgcaccaaaaggtgtgtactaaaatgttcacagtaactctgtgatagccaaaaacaacggaaacaaccaaatgtccatcgattgtggaattgatgtgacttacaaaataagtcagttggccgggcgcagtgg

SEQ ID NO: 683774 - DNA, 1298 bp, Homo sapiens
ttgacagagtggtgagtgagctgctgcagcatcgtccagtacatgtactgcaggcaatggacgcgaggtggaatgagcagcggcaggcttagcctagcatcccggaggcagctgggcacagcctgccctgctcacgaccgccttccctggcctttccccggtccccagctcccccagccagctctctccagtcccttatagtaaggacacattgtcctcctggggagctgcccagagacctcccccaagctcttccatctccttcacaarctccaacctcagctcctctgctacctcaagcccacactgaccaccttctccaagcagcatcccctaagggctgaccttactgctcagtccctcagcctgcaacatgcccttgtgtacaacactccactctgccctgggaacaccctccagtcccgtattgggagaatctaagtccacaccacagcagaggcttctcgtgagcaaagccctcgctcccattctcccatgccgggccttgggatggacactgggcaatggagctgaacgattcaaacacgatgtcagggcaggccaaggagcgagggagagctgtgggcggtcaggctgtgggcagagggggccaaggcaccacgtgcccaccgagacgctcagatgcaatgcacgcccatgcctgtcccaggccacagcttctcacattgccattcctacagccacacatcccggcataggaaacccaaaagatggattcttgcccacgagcccctgcaaggaggccccttaatttcttcttactagccctaaggagcccagaataatattaaattagaagggaaattagggaaactagaaatagttcaatgattcagaggatattcaaaaggccaagaaacaaatgaaccataaacatatgactaacatgcccagctgcattagtcattagggaaatgcaaactgaagtcacaatcccaggcacggtttgaacgaaaaggcaaacaccaccagagctgacgaggatgtggagcaggcaaaatgcttacatgctgctagtgggagtatatactggtataaccacttcaaaaaactgtttggaagtacccctaggctgagtctatgtgtactctatgacccagcaagcctattactggatatacactcaatagaaatgtgcacatatgtgcaccaaaaggtgtgtactaaaatgttcacagtaactctgtgatagccaaaaacaacggaaacaaccaaatgtccatcgattgtggaattgatgtgacttacaaaataagtcagttggccgggcgcagtgg

SEQ ID NO: 683775 - DNA, 600 bp, Homo sapiens
aaatttctttctgcctcaaatctacgttttgatgctctttttcttactcccatttacaactactagttaattaaattggctctataaaatacattctgaaagccaccattcttccaaacagcagccagagttactcctttaaaatcgaagtcagaaaataycacttctttgcacagaaaataaacaaacaaacaaacagcagtttttactttcactcaggttgaaattcagtctttcaatatgacatataccctggaaaagatcactcccattcttctctgacctcctctggctcccttgttcatgcttcctcagccaggacagccaatgagtgattctcctggcacacctggttcattccgatcctggcttttacacattctgctgcttctgttcacactgttctttctccagagatctgcaaggactgccttcttccttcttcttgggctcccctatcaagtaacttccatgattgttttgtacaaaacaataactctccccttttcactctgtctcactggctttgctttatctgtttatagcatttagagcctctctcctcccctgccatgtgaggtgcttaattgtggaatcatt

SEQ ID NO: 683776 - DNA, 1015 bp, Homo sapiens
ttacaagcctcatgtggctgtcaagtcttgaaaggcaaaggctgtatgggatgaagaggaaagagcagagtggcctgggatgcactgaagggaggggaggctgctttggagctcaggggagtggaaggaaggccgatggcgggggcagggcacaccactgcactctgctttcctgaggcgtccatctgacctctgacttagaaacacagtggattcatgccaggcccctgtggcagtcctggtccatggctggagtttggaaatacctgacctttgctctctaggtgacaagtgacctgggcggcagatcagctccagattctaatgaactctcccccatgtaaggctttttttgtaggccctggaaacagattgggagagccgatccccatttccaaggcccatgagcacatttttggaatggtccttatgaacgactggagtggtaattactggagctctgctcctgtagagatgacggggaggaggctggggacttggggcaatttcatagaagctgaagatctggtgcaggtcaaaagtggcaggtgatgcagtgactgagagtgggggtctgggtatcaaacagactttcagctctaagaactcgggccactcacttaactcctctgagctccarttttctcgagtggctagggacacggctgacatcataactaatatttactgagcacttatgtgtcaggccctgtgcttaacacccttcgtatattctcccgctgatccctacacggtatgtgcaatattatcttcccattttacagatgaggaactgaggcacagggagatttcagttagttgctgaactaagatttgaagcaaaacagtccagcttctgagcctgagctctcaaccctttgccatacgtgggaggaagatggcaccataagccccagaaagtgtctctctcatagtttgagaatgagcttccagccccttcctgggagatatcctgaccaccgtttggtcatccttctctttgctgtaacctggc

SEQ ID NO: 683777 - DNA, 1319 bp, Homo sapiens
  misc_feature 608, 609, 610, 611, 612, 613, 614, 615, 616, 617, 618, 619,620, 621, 622, 623, 624, 625, 626, 627, 628, 629, 630, 631,632, 633, 634, 635, 636, 637, 638, 639, 640, 641, 642, 643,644, 645, 646, 647, 648, 649, 650, 651, 652, 653, 654: n = A,T,C or G
  misc_feature 655, 656, 657, 658, 659, 660, 661, 662, 663, 664, 665, 666,667, 668, 669, 670, 671, 672, 673, 674, 675, 676, 677, 678,679, 680, 681, 682, 683, 684, 685, 686, 687, 688, 689, 690,691, 692, 693, 694, 695, 696, 697, 698, 699, 700, 701: n = A,T,C or G
  misc_feature 702, 703, 704, 705, 706, 707: n = A,T,C or G
gagaaataaaaaagaaaagattataatatgaatgtttcataaagattggcatggctttaatctttcttttctgttctataagtttttataagttatggagacaaacctatcggcatcaaagtcaaaatgctgaaaagagctcatctctttttctgacagctctgtcactctagcctttatcatatgagattttttttaaataacacatttgttgagatgtttcacatgccctacgattcacccatttaaaaatgtgcaattcaataatttttaatatattcccacagttatgcaaccatcaccacaaacaatttcagaayatttttattgctccccgcaaaaaacctcatacccattttccctcaacttccccatccctagacaaccaacaatttactttctgtcactatgagacatttttaaatgacagattcaaaggttaaattaatacatgaattaaaaattatataacagaaaagttttgtaactaaaacgtaaatcatttcttgaatactcagaaataaaaaatgttaaaaatgtgtaagaaataaatgttataatcaaccatgtacttatatatcctctactgtggtgctgacactataaannnnnnnnnnnnnnnnnnnnnnnnnnnnnnnnnnnnnnnnnnnnnnnnnnnnnnnnnnnnnnnnnnnnnnnnnnnnnnnnnnnnnnnnnnnnnnnnnnnnttcatttggctatttgttcagtgtacctgcttcagtaaaatggcttttcatatttttgcccatttattctcttactaaggtctctctcagaccaaaagttttaatttgagaaagtctgtttaaacattttatttattcatttcttttttcttcaacttttatttaagttccagggtacatgtgcaggtttgttacataggtaaacgtgtgcaatggtggtgtgctgcatgtatcgacccatcacctaggtattaagcccagcatgcattagctattcttgttgatgctctccctccccgagcccctcgacaggccccagtgtgtgttgttctctgccatgtgtccatgtgttctcaattatggataattaacaagtgttttgatgacttatctttcaatgctgtggttacagctcaacctgggtgtgggaatcatgaggagcactaatctgcatgtctaaaacagagcaggattagtttccaactgcatatttgaatgaattcctgttgctcgaaaaatttcatgtttttgagacttttctgtataaaacaagctaaatgtgtcatgtaaaactccaaaaacagagttgtaagcactcaatacagacttaca

SEQ ID NO: 683778 - DNA, 1415 bp, Homo sapiens
ttctcgctcactataattcctcagtcaccatttatgaacattctttacktctgttaaaggtttgatttaacttctgaaggtgaaaatacttatcccacatcagaaaataaccaaagtgtctcctcaaatagctccaaatccaaagaagtatattagagatagataagattcttctgaacatgaaattttattgatggagaatgctataaaattatcatttatatatatgctcatgtgtggggctttttttgtacatcttactgataaatatagaggtaatgaattccccatgatgattaactcagtgaaaatcctcgaagttccataaactctcataaattttcttgaaccttatcattgcaagagattattcaaaatgatgttgaatcaaagtctgacacattaaaacgatacaaccaaaagttatagccttagtataaattgttactcccatcacattgaacgttagtattggcttaaatgtcatcctcttgataaaaaggttgcaatttaagttagttctttacctactcctaataattttattgcaagttcatacaagtaccaccattagtagatgtaactaatacctgtacatactaaacttcatgttcctaacagtttgcttaaaggcaaagtattgcctaatttctgtttttgataaatacgaaaaaaatcaatctttcattactgggcttatatttcagtaataataataattgtaaaagtaagcttttaatatgcacgattctggttatttccgggagatttgatcttgaaaggtgaaacatattaaaattagagggctctaccctaagccccttcaatgtgttgcagaagtcctttaatgttggattagaagagatatccaatattagtgaatataatggctatactttctttagccccgggatcagctttccttttctaaggaaaattattccagatctatcgatttttctctttctattacagtctgttcaagtaatccttaaagtagacatggaagcaatataaaatagtggttaaattctgaagtttgctccacttaggttcgaatcctaatttagccaacatgcaaatgtgtaatctagagcaagctgcttaagacctctaagcctctattttctcatatgtacaattggagaaatagacatgtctacttcattattcctgtatgaattaaatgaaataaaacacataaagcacttaatatactacctggaataaaggtcagtattgttgttagaatgaatacaatagaacttgcaaattgatcaatttacctttattgacttattttaaaatatgcaatctctaagcattttttaatgactaccttgtgtatagaacagatattctacataaaattccaattagtttattggatgagaaaaaaaatggtttctgttttg

SEQ ID NO: 683779 - DNA, 1415 bp, Homo sapiens
ttctcgctcactataattcctcagtcaccatttatgaacattctttacgtctgttaaaggtttgatttaacttctgaaggtgaaaatacttatcccacatcagaaaataaccaaagtgtctcctcaaatagctccaaatccaaagaagtatattagagatagataagattcttctgaacatgaaattttattgatggagaatgctataaaattatcatttatatatatgctcatgtgtggggctttttytgtacatcttactgataaatatagaggtaatgaattccccatgatgattaactcagtgaaaatcctcgaagttccataaactctcataaattttcttgaaccttatcattgcaagagattattcaaaatgatgttgaatcaaagtctgacacattaaaacgatacaaccaaaagttatagccttagtataaattgttactcccatcacattgaacgttagtattggcttaaatgtcatcctcttgataaaaaggttgcaatttaagttagttctttacctactcctaataattttattgcaagttcatacaagtaccaccattagtagatgtaactaatacctgtacatactaaacttcatgttcctaacagtttgcttaaaggcaaagtattgcctaatttctgtttttgataaatacgaaaaaaatcaatctttcattactgggcttatatttcagtaataataataattgtaaaagtaagcttttaatatgcacgattctggttatttccgggagatttgatcttgaaaggtgaaacatattaaaattagagggctctaccctaagccccttcaatgtgttgcagaagtcctttaatgttggattagaagagatatccaatattagtgaatataatggctatactttctttagccccgggatcagctttccttttctaaggaaaattattccagatctatcgatttttctctttctattacagtctgttcaagtaatccttaaagtagacatggaagcaatataaaatagtggttaaattctgaagtttgctccacttaggttcgaatcctaatttagccaacatgcaaatgtgtaatctagagcaagctgcttaagacctctaagcctctattttctcatatgtacaattggagaaatagacatgtctacttcattattcctgtatgaattaaatgaaataaaacacataaagcacttaatatactacctggaataaaggtcagtattgttgttagaatgaatacaatagaacttgcaaattgatcaatttacctttattgacttattttaaaatatgcaatctctaagcattttttaatgactaccttgtgtatagaacagatattctacataaaattccaattagtttattggatgagaaaaaaaatggtttctgttttg

SEQ ID NO: 683780 - DNA, 1415 bp, Homo sapiens
ttctcgctcactataattcctcagtcaccatttatgaacattctttacgtctgttaaaggtttgatttaacttctgaaggtgaaaatacttatcccacatcagaaaataaccaaagtgtctcctcaaatagctccaaatccaaagaagtatattagagatagataagattcttctgaacatgaaattttattgatggagaatgctataaaattatcatttatatatatgctcatgtgtggggctttttttgtacatcttactgataaatatagaggtaatgaattccccatgatgattaactcagtgaaaatcctcgaagttccataaactctcataaattttcttgaaccttatcattgcaagagattattcaaaatgatgttgaatcaaagtctgacacattaaaacgatacaaccaaaagttatagccttagtataaattgttactcccatcacattgaacgttagtattggcttaaatgtcatcctcttgataaaaaggttgcaatttaagttagttctttacctactcctaataattttattgcaagttcatacaagtaccaccattagtagatgtaactaatacctgtacatactaaacttcatgttcctaacagtttgcttaaaggcaaagtattgcctaatttctgtttttgataaatacgaaaaaaatcaatctttcattactgggcttatatttcagtaataataataattgtaaaagtaagcttttaatatgcacgattctggttatttccgggagatttgatcttgaaaggtgaaacatattaaaattagagggctctaccctaagccccttcaatgtgttgcagaagtcctttaatgttggattagaagagatatccaatattagtgaatataatggctatactttctttagccccgggatcagctttccttttctaaggaaaattwttccagatctatcgatttttctctttctattacagtctgttcaagtaatccttaaagtagacatggaagcaatataaaatagtggttaaattctgaagtttgctccacttaggttcgaatcctaatttagccaacatgcaaatgtgtaatctagagcaagctgcttaagacctctaagcctctattttctcatatgtacaattggagaaatagacatgtctacttcattattcctgtatgaattaaatgaaataaaacacataaagcacttaatatactacctggaataaaggtcagtattgttgttagaatgaatacaatagaacttgcaaattgatcaatttacctttattgacttattttaaaatatgcaatctctaagcattttttaatgactaccttgtgtatagaacagatattctacataaaattccaattagtttattggatgagaaaaaaaatggtttctgttttg

SEQ ID NO: 683781 - DNA, 1415 bp, Homo sapiens
ttctcgctcactataattcctcagtcaccatttatgaacattctttacgtctgttaaaggtttgatttaacttctgaaggtgaaaatacttatcccacatcagaaaataaccaaagtgtctcctcaaatagctccaaatccaaagaagtatattagagatagataagattcttctgaacatgaaattttattgatggagaatgctataaaattatcatttatatatatgctcatgtgtggggctttttttgtacatcttactgataaatatagaggtaatgaattccccatgatgattaactcagtgaaaatcctcgaagttccataaactctcataaattttcttgaaccttatcattgcaagagattattcaaaatgatgttgaatcaaagtctgacacattaaaacgatacaaccaaaagttatagccttagtataaattgttactcccatcacattgaacgttagtattggcttaaatgtcatcctcttgataaaaaggttgcaatttaagttagttctttacctactcctaataattttattgcaagttcatacaagtaccaccattagtagatgtaactaatacctgtacatactaaacttcatgttcctaacagtttgcttaaaggcaaagtattgcctaatttctgtttttgataaatacgaaaaaaatcaatctttcattactgggcttatatttcagtaataataataattgtaaaagtaagcttttaatatgcacgattctggttatttccgggagatttgatcttgaaaggtgaaacatattaaaattagagggctctaccctaagccccttcaatgtgttgcagaagtcctttaatgttggattagaagagatatccaatattagtgaatataatggctatactttctttagccccgggatcagctttccttttctaaggaaaattattccagatctatcgatttttctctttctattacagtctgttcaagtaatccttaaagtagacatggaagcaatataaaatagtggttaaattctgaagtttgctccacttaggttygaatcctaatttagccaacatgcaaatgtgtaatctagagcaagctgcttaagacctctaagcctctattttctcatatgtacaattggagaaatagacatgtctacttcattattcctgtatgaattaaatgaaataaaacacataaagcacttaatatactacctggaataaaggtcagtattgttgttagaatgaatacaatagaacttgcaaattgatcaatttacctttattgacttattttaaaatatgcaatctctaagcattttttaatgactaccttgtgtatagaacagatattctacataaaattccaattagtttattggatgagaaaaaaaatggtttctgttttg

SEQ ID NO: 683782 - DNA, 1415 bp, Homo sapiens
ttctcgctcactataattcctcagtcaccatttatgaacattctttacgtctgttaaaggtttgatttaacttctgaaggtgaaaatacttatcccacatcagaaaataaccaaagtgtctcctcaaatagctccaaatccaaagaagtatattagagatagataagattcttctgaacatgaaattttattgatggagaatgctataaaattatcatttatatatatgctcatgtgtggggctttttttgtacatcttactgataaatatagaggtaatgaattccccatgatgattaactcagtgaaaatcctcgaagttccataaactctcataaattttcttgaaccttatcattgcaagagattattcaaaatgatgttgaatcaaagtctgacacattaaaacgatacaaccaaaagttatagccttagtataaattgttactcccatcacattgaacgttagtattggcttaaatgtcatcctcttgataaaaaggttgcaatttaagttagttctttacctactcctaataattttattgcaagttcatacaagtaccaccattagtagatgtaactaatacctgtacatactaaacttcatgttcctaacagtttgcttaaaggcaaagtattgcctaatttctgtttttgataaatacgaaaaaaatcaatctttcattactgggcttatatttcagtaataataataattgtaaaagtaagcttttaatatgcacgattctggttatttccgggagatttgatcttgaaaggtgaaacatattaaaattagagggctctaccctaagccccttcaatgtgttgcagaagtcctttaatgttggattagaagagatatccaatattagtgaatataatggctatactttctttagccccgggatcagctttccttttctaaggaaaattattccagatctatcgatttttctctttctattacagtctgttcaagtaatccttaaagtagacatggaagcaatataaaatagtggttaaattctgaagtttgctccacttaggttcgaatcctaatttagccaacaygcaaatgtgtaatctagagcaagctgcttaagacctctaagcctctattttctcatatgtacaattggagaaatagacatgtctacttcattattcctgtatgaattaaatgaaataaaacacataaagcacttaatatactacctggaataaaggtcagtattgttgttagaatgaatacaatagaacttgcaaattgatcaatttacctttattgacttattttaaaatatgcaatctctaagcattttttaatgactaccttgtgtatagaacagatattctacataaaattccaattagtttattggatgagaaaaaaaatggtttctgttttg

SEQ ID NO: 683783 - DNA, 1415 bp, Homo sapiens
ttctcgctcactataattcctcagtcaccatttatgaacattctttacgtctgttaaaggtttgatttaacttctgaaggtgaaaatacttatcccacatcagaaaataaccaaagtgtctcctcaaatagctccaaatccaaagaagtatattagagatagataagattcttctgaacatgaaattttattgatggagaatgctataaaattatcatttatatatatgctcatgtgtggggctttttttgtacatcttactgataaatatagaggtaatgaattccccatgatgattaactcagtgaaaatcctcgaagttccataaactctcataaattttcttgaaccttatcattgcaagagattattcaaaatgatgttgaatcaaagtctgacacattaaaacgatacaaccaaaagttatagccttagtataaattgttactcccatcacattgaacgttagtattggcttaaatgtcatcctcttgataaaaaggttgcaatttaagttagttctttacctactcctaataattttattgcaagttcatacaagtaccaccattagtagatgtaactaatacctgtacatactaaacttcatgttcctaacagtttgcttaaaggcaaagtattgcctaatttctgtttttgataaatacgaaaaaaatcaatctttcattactgggcttatatttcagtaataataataattgtaaaagtaagcttttaatatgcacgattctggttatttccgggagatttgatcttgaaaggtgaaacatattaaaattagagggctctaccctaagccccttcaatgtgttgcagaagtcctttaatgttggattagaagagatatccaatattagtgaatataatggctatactttctttagccccgggatcagctttccttttctaaggaaaattattccagatctatcgatttttctctttctattacagtctgttcaagtaatccttaaagtagacatggaagcaatataaaatagtggttaaattctgaagtttgctccacttaggttcgaatcctaatttagccaacatgcaaatgtgtaatctagagcaagctgcttaagacctctaagcctctattttctcatatgtacaattggagaaatagacatgtctacttcattattcctgtatgaattaaatgaaataaaacacataaagcacttaatatactacctggaataaaggtcagtattgttgttagaatgaatacaatagaacttgcaaattgatcaatttacctttattgacttattttaaaatatgcaatctctaagcattttttaatgactaccttgtgtatagaacakatattctacataaaattccaattagtttattggatgagaaaaaaaatggtttctgttttg

SEQ ID NO: 683784 - DNA, 647 bp, Homo sapiens
aatatcgcttttgagttgctagaaacacagcagaaaaaaatttgaaaaaaattagtcaatgtgaaactgacttttttatacgaaagaggcaataatttttgttcaaaagttgcctacaagtccatctatccattctatccagagctatgaatatgtgcatttccacaaagaccactctcccaattttacytaaagcattcttcaggtttacaggctggcctccctgaagccttctttcttaaccttcttctttttttgttgtttgcctttttgaatctctaattgtcactgctctgaggggcccatggttcagaacactgtagcaaacatagatactccatttattacatgtcagcatgacttacgcttaaaggacagtatccttcaaataaaagacagtgctgattgctcacattggagctgcccatgaatacacttacacatatttattgagaacctgcttaggtgtataggtgacaccaaactttaagtttcagtggtaaaagtcactccaggttgtttgtctcaggaaatttatattagaaaggttaggaatttgaatcaagtctagtgaaaatctgaaggccagtaaaacaattgggatctccagttttgtgtcttttagaaaggctcaaaaatggccagtg

SEQ ID NO: 683785 - DNA, 623 bp, Homo sapiens
aaaatgtcagaagacaatactggcaaaatccagcataaaatctattcttcattttcaaaccatgagcatttaccacaatgccaatatacattttaacgctggcastaaacttttgttctacattaaccttggtcagaagtcaaggttcctaaagtctttttgattgaccaagaaaattactctggaatcatgaggcttatgtttttctaatataccaaccaaccaaccaaaaataatatgtgtctcagagctatcctttgaatgaacttggccgtatctcagaatattaataatgaatcgtaaatgtttgataagcaaagaacatgattataggaaggagaaaaaaaactgaggaacacgttagtgacaaataacttttttttttcattttactataatgagaaataccatctagattcctgctgaacagagtaagtctggaaaagggagcattaggaggttgtataagttttctaatgaaatcagacgtcattgcttcaggccatgttctcttcttttagatctgtacaaggagccacctatacactgccagatgaaatgtctttcagtaacaaggcttcaggctggcccagctcttttactttcagctctaagttctatga

SEQ ID NO: 683786 - DNA, 1835 bp, Homo sapiens
ctgcatgttgtaaaaaaaggagaagtgatttggagaattttcgaggcttattatgtatttcaagtgatacacccattgttttgtcttctgatcacaaaccagtaataatcatcagccgagcaagattctgcttaaacaaaactatgcctcctgctatgaatactgtgcaaaattaagtggataaagtaagtccattttgtttgtggtaagctcttactcagttaaaacaacctagtcagatatgcttctgcatgtgtaagggtctgttcttttcacaaaacctcccaccatttcaaaagcagtttctagctgaactataaaatactatgttattccacttgttgggattggcaaagagccaacttgagcaatgagagaagcacttcaggagttttggaaggcaggaaggggagcagcaatgactccaggggtgggaaccaggctgaacagggtgctgagaccatgctgttctttctggagggaggaagtaagttagtgaaagatacaatgatgaagggcaagtacaaagatttgagcagcacattaatgatgtgaaaggtgcagggcggtttgggcagatgatattagaaatgtcaataatgcatacagcttgctaatcaaattgattgcaattgtcagtaggtggtagccaatcagacgatatagagaccgtattaatgatgtgatctggaagagtcgcgaagagaccactcaccttcagaggaatcattcccatctgtgagacatcactgctcaaagtcggtagcgcatggtgatcaggagcaaggactttggagtcagaacacctgaataaatcccagctgtgtcatttattatccgggaaaactgaaacaatacagcagaactggatacatgctgcatggcaagtagcttgccaaagcagagtcagggctattcctgctcagacctaaaacaaagtactcaaactgtacatggcagattggtactggcttcggatgtcttccagagaaatgcattcaatgcaggtagtaagagcacttctcccccaaaagtctgtcaaatcacccattcagaacaggcacagtattaatcagggtcttatttgcaaagagcagaaaccaactctggctaatataagcagatataatttcactggaatcatagtggatctttcacagaatagtcacagctggagaacaaacttgaagcctacagtgatgtccaacatcatgcctcatagctggtcctgkgaacactctggtgtgctgggaactcatacttcaccttggactttcaactccattactcctggcccttagctctatacagtgctgcctctgaaaactggatgtgggggctaccactgctctgagccttgccagttctgcataaccattatgtctttgcatgactcctttctggttcagatgctggggcaaacgtgcctaattggctgaaactggcaatgtatccatgacctcattgcaacaaagtctgggaaagtaactttttggcatattgagcttctgtaaatgaaagtggactcttcatagggtgcaagatttcccaaacataggcagaaggtacagatgctgtgtaaccaaaaagaatgccaaattcccactatgatctacccctctggctgcccaacatcaacatacaccgtaattcccttatttaaatattctttaccaaaccaaaaccatgaccactccattctcaaaaggggtcaactaaaaaatctcatttgttactgcagttatatccgcatgcaagattgctcagtaatgtccattctttctcaagttctggtatgatctcagctcaatattctggataggtggtgcaagttt

SEQ ID NO: 683787 - DNA, 761 bp, Homo sapiens
tcattatattctatatatttttcataaattttgaatttcctttgcatatacatggtyacttttttgtccttggaaaatgagaacttcatttcttaattatattggacaaatattaacatgtctcttaatatctaagaatgccatttgttacatatataagtagctggatataatgtacacacataattaagatttaaatatatttggacaactattgaagcatattattttgtagatatttgtctccacctatagaaaacattgcccatgtaattttatcaattacatagaggcacaaaatgatgaagatgagtaaaattaacaataaagtatatttggatattcatgttcaagtgttatttttaaaaattagcagatttagcaatctgagacaacagaattggaccaaaacaggacccaaagtatgaagatgctaaaaaaaaattggtaagtttaatacccactgatgtttataagataaattataaagtaaagctgattctttgtgtactttggatttaaaaacaatatgatttgtatacattgaggaaaaaaaaaaaacaaggaaatgctcataaaatgccatatgaggtagcctagattttcaagctagcttctgatggctttccagagctttttggatgttgatagtttttgtttgtttgtttgtttttgttttttgaatcggagtctcccgctgtcaccaggctggagtgcagtggcaccatctcagctcactaaaacctccacctccttggttc

SEQ ID NO: 683788 - DNA, 761 bp, Homo sapiens
tcattatattctatatatttttcataaattttgaatttcctttgcatatacatggttacttttttgtccttggaaaatgagaacttcatttcttaattatattsgacaaatattaacatgtctcttaatatctaagaatgccatttgttacatatataagtagctggatataatgtacacacataattaagatttaaatatatttggacaactattgaagcatattattttgtagatatttgtctccacctatagaaaacattgcccatgtaattttatcaattacatagaggcacaaaatgatgaagatgagtaaaattaacaataaagtatatttggatattcatgttcaagtgttatttttaaaaattagcagatttagcaatctgagacaacagaattggaccaaaacaggacccaaagtatgaagatgctaaaaaaaaattggtaagtttaatacccactgatgtttataagataaattataaagtaaagctgattctttgtgtactttggatttaaaaacaatatgatttgtatacattgaggaaaaaaaaaaaacaaggaaatgctcataaaatgccatatgaggtagcctagattttcaagctagcttctgatggctttccagagctttttggatgttgatagtttttgtttgtttgtttgtttttgttttttgaatcggagtctcccgctgtcaccaggctggagtgcagtggcaccatctcagctcactaaaacctccacctccttggttc

SEQ ID NO: 683789 - DNA, 634 bp, Homo sapiens
ctctggaaggtataaatgatgtgtcctcacgtggcagaagggctggaaagggcaaaaggagctaaattctgtgtgaagaatcccattcatgagagaggaacccccatgacctaatcaccccttaaaggccacaactcttaatattattgcattagagattacttttttttttttttttttgagatggagtttcacttttgttgcccaggctggagtgcaatggcatgatctcagctcactgcaacctctgcctcccaggttsaagtgattttcctgcctcagcctcccgagtagctgggattacaggcatgtgccaccacatttaaacatgaattttggagaggacacaaacttcaaaccatatcacctggcgagtatcatcatctatttttgaggcttgaaactggaagccccaagctacgtccagcccttaacatcccccacaacgtgttctatttggtctatacagtgttttaaattttttttttaaaatctatattttatgataggaacttacgaatgcaaagaaggaaacaacagatactggggtctacttgaggggggaaggtgtgaggagggaaaggaacagaaaagataactattgggtactgagcttaataagtgggtgatgtga

SEQ ID NO: 683790 - DNA, 634 bp, Homo sapiens
ctctggaaggtataaatgatgtgtcctcacgtggcagaagggctggaaagggcaaaaggagctaaattctgtgtgaagaatcccattcatgagagaggaacccccatgacctaatcaccccttaaaggccacaactcttaatattattgcattagagattacttttttttttttttttttgagatggagtttcacttttgttgcccaggctggagtgcaatggcatgatctcagctcactgcaacctctgcctcccaggttcaagtgattttcctgcctcagcctcccgagtagctgggattacaggcatgtgccaccacatttaaacatgaattttggagaggacacaaacttcaaaccatatcacctggcgagtatcatcatctatttttgaggcttgaaactggaagccccaagctacgtccagcccttaacatcccccacaaygtgttctatttggtctatacagtgttttaaattttttttttaaaatctatattttatgataggaacttacgaatgcaaagaaggaaacaacagatactggggtctacttgaggggggaaggtgtgaggagggaaaggaacagaaaagataactattgggtactgagcttaataagtgggtgatgtga

SEQ ID NO: 683791 - DNA, 2453 bp, Homo sapiens
gtagagcacttttttaggacattctagaagatgaattgctcatagggacccatacctagtgctcactagatgtatatctattactaaaggaaagaaaaaggaatataattaagtgttgagtcagcaattagttgccaaaaatgtattttaccttttgtaaaatatttttagtgcctgagaaattaatagaaaattacatatggatctaggtttgcacattactcctaatcaaagtaaatctgtgaacaaatcagatttgtttgctaaacagctatattctgttaatcaggatttcctgattttatcacatgtgggatgtaatgaaaacaaacatcagatttgcttgatttcattttattgcatttatgtaagacttcttttttttttcatggaaaagccaaattaataaactttctaattttttcaatactggtttatgggtcagacagattatctttgtttccacaaaatatttctggttacaaagaatacaaatatgcatacagttaaattgaactataatgaatgatgactttactatcaaaaaaagattgatgtttttgaactttagttttgcaagttgctttcacttaattactgcacttgcattgccttttataatttttcagtgtcatccctttgaccaccttttaatatcaccagtgattgtattgctctgtagtgtaacttaaatggcttgaatattttaggataatattaagttgggtaaatttatgagaaatttttggttaccaatacaattaaaaaaatttaaattcatagagaaaaggtattgagtcactcagcaccatttcgacctgcttttcgtaaagcttcatttgagatagtaaattcaatgtaatatacaccttaacttttaatatgataaagttgtttatattttaaagtgatcattgaaagccaaaagtgatatagttacatagtgatacatttttttgtgtgtgtttaagctcgtatacacatataagagcatattaaaactaatgaacaaaagaaacttcagtatgataaagatgatggacctgatagcttaaaatctcttggaatattccagtctgttgtaaacaagaggtattggaaggttatttttgacctttgtgtagtctgcccagagagcatggattcttatcttgtcaaaatattcttactctgagcacttgagacctacttaactttttgttaaatcaaataaccaaaactggccacatctgaaagatctaaaatcccttaataattatactgtgatgtgctgttaggtgtatttaaaaatcaaaacaaaactattgtcactctggctcttaaggcagccaattacagctcttccatagtttttgtttagaaaaataagtctatagaggtgtttttgcattcaaagtcatctttggtacttcttaggtgaccaaatcacccatggtctgttcccttggcctgatttcattacacggcaattagcagcagcagggtggctagagaaaatgaggtacactgggtatgctccacatttcttcattagctgaaccctatttaggacctgccctgagaaaatgtggggaaaaattgtcaactccaaaagagaaactcaacattttcttggaygaattcattaacacaaatatatttaaccagaaattgcacacttgccaggacagttagaaagaccctgaggatttgtcagtgctcttgctataataagtaaccaaattcttataaaataattatgtcttataccccaataccagtttctattttcttaatttggtatctttggttattgaaatgaattaactagagccattgagttttgtcatcagtaggtaatttctagtcttcctgttcttgcctggagtcttctagaagtacaaactggaaactgtgccttgtcaagacagcccagaaggacacactcagagtcgcagtgtggcctggaccgtgccaaggatcgactcattggaatgggcttcccagtgtgggctgacgttgccacagtgaggaggcccctgcaaggtcatgtctggggctgagccaggtccacagaacctgtttagtacaggagtagatggctatgtgaaagcaggccctcaccagcatcaggcagaacagaattaatggtatatgtctgggtcacagcatcagtgagggaaatttaatgtggtcgaagttctattttctaatgggcatgtgagcaagccctttttacttcttgatgtgttttcagttctctcttcaggaagctaatgcaaagtggcatgaaactttttgaatgctatcttaattcaaggaaaaatatcttatggggatcttgatttagattataaactgagtgaagatttgaaggaatgtaaggatgataataattttagtacttgaaattcagataaatgttttcacaataggttaagcttagaaaaatgtgtggaatgaaatttaactta

SEQ ID NO: 683792 - DNA, 2453 bp, Homo sapiens
gtagagcacttttttaggacattctagaagatgaattgctcatagggacccatacctagtgctcactagatgtatatctattactaaaggaaagaaaaaggaatataattaagtgttgagtcagcaattagttgccaaaaatgtattttaccttttgtaaaatatttttagtgcctgagaaattaatagaaaattacatatggatctaggtttgcacattactcctaatcaaagtaaatctgtgaacaaatcagatttgtttgctaaacagctatattctgttaatcaggatttcctgattttatcacatgtgggatgtaatgaaaacaaacatcagatttgcttgatttcattttattgcatttatgtaagacttcttttttttttcatggaaaagccaaattaataaactttctaattttttcaatactggtttatgggtcagacagattatctttgtttccacaaaatatttctggttacaaagaatacaaatatgcatacagttaaattgaactataatgaatgatgactttactatcaaaaaaagattgatgtttttgaactttagttttgcaagttgctttcacttaattactgcacttgcattgccttttataatttttcagtgtcatccctttgaccaccttttaatatcaccagtgattgtattgctctgtagtgtaacttaaatggcttgaatattttaggataatattaagttgggtaaatttatgagaaatttttggttaccaatacaattaaaaaaatttaaattcatagagaaaaggtattgagtcactcagcaccatttcgacctgcttttcgtaaagcttcatttgagatagtaaattcaatgtaatatacaccttaacttttaatatgataaagttgtttatattttaaagtgatcattgaaagccaaaagtgatatagttacatagtgatacatttttttgtgtgtgtttaagctcgtatacacatataagagcatattaaaactaatgaacaaaagaaacttcagtatgataaagatgatggacctgatagcttaaaatctcttggaatattccagtctgttgtaaacaagaggtattggaaggttatttttgacctttgtgtagtctgcccagagagcatggattcttatcttgtcaaaatattcttactctgagcacttgagacctacttaactttttgttaaatcaaataaccaaaactggccacatctgaaagatctaaaatcccttaataattatactgtgatgtgctgttaggtgtatttaaaaatcaaaacaaaactattgtcactctggctcttaaggcagccaattacagctcttccatagtttttgtttagaaaaataagtctatagaggtgtttttgcattcaaagtcatctttggtacttcttaggtgaccaaatcacccatggtctgttcccttggcctgatttcattacacggcaattagcagcagcagggtggctagagaaaatgaggtacactgggtatgctccacatttcttcattagctgaaccctatttaggacctgccctgagaaaatgtggggaaaaattgtcaactccaaaagagaaactcaacattttcttggatgaattcattaacacaaatatatttaaccagarattgcacacttgccaggacagttagaaagaccctgaggatttgtcagtgctcttgctataataagtaaccaaattcttataaaataattatgtcttataccccaataccagtttctattttcttaatttggtatctttggttattgaaatgaattaactagagccattgagttttgtcatcagtaggtaatttctagtcttcctgttcttgcctggagtcttctagaagtacaaactggaaactgtgccttgtcaagacagcccagaaggacacactcagagtcgcagtgtggcctggaccgtgccaaggatcgactcattggaatgggcttcccagtgtgggctgacgttgccacagtgaggaggcccctgcaaggtcatgtctggggctgagccaggtccacagaacctgtttagtacaggagtagatggctatgtgaaagcaggccctcaccagcatcaggcagaacagaattaatggtatatgtctgggtcacagcatcagtgagggaaatttaatgtggtcgaagttctattttctaatgggcatgtgagcaagccctttttacttcttgatgtgttttcagttctctcttcaggaagctaatgcaaagtggcatgaaactttttgaatgctatcttaattcaaggaaaaatatcttatggggatcttgatttagattataaactgagtgaagatttgaaggaatgtaaggatgataataattttagtacttgaaattcagataaatgttttcacaataggttaagcttagaaaaatgtgtggaatgaaatttaactta

SEQ ID NO: 683793 - DNA, 623 bp, Homo sapiens
taaggaaaaagaatagcctgtacaaatgtcaaagcccgaagtgaaaactgaagtcctcagcataagcaggaaccattcccagatgggagggaaagtgcctaggaagttgctgagtccacactcaagttgttgtttgataagttttacaaaatgacaaagattgggccatagacagacatatttgatgtacattctggtatctgcagatttgatcaggtacaaaatttttaagccatattgattatgagacatgttttggtatttgcatatatatatatatatatatatatatayatatatatatatatatatatatattttgagacagagtcttgctctgttgccaggctggaatacaggagctcaatcttggctcactgcaacctctgcctcctgggttcaagtaattctcctgcatcagcctcccaagtagctgggactacaggtgcgtgccaccacacccagctaattttttgtattttagtagagacggggtttcaccatgttggccaggatggtctcgatctcctgacttcgtgatccacccgcctcagcctcccaaagtgctgggattacaggcatgagccactgctcccagcctggtatttgcatatttgatcagg

SEQ ID NO: 683794 - DNA, 646 bp, Homo sapiens
tccttctaactataacatgtgtggtctgaaatttttaaaaagggaaaggcaacgaaagcagagaagaggtgaagacaggaggggaaaaaagaacagagaaaactctctgtgtgctggsggactgcgttccttccagctctgatgtacttatctctgtccataaagagaaatccctccccatcatactgttggcttttggcccttcgtctgcattaccaaacctcgttcttactgcatctgtgcttctattatgagtggcgtccttccatcttgaagtaggcagggtataaacaaatgaaaccagggatcccaattacctcacttgtctgtgttcaacggccgaggcacagagagccgaaaatgcaagaacacggtagctaggagggaccgattctcatgcagggacaacagtgccagccccaggcagtgtcacaggtgctgggttggggtctgggctgagaatctgggtctcatcagtgacatcaacatggatcatgccaccagcagtgacagcatcttcatgcagccagaagccgctgactctacgaagaatggaagacggccttgagtgctttccaggtactggcacattgccaaggcctctcacgtcccccttcctgcctgaaaatccactgttcatgtgcta

SEQ ID NO: 683795 - DNA, 639 bp, Homo sapiens
gtgtcctagatttcataaccaatttccacctttctattttacttgtttggcccaacactatgaaactgcatttaactctgtctgtgctgagagtcactatatagcattttacatttccttcctatatgccatgtccatatagctaattctcatagtcacttttaaatccattttaaggcactgtaggatattcagaaataatcattttaacaaattcaaatataattacactttgttttgaatttaactttcaattgtgatgatttaagctgacctagaaaaaaatacaaattttttattcatttatttattcatgcaygcttcagtttgggaaacattaagacctgtatatgtgcaaggcattagaaaatgaaaatatgaataagtaaagataaagcatacatttgagtaacagtaatatgagataaaatgtgaactaacaacaatttgagaaaaaataataaattctgttatgttactcctcaaaaagagcaaatcacttcttcaactgcttactgataagcaccatgcattcagattggtttttgatgttggaagaaataaaagaacggtagaggaaatgagaaactaaccaaggtaatgccttttaggaaataaatgtaaaatctgaacaaatta

SEQ ID NO: 683796 - DNA, 639 bp, Homo sapiens
gtgtcctagatttcataaccaatttccacctttctattttacttgtttggcccaacactatgaaactgcatttaactctgtctgtgctgagagtcactatatagcattttacatttccttcctatatgccatgtccatatagctaattctcatagtcacttttaaatccattttaaggcactgtaggatattcagaaataatcattttaacaaattcaaatataattacactttgttttgaatttaactttcaattgtgatgatttaagctgacctagaaaaaaatacaaattttttattcatttatttattcatgcatgcttcagtttgggaaacattaagacctgtatatgtgcaaggcattagaaaatgaaaatatgaataagtaaagataaagcatacattygagtaacagtaatatgagataaaatgtgaactaacaacaatttgagaaaaaataataaattctgttatgttactcctcaaaaagagcaaatcacttcttcaactgcttactgataagcaccatgcattcagattggtttttgatgttggaagaaataaaagaacggtagaggaaatgagaaactaaccaaggtaatgccttttaggaaataaatgtaaaatctgaacaaatta

SEQ ID NO: 683797 - DNA, 1327 bp, Homo sapiens
tgacaacaggctacccttgcactttctctgcctaagtttcacaagcagatagaaggtagacactatcctatatagtagatgatacttgtatataatattgtatatawaacattgattcttcacaatttcatagacaagtttaatgaagtggaggcacatgttcgggaccaatttttataaacaagttatcaaattatcatcctgaaaacaaggttagggatcacctaacaattagaaccttactgaattgcactagcgtcttttaaaataaatgcctaaatactgcattgtttcaaaacactaaggcctgagtcaagcctatgagtcactatgaatagccctggatgttgggagataagaaaaccaatgaagtctccattgaaatatgcactggggttaggtagtctgtggatagttatgaggggatttgaaaacttaccggaggagacttgttttaggagacaggtgaaaaggaggcatcacaaattcttaagggatgaagagttgggggcagttctagaaagataagcagagtccagggtgagtagaaagggagagagattggagtcagttcagaaagacagtaactcagcaagaataaatggaagttggaataagatttagctagaaacagaagcatgggataagacgatgagtaaatcctaatgcatttcataagaagaagcaacaaaccctgtagaaatactaaatatgggaaatgagagtaagaaatgataaacatgcttcttataagtgtatgtgaaatgagataactccaaacttttctatgaaaactggaaaaaatagccatcaacacaaaattcgaaacaaagagggggcagtaaatctgaatcaagagggataaacatgtagcatttcctaaatatattaccagtgaaatactttctttgttgaacttgaccttgggcatgttaaatttgagtaacacaagatatccaattattttaaggttttcactgaggggtaagaattgaatctctaaaaaggaatgaattcaaacttagaagttgcaagaagagaaatagcaaattattttttaatgtttttagttactccaccaataattgccaaatagatttggtttgcttaaagataacagatacagttattaaaaatcataattttcagtgaagtctcacaattatatcaataaagattttatgctgttattcctgaaaatgaataaaatgtaccattttgcacctgttttgtggcttttttgtaacagaactccaggtttttaaaattcccccaacaacaacaaaatgcacaataaaaaaaaaaacaaaacaccccaagcctcatg

SEQ ID NO: 683798 - DNA, 1645 bp, Homo sapiens
tacatggcttccccatgcacttactataaacgtttatccaacccctcacatcgcctccaaggctctctgagcccatctctaccacccccacaccatcccaacctctccagcccccggcccggccccaccatcactcattctgccctgccacactggccttcttcctttgttctttgtctcttgaacaagctaagagaaaggcccttgtccccgctgttttctttgtttgaaaggctttctcccgaaacctccgtgcagtagttaactctccgatctcaggtcaaatgtcaccccacagagggccctccgcagccaccccagcgagtgctgcctttcacctgcaatcaccattatgcgccccgcactcacttcattttctctagagcataagtatattccaatctgaaatatattgttttttttctgattatccggaccacaaatatataagctccaataagaaagtagtttgcttccactacagggtctagaactgtgtctgacacacaatagatccaccacaagcatttgttacacagatgaatgctgtgctagaaggtggataaagcaagttacagacatggcagcctacccactgggtgctaatgattgagaaacaagtggacaaatagccaagaaacacagaaaaaaaaatttagcagctgcatacttaattatgattaagtaatcaaagttagttgaacatatcaaacgtgaataaattattaagtcaagacatgtcatatggaaatgctaatgacctaggctgggaaagctctctgaggtttgagaatgaggaactttatgaagtttctaacatggtccctgctatggcacctaactgcctagaacatcagagttgcttaataaatactgctgaattttgcaattcttaaactaagaaaatgttaaaatattattttagctttcttagtgaatatttttaaagaccacttgtctataattcgtactgatgtttttctcggcataaataccagatatatgagtatgaaacttaaatagtagaaaaatcatccatggatgcaggtaagacacaacccagaagaatttttttttttttaaacacagagaatttttttttagcctgacaaatttcaaagaggctttgcaagtgcaaacagacttcagctttttcacattcctatgcccagaaactgggacgtgaaaatgccaggaaccctttcaataactagactatgtgatagatgcaggagaaactctccaaccaccaagattactcctatggagctgccaaagaaccagatgcttccttcaaaagcatatcaatttggcggtgaaaaaccctgtggcctcagctccagtcgggaagggcaggtgggatggcatggtgcrggatgcctgttcccacttgcctcagcaaccatcttcttctgacagcaaaactgtgttactcccaggcttgaaggcatgagcaaaatacatggctttgctatatataaggacgggacttggaaatatttggtctgaggccatgcaaaatgaattccatacatggggagactgtaatatcgaaaaagatgaaaatagtttcactgcacttgaaatttttatcttcaaagaaattgaacatagatgaaggaaaaaatagctgcatttaaaaaaa

SEQ ID NO: 683799 - DNA, 2185 bp, Homo sapiens
catatttttgccatttaaattttttcaaaaattaaaacctggctcaagttacaagtaaagcttgggttaaggaaagcattcatgaaacactttgttttctgtaaatcagatagtttattgcctggttcccttccaatatatatgtgggctttactctccattcagaatttgattctaatttttaagtggcaagcaaagtcgaattattaattaaagaatcaagacatataagtataccttactctctacatggtgaaggcaaacactttcaaagacaatttccctaatattttaaacctatcacatgaaaactttagccctttggatggaaacatttcactgactttcttcatcagtcccccttttttgccataaaaattcacgagataataaattccagtaaaaagaaaaccacacagtaaggcacagatctttgatagtataaaagaacattatctaatttaatccccataacaaatcagtgacagtattatctcatttatatataaggaacctgaagctcagagatgctgagttactaaagatggcacagctagtaaatggcatgtcagaatctgaacccattgctggatggctctgaaccctttgcccttcccaacattaattcgtgcctttctggaattttgccagccaagtggattttttttaacctaacttaaaatattcaaaaataactaacgttatttaacgtcttattctctaagattttttaaaaaaacatttaaagttatttttgtcatctgttttaatatgtcccaatcccttaagctaagaatctatcatttttactttacccaactatctcgtgatataaattaagcctgtttactctttccaggtcactgaagcaatgcttctttctagaattagagtcatacaactagaagagatggtctgactttgtacagaccatttgtacaccatgtgtagttccatttctaagaagaaacagcaaaatgatctacatgaaaaaaaaaatcaccttacaatttcagatgactttcatgaagtggttttataaattgtattgctgtaccatcattattgttattaatgaagttacatttaggtgttatggtagatttgaccagatgtggcaaacagttgttaccatwgtcttcatccataaaatttgtcaaattagaggttttatggagtatacaactaattgcaagaaattatataggcagtgtatttttaacattttaaatactaacaaaaacagcaggacttaatgacagtgaactacagacaatccatgcacagtgaagcctgtttaattagaattccactagtctaaaatctgtaatagcttgaacacaatatactattcattctgagtttgaaagttcaaaataaatctcaagatgtttttccatatatacctcactgtacctgctggagaccatttacatacatacatacatatatatatatatgtttgtttttgagaaggagtctcgctgtgacacccaggctggagtgcaatggtgcgatctaggctcactgcaacctctgcttcccaggttcaagtgattctcctgcctcaggatcccgatgagctgggattacaggcgtccaccaccacgcctagctaatttttgtatttttaaattttgtatttttagtaggcagggtttcaccacattggccaggctggtctggaactcctgacctcaggtgatctacccacctcggcctcccaaagtgctgggattacaggcgtgagccaccacgcccagcctatatcacatatattttaaggtcgcatgggacctcagtactcatgccctctgattctgtcattaagagatacatattacaggatagtggtgatgtgtaggggctctggagccaggctacctgcattaaattcccagctctgccttactaactatgggaccttgggcaagttaccttgtgcctttgtttccttctctataaaatggggaatagtagaatccaccctacaggtaatgaagattaaaagagataatacatacctgtgaaaggctcaggacacttcttatgtgtaagaaacacaacaccctgaggccagctggcctagatgtctttccaaggaaaatctgccatcaaacgttaggacaacatcgtgggactcctgtcttttctatttgaaaatagtttttaaaaatccatttaa

SEQ ID NO: 683800 - DNA, 649 bp, Homo sapiens
tcatytcagtcactgaacaaacataagggccaaccatacgaaaggtgctgtgacagattaaggaagagtttcctcagggaactgagtttctgggacaaaataaaagatacattttcctccccaactcttattttgcctgtcagtgtccctctattgcaccacagtgggagtgatccttcagatttaggacacttctgtccttaaagcctttcaatggcttcccagtgccctcgggataaagtgcaaacttcctaaccagtggtgattactccatacatttcctgcagtaattatcagacaacagaactcataatgggtcaacaataagaaaatttcatacctcacagaacaagaagtgcaaggaacagaagcttcagaaccacttaattcttcagcccaaggatcccatcatggacgaaattctctgcatctggccactttgccttccagcacattgattcttcttctgaggttggtttttcttttgatcctaagatgtagccagaatatacccacaggggaataaaggcaaaaggcagggaggggacctttgttcctgtgccactcttagttattaggaaacctctgtagaaagctcttttccccattgtcttctccgcaagcacagcattgcattctttttagtgtg

SEQ ID NO: 683801 - DNA, 649 bp, Homo sapiens
tcatctcagtcactgaacaaacataagggccaaccatacgaaaggtgctgtgacagattaaggaagagtttcctcagggaactgagtttctgggacaaaataaaagatacattttcctccccaactcttattttgcctgtcagtgtccctctattgcaccacagtgggagtgatccttcagatttaggacacttctgtccttaaagcctttcaatggcttcccagtgccctcgggataaagtgcaaacttcctaaccagtggtgattactccatacatttcctgcagtaattatcagacaacagaactcataatgggtcaacaataagaaaatttcatacctcacagaacaagaagtgcaaggaasagaagcttcagaaccacttaattcttcagcccaaggatcccatcatggacgaaattctctgcatctggccactttgccttccagcacattgattcttcttctgaggttggtttttcttttgatcctaagatgtagccagaatatacccacaggggaataaaggcaaaaggcagggaggggacctttgttcctgtgccactcttagttattaggaaacctctgtagaaagctcttttccccattgtcttctccgcaagcacagcattgcattctttttagtgtg

SEQ ID NO: 683802 - DNA, 612 bp, Homo sapiens
gctctcctttagcggtgatggacatgttttaagactggaaagggtgayggctgcgtgcttctggggagatattaaatgctcctgagttgtgctatataattttaaatgcttcatcttacatgtatctcaccttaataaaaaacagaaactaaaacattttccctgcaaacctgccctcggcagagcacagcccttctccccctcgtcctccctgctctgcctggggcacccgcatttgccctcaccccctcctcaagaggctcagcaactcagggcctggccgggcacggtcacgcctcctcacaagcagtcagtgaaggatggtcctttcagtctgtgccctggacttagctggaggaaggtttaatttttagtgagccagcagcttctgtggcactatctcccagatggggctgggccccagtgagcgggatagacagatcctagcctcaaaactcctcaggttctcagaggagagcttgtcagtgcacctccgtggtcggttgggggctctgaagttggatggcagccctggaaggcagcctgccgtggcttctgccctgctcaggggcctgtgcctgccctccaggctgtggtctcagcctctcccct

SEQ ID NO: 683803 - DNA, 1071 bp, Homo sapiens
tgaaaattgtgttaacttttaattctagctcattcttagtttgatttaatgagtctacaatttttttattaattatgtttatataacttcctttgctaggttgtgataatattgctgataataattaaataatagtcccatttacgagcacctagcatgtttccagtactgtgctgagcaccttatatgttttgtcttttttatcttgacaacaacatcataaggtaggtattaatagttgcacttacaaataaggaagccgatacttcttcgagttaagcagctttcccacagtatatagccagtaagtagcatagccaggatttaaacccaaggtcaatggactcaaatcgtgagctactgcctactaaattgcctctctgtggctcagggagttgtgcaactctgatttgctaatgtgagggtggctgcctgtacaacaattggtctgttctgtctctaaaatagatatatcagttgatacatttatgaaagtagttatgttctagaawtatggagactttagtttgaaatttttacatggaaaaaaacccataagaatctcactggcattttatcacttttcattgtgaaatgatgatctgtgttctgattaagattaatggaaggaataaaattattttaaagaattattgatggtttctgataatgtcgcatatattctttggtattaaggaagtacatgtttgaatccttgatgttcttgaatttctgtttccacagtctctctgccttctggggaaaagataacttttcttgatactccaggacatgctgctttctcagcaatgagagccagaggtgctcaggtcactgacattgtcgtattggttgtagctgcagatgatggagtgatgaaacaaactgtagaatctattcagcatgccaaagatgcacagggtactgtgtggctgacttaatggatctactacataaagtcaaagttctggggccatttacatatagctcatttagtcttcacaacaatcccagagttattatacgtgtattacagataagcctcaaagataaattgttttcccacagact

SEQ ID NO: 683804 - DNA, 2526 bp, Homo sapiens
cccaaagtgctggaattacaagtgtgagccaccgcgcccagccccatttcttatttggtaagatgtcagatattttatatccaaagataacagataaaattaagttatctgccatcttttaaagaaaacttgatgacctgtctaaaacagtaactacttggaggatttgtatagatttacttggtggacaaaaccagacagcaaaagacccagggtaacaataattttatgtggggatatagaattataaaactgcttgacacacacacacacacgtacatatacatatatgtgtgtatatgtacatatatatacctgtgtgtgtatatataagtgtgtatgactttttacgttgcttacctatggattctagtttttaggctgctatacttgcattctgaaatatatcccataattttatttaatttttttgagacaaagtctcgccctgtcacctaggctggagtgcagtggtgcaatattggcttactgctatcttcaccttccaggttcaagcgattctcctgcctcagcctcctgagtagctggtgcatgccaccacactgggctaattttggatttttagtagacacgaagtttcaccatgttggccagactggtcctaaactcctgacctcaagtgatctgcccgcctcagcctcccaaagtgctgggattacaggcatgagccaccgcgcctggcctatagcccataattaatgcctaatatcctataccctaaaatactatgtttccagagataattcacctaagccaaaacactgtgaatagttttttgagtgctttgagagttgcccatttggagagtctacccctgggagaagcagcagctgcatttacctgctatttcaaaagaatagaatgtgtctgtgtgtgtgtgtgttcaattagtgacattagtgatagtgtgagaggattcaaagtatcctgttcacatattttgtaagaactttgatagtagtcaacttcttagacatctttaaaaaaattttctgattttcttggaatatacttccaaagcttttactttggttttactgtttaagcatactagtaatgaaattaaaaggttataattgtatagagcatattataatgcggtacttctaaatttgtaataaaaattatatcataagtttataaacaaatatgtatctcttcacctaatttttttttttttttttgagagagagtttcactcttgttgcccaggctggagtgcaatggtgcaatctcagcctcagcctctgcctcccaggttcaagcgactctcctgcctcagcctcccaagtagctgggattataggcatgcaccacaacgcccggctaattttgtatttttagtagagacggggtttctccatgttggtcaggctggtctccaactcccaacctcaggtgatccgcccgcctcgccatccaaagtgctgggattacaggcgtgagccaccgttcccggcctaattttttttaaataatagagacagtgtctcactatgttgcccaggctggtcttgaactcctggcctcatgtgatcctgctttggcctctcaaagtgcagggattacatgcatgagccactgtaactggcccccacatctctattttattttgagacggggtcttgctgtgtcacccaggctggagtgcagtgtgcaatcttgacccactgaaaaccttcgcctcccaggttcaagtgattctcctgcttcaacctcctgagtagctgggattataggtgcacaatactacaacgggctaattttgtatttttctttctttcttttttttttttttttttgagatggagtttcactcttgttgcccaggctggagcgcaatggtgcaatctcggcctcagcctcccgagtagctgggattacaggcatgagccaccacgtctggctaattttgtatttttagtagagacggggtttctccatgttggtcatgctggtctcaaactcctgacctcaggtgatctgcccacctcggtcccccaaagtggtgggattacaggggtgtgccaccgtgcccgccagcacctctctattttagatcctttaccaagcaatccttcaataattttcttaaccttctgtaatttctaaatcattgaataacaccccttcaaattcatacctatttttgcttccccaaatgtaactttgttccaatgtgacaccatcaaagtatatgagcagaaacctcattatagaatgccttattattctgattaagttatatataattatgaaaatgacatctcatatttctaacttgctccttgyaactgtcctgtgaagtatgaagcaaaggtaaaaggcttgcccatattaacagaaatagcaagtggcagaggtattccagctcttattttaactttctttctgcaatattttacccctctggccaaatgatagtatatctgtgtatgatttacctcagaaaattgtgtggctgtacactaatgcagtacacaattaattttatgatgttaaatt

SEQ ID NO: 683805 - DNA, 676 bp, Homo sapiens
gttgacaaccaatattcctgccttagtaacaccactgtttgaatgataacattccatttgytgattttgagaagttcatccaatttctcagaaaggcatgaatgggaaaaatgcaattctggatttgtatttcctgactgtgaatgagtgtttcagttattttagcttgagagcagattataagtttcctttatatattttttaaagagagagtctcactgtatcacccaggctggagtgcagtggcacactcatatctcactgcagcctcaaactcctgggttcaagttatcctcttgcctcagcctcctgtatagctgggactacagacttgtgccaccactcctgactaatttttaaaattttttgtagagacaaggtctctgtgttgcctaggctggtcttgcactcctggcctcaagcaatcctcctatcttggcctcccaaagtgctgggattacaagcatgaactaccagtgcctagcccagactatcagtttttgatcaactacctggctgtatgtaccctctgataataattttcaccttttcatctaaaagtatcatctgatttgttaggaattgggctgcaagcagaaacatgatacttccttgttattttgagtttgtttgtggtatcattaaaatcttggtttagatttgatctaacattaaa

SEQ ID NO: 683806 - DNA, 603 bp, Homo sapiens
gcattgaatgaatgtttaaataaaggtaaggtattgaataggttttataaatatcaagagtcatgctgcgactctactgtgtgaaattagcaaaggaaagtcataactgtaacatgtttatctttgcatgcccaagtgttaacacttgtcagaatttttcttacatgaagagctctctgctttacattaatatagttatagtgaagtcattttggaggtattgttggtaaatttaattcctagagaaaayatatggtgttaaatagaaaataatattgacatatatggtccctgtttcttttctcctggtgaggagaaaagatttctgtttgtactatttgcacattgcataattgtaaattttaccttgtaaagaattctgttcttcaggactgagaggggatctagaaatggaaatcatttggtactttgagaaacttttcttctagcttcttgataacataatttaccttcttcattttcacattattttagcacatttgattgttaatgaactattaatgactgtcttctttgctcttcctaccctcttaaaaggaactagttgggcagaagataaaagtgtcagcttgcatctctggg

SEQ ID NO: 683807 - DNA, 677 bp, Homo sapiens
gttgagtttgacaggaatttgacaggtcaggctgggcacagtggctcacttctgtaatcccagcactttgggaggccaaggtgggtagatcacctgaggtcaggggttcgagactagcctggccagtgtggcaaaaccccgtctctattaaaaatacaaaaattagctgggcatggtggcgcatgcctgtaagcccagctactcaggaggctgaggcaggagaatcgcttgaaccgaggaggtggaggttgcagtgagtcgagatcgcgccactacagcctgggcgacagagtgagactctgtctcaaacaaaacaaaaaaaaagaatttggcaggtcttgtatcttctttctcagttaatttcctcatctgtaaacaggagattttggtcagtttcagtattaggataagaaggagggagtatacaaaaycaagaaacgaaaacataagagaaagtagttagaacattttagcttaaaggttaccagtaagtagacccaataggactgtagagataaagtacatattaattatttgccagttatttaaagacttgtgtatgcatgacactgttaagggattctcatgaataccactgtcttagtatactttttctagactttagtttagaaaccataggtatataacttagcaagatagaattgtgaacacttgtc

SEQ ID NO: 683808 - DNA, 1062 bp, Homo sapiens
ccaaattctggggccccatgtactggctatagagtaagttatgatattcaatgattgaacttgtgttacttgagatatttgtgaaactttaaaaattatattccttgtgaattgagttacaaagaaagcaattcagacttaagtgttttctactaaaggtatttagaattactgtgttagttaagagtttccttacttgttaagtggggacaaaatagtgaatatcatctagacttctgaggattaaattgttgatatttgtgaggcccttaaatagtgcctggtaaatagtaagcattcaagtattaaatatcattattattatgtcactgttgttttgtaattgatcttagctggtgttgtagaattgaatatttgctttactgtggtgtatgtagtttttattttttaaattatacaagggactttccagaaaatttacagaatttgggaaaaaaaggaagaaataaaaggcactaaaaattttttaagtcacttttcatttcagaaaatttgtttcagaacttttctatctcattttctaacccacgtatcttaggaaagttaaaactatcttagaagttttttaactgccagtgtgtttaataatcatctagtataaaagtttgcagtacttgtgctttcaagtttctatggaataggtgggaatgtaaactggttcagccattctggaaaacagtgtggaggttcctcaaaaaattagaaatagaactctcatagcattcagcagttttgctcctgggtatatatctaaaggacattaaatcagtatatcaaagagatatctgcattcccatgcttgttgcagcattattcacaaatgtcaagatatggaatcaacctgtgtctgtcaatgaaatgatggataaagaaaacgtggtttatatacataatggaatatttgtcagtcataaaaagaatgaaattctggccaggtgcagtggctcacacctgtaatcccagcactttgggaggccgaggcgggtggatcacgaggtcaagagttcargaccagcctgaccaatatggtgaaaccccgtc

SEQ ID NO: 683809 - DNA, 433 bp, Homo sapiens
agggtggtagacgtggagagggaggtaagtcagggarcccaaagatatatagagtcaatagggcttactgatgcagggagagaggaatcagataagtcttctaaaactggattgtgatgaaattgcacaaataaagttcctttgggaaattcattgaactacatacttaaaataggtgaattcatggtatgtatattatactcaataagctgtttttaaaaatgagtcctagatttttggctaataataactttatttaaaagagatgagaatgtgaatgatggaataaaactaatttttatgattttcacaaatgattgcatttgtaaaatttcagatcactaggcctttagttctttaagtctccaacctgcatttcatttatcaaagcaaacaaaaataagtaaataaataaataaacatcccacatatc

SEQ ID NO: 683810 - DNA, 956 bp, Homo sapiens
atgaaatcataaaccacccccctctgcattcacatagaatacagayactaggttgcataattctaaaataaactctattgatttttagttagagtttgaagttagctacagggaattgcagaaggaagcattttaaagtacctttattgacagaccatctaactactttgaatattttatttaaaaaaaaaaaacatgattaacacaaaaatctatgaacccaggaccctagcagaatagtattcacccaaagccagttaacagttttcactcaaacccagtgagatttaagttagttatcagcattaactattttctgagatttgagctatcttttgcttcaaatctcagaaaatagttcaatgacacttttaaccatttttcttgtatacagaagttgacagcatctttagaaataactagcaggaaaaagttcaagaggacaatagtgttgatactggtattttctcaattttggcttcacatgtgcaaatacacattcacatatataaaactaatgttaatgctattaactaacttaaatgctatatgtttctaaaaatatgctgctggaaatagtttttcctctttgtgaataggtttcattttaattttttaaaatctcttagctaaaagtgtggattttccagaatatcctccatcttcaaattatatccgcggttataaccatccttgtggctttgtatgttcaccaatgaaagagtaagtgttgtttgcacttatttattttaacaggtttttttagttcaacttgtgatttagtttaagattgctggctcatcagtagaaatatgtagcagcatattctgttgcgggaaaaaaacttcccctaaatatgatttttaaaataacttcttataatcgttttcattttaagtataatcagaatggatacttccctataaagtatgatctgaggtttctgagaacagtca

SEQ ID NO: 683811 - DNA, 956 bp, Homo sapiens
atgaaatcataaaccacccccctctgcattcacatagaatacagatactaggttgcataattctaaaataaactctattgatttttagttagagtttgaagttagctacagggaattgcagaaggaagcattttaaagtacctttaytgacagaccatctaactactttgaatattttatttaaaaaaaaaaaacatgattaacacaaaaatctatgaacccaggaccctagcagaatagtattcacccaaagccagttaacagttttcactcaaacccagtgagatttaagttagttatcagcattaactattttctgagatttgagctatcttttgcttcaaatctcagaaaatagttcaatgacacttttaaccatttttcttgtatacagaagttgacagcatctttagaaataactagcaggaaaaagttcaagaggacaatagtgttgatactggtattttctcaattttggcttcacatgtgcaaatacacattcacatatataaaactaatgttaatgctattaactaacttaaatgctatatgtttctaaaaatatgctgctggaaatagtttttcctctttgtgaataggtttcattttaattttttaaaatctcttagctaaaagtgtggattttccagaatatcctccatcttcaaattatatccgcggttataaccatccttgtggctttgtatgttcaccaatgaaagagtaagtgttgtttgcacttatttattttaacaggtttttttagttcaacttgtgatttagtttaagattgctggctcatcagtagaaatatgtagcagcatattctgttgcgggaaaaaaacttcccctaaatatgatttttaaaataacttcttataatcgttttcattttaagtataatcagaatggatacttccctataaagtatgatctgaggtttctgagaacagtca

SEQ ID NO: 683812 - DNA, 956 bp, Homo sapiens
atgaaatcataaaccacccccctctgcattcacatagaatacagatactaggttgcataattctaaaataaactctattgatttttagttagagtttgaagttagctacagggaattgcagaaggaagcattttaaagtacctttattgacagaccatctaactactttgaatattttatttaaaaaaaaaaaacatgattaacacaaaaatctatgaacccaggaccctagcagaatagtattcacccaaagccagttaacagttttcactcaaacccagtgagatttaagttagttatcagcattaactattttctgagatttgagctatcttttgcttcaaatctcagaaaatagttcaatgayacttttaaccatttttcttgtatacagaagttgacagcatctttagaaataactagcaggaaaaagttcaagaggacaatagtgttgatactggtattttctcaattttggcttcacatgtgcaaatacacattcacatatataaaactaatgttaatgctattaactaacttaaatgctatatgtttctaaaaatatgctgctggaaatagtttttcctctttgtgaataggtttcattttaattttttaaaatctcttagctaaaagtgtggattttccagaatatcctccatcttcaaattatatccgcggttataaccatccttgtggctttgtatgttcaccaatgaaagagtaagtgttgtttgcacttatttattttaacaggtttttttagttcaacttgtgatttagtttaagattgctggctcatcagtagaaatatgtagcagcatattctgttgcgggaaaaaaacttcccctaaatatgatttttaaaataacttcttataatcgttttcattttaagtataatcagaatggatacttccctataaagtatgatctgaggtttctgagaacagtca

SEQ ID NO: 683813 - DNA, 956 bp, Homo sapiens
atgaaatcataaaccacccccctctgcattcacatagaatacagatactaggttgcataattctaaaataaactctattgatttttagttagagtttgaagttagctacagggaattgcagaaggaagcattttaaagtacctttattgacagaccatctaactactttgaatattttatttaaaaaaaaaaaacatgattaacacaaaaatctatgaacccaggaccctagcagaatagtattcacccaaagccagttaacagttttcactcaaacccagtgagatttaagttagttatcagcattaactattttctgagatttgagctatcttttgcttcaaatctcagaaaatagttcaatgacacttttaaccatttttcttgtatacagaagttgacagcatctttagaaataactagcaggaaaaagttcaagaggacaatagtgttgatactggtattttctcaattttggcttcacatgtgcaaatacacattcacatatataaaactaatgttaatgctattaactaacttaaatgctatatgtttctaaaaatatgctgctggaaatagtttttcctctttgtgaataggtttcattttaattttttaaaatctcttagctaaaagtgtggattttccagaatatcctccatcttcaaattatatccgcggttataaccatccttgtggctttgtatgttcaccaatgraagagtaagtgttgtttgcacttatttattttaacaggtttttttagttcaacttgtgatttagtttaagattgctggctcatcagtagaaatatgtagcagcatattctgttgcgggaaaaaaacttcccctaaatatgatttttaaaataacttcttataatcgttttcattttaagtataatcagaatggatacttccctataaagtatgatctgaggtttctgagaacagtca

SEQ ID NO: 683814 - DNA, 604 bp, Homo sapiens
ctcaacttcctggcctcacatgatctgcctgccttggcctcccaaagtgctgggattacaggcatgagataccacacttagcctcagcttttttcttattgygaggagagaagtgacaaactccaagttctacatgtcagagctgaaactggaagtccactatttatttttaaaaaaattctatgctaaatattttcttaatgtataacatatgccaaatacaagttttgaacaggtaataagcaaataaatgttgaaaaaaaataccctgaaaatctaaatgtaactatttcactaacatttaagatacacacttcatcacgatattgacataggggaaaaagcactaaaaatatggtcccttgtgctgctattcctagatgcttacttcagcctagaaaatatctgagctattacacaaagtattattcattgaaaaatctcatctcttagtgccaaggtgctaacgtttgttaggctttaggctgaaaatgtttaagcataattaaaccattatgaagttttagtatttcttttcaacctttaacttacaggacaccgattttttattttcttattcagttttccatactaaattgtttaa

SEQ ID NO: 683815 - DNA, 1650 bp, Homo sapiens
ctattttaatttagatatgttatcattttctatatgcttgtacttcagttttattayagcatttatcatcataaaaatttctaggattcagatagtggcactcatatttcagccaataattgagacaacaaagctcaaatatagcaaaagaacttaaacagtccctcaggatgcagttttatgataattgcaatagcagttaaatgtatattgcagatttaaggacatttttgaaaaaaatgaaaaggtgtttttatttaaaaaataataacttgtaaaattggtaagctcctgcttgacttggcaattcaaagtatctgtgaattgtttataataaataaaggtcctaatacttcaaaaaccaaacccaaaccagttattttggcaagttcagtattttagacttttagacagaaattgtcacatgctcattattgtgattcttactgaaatagagtttccatctctactaacattatagttttatctgaattgtcattgtgataactagtgtgagagaaaggaattgatattttctgtagttgtttgatttatgggtgctgatatagtgttaatggacttgggaaacataatgtattcctccatacatttttatagttacagcattgttcactttaagtccagtagatatttcagacttttttttttgtgttcgagcctgtgtttatgtaaattatgaatcagacttttgatattgtaggtgggcttaggtaggaagtacatcagtgtacagcgtaattagtgtagagtacttactattttctgtttgacttgtataaaactaaatttttctttttttttcttttcattttagtacttcagatagcagaccaaagagtagcagccctatcagattacctgaaatgagtggaggacagacaaatcgtacaacagaaacagaaccacaaccaagtaagattacacatggaggaatatttataattagatttacctataattatggtttgaaaaagaaaatacataaaaacaaataagtactatctggcaatgatttactacttatgatctctgaaatacaaatttagatatttttgtatgccctctttatacgtgttttgcttttcttcgttgattcttgtctcaagtgtaagttcaaggtattgaattagaaacttttagaagctctttggtctatgcaaaaaggagaatctgcttcctagaagagctttcagtttaaaatatacaacctaagatgcaagatacgtttttttcctttctagttttacagtattactggcactatgaaaataaattttcatacattccctcctttaatccccctagtaaccacataagaattatttgacatatccttatttttcaagaaggaacttaaaatttagatttagtaacttgttcaagatttgacagtgctggagctgggatttgaatttgtgtttctctgactttgtcaggaacacattcagctacaagtaacacaaaattcaactgtaaggatttaaacaaatgacagcttatttttctaaaataaccaaacctggaggttggcagttgctggcatttgtttagctgctcagcattgttataacattaggggaatagtttctctatgattcctttacgttttcctcatggttaaaagtgttt

SEQ ID NO: 683816 - DNA, 1650 bp, Homo sapiens
ctattttaatttagatatgttatcattttctatatgcttgtacttcagttttattacagcatttatcatcataaaaatttctaggattcagatagtggcactcatatttcagccaataattgagacaacaaagctcaaatatagcaaaagaacttaaacagtccctcaggatgcagttttatgataattgcaatagcagttaaatgtatattgcagatttaaggacatttttgaaaaaaatgaaaaggtgtttttatttaaaaaataataacttgtaaaattggtaagctcctgcttgacttggcaattcaaagtatctgtgaattgtttataataaataaaggtcctaatacttcaaaaaccaaacccaaaccagttattttggcaagttcagtattttagacttttagacagaaattgtcacatgctcattattgtgattcttactgaaatagagtttccatctctactaacattatagttttatctgaattgtcattgtgataactagtgtgagagaaaggaattgatattttctgtagttgtttgatttatgggtgctgatatagtgttaatggacttgggaaacataatgtattcctccatacatttttatagttacagcattgttcactttaagtccagtagatatttcagacttttttttttgtgttcgagcctgtgtttatgtaaattatgaatcagacttttgatattgtaggtgggcttaggtaggaagtacatcagtgtacagcgtaattagtgtagagtacttactattttctgtttgacttgtataaaactaaatttttctttttttttcttttcattttagtacttcagatagcagaccaaagagtagcagccctatcagattacctgaaatgagtggaggacagacaaatcgtacaacagaaacagaaccacaaccaagtaagattacacatggaggaatatttataattagatttacctataattatggtttgaaaaagaaaatacataaaaacaaataagtactatctggcaatgatttactacttatgatctctgaaatacaaatttagatatttttgtatgccctctttatacgtgttttgcttttcttcgttgattcttgtctcaagtgtaagttcaaggtattgaattagaaacttttagaagctctttggtctatgcaaaaaggagaatctgcttcctagaagagctttcagtttaaaatatacaacctaagatgcaagatacrtttttttcctttctagttttacagtattactggcactatgaaaataaattttcatacattccctcctttaatccccctagtaaccacataagaattatttgacatatccttatttttcaagaaggaacttaaaatttagatttagtaacttgttcaagatttgacagtgctggagctgggatttgaatttgtgtttctctgactttgtcaggaacacattcagctacaagtaacacaaaattcaactgtaaggatttaaacaaatgacagcttatttttctaaaataaccaaacctggaggttggcagttgctggcatttgtttagctgctcagcattgttataacattaggggaatagtttctctatgattcctttacgttttcctcatggttaaaagtgttt

SEQ ID NO: 683817 - DNA, 549 bp, Homo sapiens
attttaaaacatttccttttaccttctgataattctagggattgttattccctataaaggggactagtaaagtgctytgtcatataagtggcgagtgatgatgctaagacttaaactgaggtctagatgattccaacattttacctctcatttgaatcactgtaaaaaaacaggtatccgaaaaatgttgatggtagggtaattagatgggcagagatatgagggatgttctggataagagatctcagtttaaatatgaaatagattattacttctttgaatgatatactctgatatgcactatgaaagtgaggatcatgtaacagtcacttaacatccgactcatgtttacgttttagcttgaaattttgagcatcaaaaatgtgtaatggaacagaaggaagaaatatgttcttacctgaaacagtatctctctaaaaatattcctaatgtaagatcattctttccataaaattccattgttacaatcctaaagaagagaccacctcttagaaacataagaattaccatgccccagagacatttcat

SEQ ID NO: 683818 - DNA, 549 bp, Homo sapiens
attttaaaacatttccttttaccttctgataattctagggattgttattccctataaaggggactagtaaagtgctttgtcatataagtggcgagtgatgatgctaagacttaaactgaggtctagatgattccaacattttacctctcatttgaatcactgtaaaaaaacaggtatccgaaaaatgttgatggtagggtaattagatgggcagagatatgagggatgttctggataagagatctcagtttaaatatgaaatagattattacttctttgaatgatatactctgatatgcactatgaaagtgaggatcatgtaacagtcacttaacatccgactcatgtttacgttttagsttgaaattttgagcatcaaaaatgtgtaatggaacagaaggaagaaatatgttcttacctgaaacagtatctctctaaaaatattcctaatgtaagatcattctttccataaaattccattgttacaatcctaaagaagagaccacctcttagaaacataagaattaccatgccccagagacatttcat

SEQ ID NO: 683819 - DNA, 608 bp, Homo sapiens
tgaacagctgtacgagggtcatgacctccaaaggtaggttctgctttccttcttgtgtctgagttggattaaaaaaaaagcaaccttgttaacagtccctagtatctatatacaacaaggtatatatgtgatggaaactgcctcttattgttggcatataattatgttctcccacccggttatatgaattgagagttaaaacaagtctttataagggtaagaggctactgaaagtatttcttctcatgtaaaatgctgttttacaagcgagtcaaggctgcctaagacaagcattgtctgagaccattgatggttttcaggcctggaatgggaacatcacttaaatggtccaaaattcattaatgactccttaagccctttggtccaacctataataaatgcrtgctagaaatttagcagaagaaaaagcaatcaaggagggttaacttagcttggtctctaaagtcaaacaggtaagcaataggatcaaacagttcagttctgtctatatctgtagaccatatatccaaagtctcatacagaagatgatcagaaagaagtttaatagcccagccttcaaagattctgacagacttcacaacatccag

SEQ ID NO: 683820 - DNA, 470 bp, Homo sapiens
tttttaccagtacaatgtttactgcggtgtgaactcaagcaaattcccctcrcccctgggtcccaaagaacaggacatgatgccctgggcctgcaatgccagggaccccttggcacaggtgcccagaggcaggtagcacgaagaggctgccatgctccaggctgggcaaactaacccccttctagccacagcagcccagccccagaactgagtcctgacccaaaagaagccaccctggcgttcggggtctgctttgcatgggagggtgactagcccactgtggcaacaaagcctggggcagccccctgagccccacctcctggtactcacccctgcctttgtgcaattctctcccctctagtgtgggcgggacctgtgactcacttctaaccaatggaatacggccagtgtgatggatggcactccatcttgactacattatgttacattttgctggccatgaagaagcc

SEQ ID NO: 683821 - DNA, 470 bp, Homo sapiens
tttttaccagtacaatgtttactgcggtgtgaactcaagcaaattcccctcgcccctgggtcccaaagaacaggacatgatgccctgggcctgcaatgccagggaccccttggcacaggtgcccagaggcaggtagcacgaagaggctgccatgctccaggctgggcaaactaacccccttctagccacagcagcccagccccagaactgagtcctgacccaaaagaagccaycctggcgttcggggtctgctttgcatgggagggtgactagcccactgtggcaacaaagcctggggcagccccctgagccccacctcctggtactcacccctgcctttgtgcaattctctcccctctagtgtgggcgggacctgtgactcacttctaaccaatggaatacggccagtgtgatggatggcactccatcttgactacattatgttacattttgctggccatgaagaagcc

SEQ ID NO: 683822 - DNA, 646 bp, Homo sapiens
tacctctgtactcaatgaaaagtatgctgattaccccaacattccattacaaccctgatgtttatttacattgctcagctggaaacagaaaatcacaaagtctttgtatccattagcgtgaaccatacgtatcccctactggccttgcagagctctgcatggctcagttkcagatgcccaagagtctaagacaaacttcacgtggaccctttctttctaagctgactttcctctaagctgccagagactgaaagtctgaaacggttgctgccaaagcctctccatccccaaccttactctcccaaaaaaggcaaaaacgagtatgttaggccgagcataaggagcttaaaatctgactgctgccaccctggcagctccctccaatttttctcaaagtcagaacttagacaagaataaagactctgggactatggctccttccataatctaatcttcatgaaaattccatcacataagctaaacaattttaaataagggttaagcatgcactatgaacaaagagtctgaatggtgcaggagactttagaccaggggtgtccaatctttcggcttccctgggccacatcggaaaaactgtcttgggccacgcataaaatacactaacactaacgatacctgatgagct

SEQ ID NO: 683823 - DNA, 646 bp, Homo sapiens
tacctctgtactcaatgaaaagtatgctgattaccccaacattccattacaaccctgatgtttatttacattgctcagctggaaacagaaaatcacaaagtctttgtatccattagcgtgaaccatacgtatcccctactggccttgcagagctctgcatggctcagtttcagatgcccaagagtctaagacaaacttcacgyggaccctttctttctaagctgactttcctctaagctgccagagactgaaagtctgaaacggttgctgccaaagcctctccatccccaaccttactctcccaaaaaaggcaaaaacgagtatgttaggccgagcataaggagcttaaaatctgactgctgccaccctggcagctccctccaatttttctcaaagtcagaacttagacaagaataaagactctgggactatggctccttccataatctaatcttcatgaaaattccatcacataagctaaacaattttaaataagggttaagcatgcactatgaacaaagagtctgaatggtgcaggagactttagaccaggggtgtccaatctttcggcttccctgggccacatcggaaaaactgtcttgggccacgcataaaatacactaacactaacgatacctgatgagct

SEQ ID NO: 683824 - DNA, 910 bp, Homo sapiens
caagtagctgggattacaggtatgcaccaccacaccaggctaattttgtaattttagtagagatgggttttctccatgttggtcaggctggtcttgaactcctgacctcaggtgatctgcccgcctcggcctcccaaagtgctgagattacaggcgtgagccaccgcgcccggccccagctctgtatctgaacttgctcttggaactggcaacccagggcctctcaatcactaacactgtaggggaatcttctctccttggatctgccacggctctgcctctaatgcaggtttctcaacagtggcattgtggatattttgtgctggctaatactttgttcggggctgtcctgtgtgatgtaggatgctgagtgcgtccttggcctccacgcactagatgctggtagcatcttcccccaagctgtgatggccaaaaatgtctccaggcacttacgaatattccctggggaagcaaaatccccctctctcacctctgttaacaactacttccctaatcctatctccctaatcctaattcccctactcaccaccccctstcttccccaacctctgttataggggagaaaaaagctttcgtaagcaaattataagtttttgagcaaaaacaaacaaaagacctacaaagcagatgcagatctcccaacctgcttctcttatgcaaaaacgttttggggaaattcagcagattacattagatttatccagtttgaccccccagaataagataaagaaaagcaggtaccaaacacaaaagtgtctcattataagacatggggagcatgacccaggaggataaccaggtttgggtttgaagcttattcattatgggggcccttccttaagatacaaaattacacacgtaatactggacattaaagtaaatgttgaca

SEQ ID NO: 683825 - DNA, 910 bp, Homo sapiens
caagtagctgggattacaggtatgcaccaccacaccaggctaattttgtaattttagtagagatgggttttctccatgttggtcaggctggtcttgaactcctgacctcaggtgatctgcccgcctcggcctcccaaagtgctgagattacaggcgtgagccaccgcgcccggccccagctctgtatctgaacttgctcttggaactggcaacccagggcctctcaatcactaacactgtaggggaatcttctctccttggatctgccacggctctgcctctaatgcaggtttctcaacagtggcattgtggatattttgtgctggctaatactttgttcggggctgtcctgtgtgatgtaggatgctgagtgcgtccttggcctccacgcactagatgctggtagcatcttcccccaagctgtgatggccaaaaatgtctccaggcacttacgaatattccctggggaagcaaaatccccctctctcacctctgttaacaactacttccctaatcctatctccctaatcctaattcccctactcaccaccccctctcttccccaacctctgttataggggagaaaaaagctttcgtaagcaaattataagtttttgagcaaaaacaaacaaaagacctmcaaagcagatgcagatctcccaacctgcttctcttatgcaaaaacgttttggggaaattcagcagattacattagatttatccagtttgaccccccagaataagataaagaaaagcaggtaccaaacacaaaagtgtctcattataagacatggggagcatgacccaggaggataaccaggtttgggtttgaagcttattcattatgggggcccttccttaagatacaaaattacacacgtaatactggacattaaagtaaatgttgaca

SEQ ID NO: 683826 - DNA, 910 bp, Homo sapiens
caagtagctgggattacaggtatgcaccaccacaccaggctaattttgtaattttagtagagatgggttttctccatgttggtcaggctggtcttgaactcctgacctcaggtgatctgcccgcctcggcctcccaaagtgctgagattacaggcgtgagccaccgcgcccggccccagctctgtatctgaacttgctcttggaactggcaacccagggcctctcaatcactaacactgtaggggaatcttctctccttggatctgccacggctctgcctctaatgcaggtttctcaacagtggcattgtggatattttgtgctggctaatactttgttcggggctgtcctgtgtgatgtaggatgctgagtgcgtccttggcctccacgcactagatgctggtagcatcttcccccaagctgtgatggccaaaaatgtctccaggcacttacgaatattccctggggaagcaaaatccccctctctcacctctgttaacaactacttccctaatcctatctccctaatcctaattcccctactcaccaccccctctcttccccaacctctgttataggggagaaaaaagctttcgtaagcaaattataagtttttgagcaaaaacaaacaaaagacctacaaagcagatgcagatctcccaacctgcttctcttatgcaaaaaygttttggggaaattcagcagattacattagatttatccagtttgaccccccagaataagataaagaaaagcaggtaccaaacacaaaagtgtctcattataagacatggggagcatgacccaggaggataaccaggtttgggtttgaagcttattcattatgggggcccttccttaagatacaaaattacacacgtaatactggacattaaagtaaatgttgaca

SEQ ID NO: 683827 - DNA, 2302 bp, Homo sapiens
ccctggccctgcacctcacatcacgatgttcgcacgtcagcacagtgggcggttggagtactcctgcagccagcgataatcgccacatgccgcgtgactccaaaccacaccaacacataccactattcccacctaacccagcccaacacaaactccctcagctagaggccgaaaatgcccatggccactccagctgcacccagcataagaggaagcaggacaatgggaaagtctagtgaaaagaggtagtgatcttaactgacgtggttgtgatagctttctttcgcaaatctcataaagccatgtggccgcaatgcaagtgagaggccctgaggtttaagctctgctcggaacactctccctgcctgtactacagtcatccctcggtatccctagagaaatggttccakgacccccaccaaataccaaaatctgcagatgctcaagtcctttacttaaaatggcacagcatttacatgtaacatcctcccgtacactttaaatcatctctagattacttataatacataatacaatgtaaaggctacgcaaacagttgttacattgcatgttttaatttgtattgtttttatcattgcattgttatttttcattgggtttttttcccgaatattttcattccgcaacgtttcattctacattgcttgaatctgcagatgtagagcccacagtaggctaagtatcctagcaaacagctcaagcagggacttttgtagctccggggatcaaggctgtgttgtcacactgaactcaacaccagtgatgttatccacattaagtaggtgacgtaaattttgggcaaggatagtgcaagctttaccttgccgcacgggagaactggatctgatgtctatcacttgcgaaaggattaagttgtatgacagctcagctcccctttcactctctttcacttcgcgattgactgacaatcacaaggctaaatgcttgtgttgtttggaaaatctgtacaaaggctcctctctcctcccctgggcttttgtcagaaagaaagctcgaagtataacaatggaaacgatgcaagcagagatctctcacatccccgccggagttgaaattatttacctagaatcagcaatccagatcttatgctgattagaccttcctaggaagctattcagaagccacctcaacacagacttgctccgtgaacccctgtgtacgggaggaccggcacagaaacagcgggagcagggacactgctacggccaatgccaaaggaaggtggtctgtgcctagcagggcttacctcgtcatacatgaactgaagcgtcagggctgacttgccaacgcctccgctgccaaccatgatcaccttgtggagggccaaggagctctggcccttactcttgttggcagccatctcgctggtcttctgaggctgtgacacacagatgacccactgaagagctgctgatgacaaagacaaagacttagaggcgatttgctttcaacctagctaaaaccaaatgtcattcacatcctccattaaagcctaactaacccagacattccaacaggaaagtaatcctttcaggctcagggcagacatgcgagccctccaacaactctggaagtcacttaccccagcacagctgggtcgaagccaaggctagaggggagaaacaggagcgcacaccccacgcccgcctcactgggcagggtggagaggacacccagtcaccaaaaatcatcagaccctcagcagggcctcactgaggcagagaccaaaccgctcgtagctccagtttcctacctctctgctcggttctcggctgccgcggagaacagcttgggacctcaatccccagctctttagctttactcctcgctttgccctcttaccctctaccccacaacacgcacacactcacaacacgctcacacacgctctcacattcacactcacaaacggtcactaacacactcacacatgcccacattcacacacatgctcacactcacacacgctcacattcacacacactcacgctctcacattcacattcacacatgctcacacactcgcacacacattcacacatgctcttattcacacacattcactcacattcacacattcacactcgctcacacacgctcacattaactcacattcacacacacgctcacactcattttcacactcatgttctcacattcacacatgctcatgttctcacattcaaacacacatattcacacacttgctctcacacgctctcacacactatcacaggctcacacatgctagcacacgctg

SEQ ID NO: 683828 - DNA, 1109 bp, Homo sapiens
ccaggtgatattctatctcatttattttagaagtttaaataaaggtttctaaaagctgtccccccatctaacttaggaaaattactgtgaatttgtggaatcatgtttcttacatgaggcaagcagccccctccctatgaattcttatgaaaacaacctggaggtttaggatttctttttttgtttgtttgataaataaattttagttttttatttttattttttattatactttaagttctagggtacatgtgcacaacgtgcaggtttgttacatatgtatacatgtgccatgttggtatgctgcacccgttaactcatcatttacatcaggtatatctcctaatgctatccctcccccctccccccaccccatgacaggccgaggtgtgtgatgttccccaccctgtgtccaagtgttctcattgttcaatttccacctatgagtgagaatatgcggtgtttggttttctgtccttgcgatagtttgctcagaatgatggtttccagcttcatccatgtccctacaaaagacacgaactcatccttttttatggctgcatagtattccatggtgtatatgtgccacattttcttaatccagtgtgtcattgatggacatttgtgttggttccaagtctttgctattgtgaatagtgccgcaacaaacataggtgtgcatgtgtctttatagcagcatgttttataatcctttgggtatatacccagtartgggatggctgggtcaatggactctaaaagtttgaaatcaaggaggagaggattaactatgtgccatttgtgactttttctaggggtaactaatgatataaccttcacagaaaagaactaaaaacccacgctaggtgggctcaagagagcatctgaatataccatgcagtcagaaaatgtgctccaggtgtggagaacaaggacattgctgagcctttgcagaaatggaatggtgtgtaacttttgtaatgagaaagatcatagctatgcaaaccgtgaaagcatgtcagctggagaagaagacagccccatggggccagcttcacaggcccagaatgaaagagctggtcacccctgcccaagttaatgtagctgta

SEQ ID NO: 683829 - DNA, 661 bp, Homo sapiens
gccattgttctgttgcataaaaatatttgatttttcaactcaggggtaaaatctatagtaacgatcgctgctttgcaagttgttatttatcactggcttatgtaagtttgtaaaaaacagattaaaaatggccaaaaaaaagagtgaatacttagagaaattattaggtcttctgttaaaaaaagaaaacaaacttttatgaaaatttagatttagttcctaatagaagagtaaaaccaaaagggaacttgcttcctcaacacccgagtgctagaactctgcagtcctgtggcatatgttagcygtgcttgaaattccccgctttgtgctaaagcattggcagagcaagtagagctgacattgcactatcctacctctctttattttttattcctcttcgcttttctcccactccccattgcttatcatctagtcctccctcctgccttctctatcctccttttcttttttttctgcttctttcctctttctctatagtcttcatgctttctctcttttctttcttccttatctccttcttcttcccctctccttcagacaatgctgccttgtggttatgaagagcatgggttctggaagctaattaaggcttctaatgttggttctgccattcagactgagtgatcttggggtaagctac

SEQ ID NO: 683830 - DNA, 650 bp, Homo sapiens
gtggtgagggagggaggtattactggaagtcggagacatctgagagctgtgacattctgtcaagagattggtatggccccaggactgatccattcttcacactacagtgaaagtcatctttctttctttctttctttctttcttttttttttagagatggagtcttgctctgtcacccaggctggagtgcagtggcctgatctcggctcactgcaacctttgcctcccgggttcgagtgattctcctgcctcagcctcccgagtagctgggattacaggcatgcgccamcatgcctggctaattttctgtatttttagtagagacagggtttctccaagttggtcaggctggtctcaaactcccgacctcagatgatcacccgccttggcctcccaaagtgctaggattacaggtgtgagccactgcgcctggccgaaagtcatctttctaactggaaacagtgggcgcctttggaagacagaactggatagtggaaacaagcaggaagaagaccttttcagcttttgaaggctgtacaatatgcatgtatcatctaattttaaaataaaatgtaattttaaaaattgacctaaaatgcaaatatggtcattctttctcatgctcaaaacacttcagtagcccatctgcc

SEQ ID NO: 683831 - DNA, 604 bp, Homo sapiens
ctcagttaaattttttgctgaataaatcaatgaatggagaggtaaagaggaaccagaagttggggttacagaagtcactgatggaagagtttcaagatagtagaagtggtcagccctgttaagtgacaagccaaggactgaagaaagactggcagatttggcaatcagatgaagtgacctgaccaaagagcagcttgtgtgaagtagtgaggacaggcgctggtctgcgactggtttaggaggaaatggaaatgaagaagaagagataggaaagtggagattatatgatgacaagtatcaagataaaaatgaacacatttggcctgctacctgaattttttaaatcggctcaccaaaaaatatcaggcttattgaaatattggaatatctgatgaagtttcctcttatctttgagctgtttgggtttgggtaaaayttcaatgcttaaaattcacgtctacaactagcaggcagaaccttaaagtccagaaccattaaagggtttaataatggtgaggcatatgatgatgctgatgatgataatgtttctttctttcttttgtgatcttaatcactgtgtgatcttaactagtttgaaatgaga

SEQ ID NO: 683832 - DNA, 1054 bp, Homo sapiens
tgttgatctgtgaccttacccccaaccctgtgctctctgaaacatgtgctgtgtccactaagggttaaatggattaagggcggtgcaagatgtgctttgttaaacagatgcttgaaggcagcatgctcgttaagagtcatcaccaatccctaatctcaagtaaccagggacacaaacactgcggaaggccgcagggtcctctgcctaggaaaaccagagacctttgttcacttgtttatctgctgaccttccctccactattgtcccatgaccctgccaaatccccctctgtgagaaacacccaagaattatcaataaaaaaataaataaataaataaataaataaaaaaaaaaaaaaaaaaaaaagaatgttgtcatatgagactgttgtcatatctgtctcagataaacttttcatataagacagtggccaaagcacttcaaagggtagagagcttgggtttcacggcccttaaagatcagactttataaactgtctttcatttactagctaataagttcttttttagtgaatgttcatatatgtggcagaatttgatgtgagatttcccatcaatgtcatgggacagggagggtgtgggaarcagataaacctcacccacctggaacctcacccacctccaacatcttcttcagtgactactgtttccaccaaagagaaccaacattgcatatactgaaactggcttaagtttgtttgcaataactccttcccttcagagaatttgcatcttagctagaaagatgaatctattaggccattttcacactgaagatgggctacccaagattgggtaatttataactggaagatactacccaagattgggtaattgataaacaaaggaggtttaattgactcacaatcctgcacgcctggaaaggccttgggaaacttataatcatggctgaaaggaggcaggcaccttcttcacaaggcggcgggagagtcagcgagcaagagcagggaaaactgccttataaaaccatcagatctcatgagaactcactcattatcatgaggacagcatgg

SEQ ID NO: 683833 - DNA, 1054 bp, Homo sapiens
tgttgatctgtgaccttacccccaaccctgtgctctctgaaacatgtgctgtgtccactaagggttaaatggattaagggcggtgcaagatgtgctttgttaaacagatgcttgaaggcagcatgctcgttaagagtcatcaccaatccctaatctcaagtaaccagggacacaaacactgcggaaggccgcagggtcctctgcctaggaaaaccagagacctttgttcacttgtttatctgctgaccttccctccactattgtcccatgaccctgccaaatccccctctgtgagaaacacccaagaattatcaataaaaaaataaataaataaataaataaataaaaaaaaaaaaaaaaaaaaaagaatgttgtcatatgagactgttgtcatatctgtctcagataaacttttcatataagacagtggccaaagcacttcaaagggtagagagcttgggtttcacggcccttaaagatcagactttataaactgtctttcatttactagctaataagttcttttttagtgaatgttcatatatgtggcagaatttgatgtgagatttcccatcaatgtcatgggacagggagggtgtgggaagcagataaacctcacccacctggaacctcacccacctccaacatcttcttcagtgactactgtttccaccaaagagaaccaacattgcatatactgaaactggcttaagtttgtttgcaataactccttcccttcagagaatttgcatcttagctagaaagatgaatctattaggccattttcacactgaagatgggctacccaagattgggtaatttataactggaagatactacccaagattgggtaattgataaacaaaggaggtttaattgactcacaatcctgcacgcctggaaaggccttgggaaacttataatcatggctgaaaggaggcaggcaccttcttcacaaggcggcgggagagwcagcgagcaagagcagggaaaactgccttataaaaccatcagatctcatgagaactcactcattatcatgaggacagcatgg

SEQ ID NO: 683834 - DNA, 750 bp, Homo sapiens
tttgcttattttttctttccaaaaatgaaccccagggtgggcatggtggcttacgcctatgatcctaacaatttaggagaccaagacaggacgatccctggaggcctggagttcgagaccagcctgctcaacatagtgagaccacatctctatagaattttttttaagccaattgtaatggatatgtactggaattttttttttaatgtcatgatctcatcaacacacaaatcagaaatgagcttagacttcagctttgatgttcagttccatcgctgaaaccccattttcccaattggttgtcataagaaatgtctctgtttttttatttttatttttatttatttattttttggggggaacagagttttgctctgctacccaggctagagggcaatggtgccatcttggctccctgcaacttctacctcccaggttgaagcgattytcatgcctcagcctcccgagtagctgagacacatgccaccacgcccagctaatttttgtattttttgtagaaatggggcttcgccatgttgaccaggctggtctcaaacttctgacctcaggtgatctgcccatctcagcctcccaaagtgctgggattacaggcgtgagcgactgtgcccgggcttctatgttttatttgtcattttggacattttttcgtgctgccatacagttacagctaccatataatcagattaactcaggacattgttgatttgcttccactgtccagattattta

SEQ ID NO: 683835 - DNA, 1592 bp, Homo sapiens
tttgggggaacacaaattttccatctatatattgagggtacctctctaattctgtcttcgactttctcattcatcatgcatgatcttcatgttgttgcacagtcttcataaccaacttttcacttttccaactctatttctttcaattcttattgttttaaagtttgggaaaactcagggaggtatagtgaagaaaatttaaaatcacctaggtataatcactactaaattttactgcattttctttcaaaatttttcaatgcatttctgtacattatatgtagaatatacacttacagaatattataccaatrttgttgccaacttttatctcttagcattgtatcatatttccccaatgatgttaaaattatttgacaacatcttttaacaactgcctaatatattatagcatgatagcaccattatttatttaaccaaactgatgatgttgaaaatttgcgttgtttccagtttttcactattacaaataatagtttaagtaatattgtggcttttaaacatttgtatacatatcatatttgttttaggccaggttgctgcaagatcaactaattaaaatgttaaatattaaaatattttcatatttttatattcatatatagtactaaattattttcagaatctcagtaatgattattcattgctttaaaaaataatatttaaaaaataaaaataagtacagtacaaagaaattctattcaaccacctaaagtaaaggcattattaattttttaaataaaattatattattttaaagcctgttttttcattataaaatttgtgaaatttttaatgaaattatataattttctgtaatattttaaaggctgcattgtgttctagtgcatggacaagttataatttaattaactaattatttatttacaaacttttattcgcttctgttttataaattagacaaaactaaacaggcagaattcttatgccgaaatgctgggatttttttttttttttttttttacaaatagcacgttttatttgccactatttgaagtctgaactttaaacagattcttggactggtggttcatatccatcagctcgttcaactttagcacctgtctcgtccccagtggcttttccagaactactgccttcaccatgaagctccatgagctttcccaattcaaacttgggcttcttcagcatttttacttttctaacgaagacatcatggagaggataaatagattggcaagccttttctatgtcttttccaatgctgtctggaatcaatttattgaccacttctttcaagtcatttgtctgcacctctcggatcatgatttccatcatcttcttccggatttggcggacctgttggtgctgagcataagaggtcttccgtatctgatttttgcgttttttagtaaaaccaacacagaacagacgaagcaagtaaccatcggtagtcttgacatcaacgtgagcttcaatcattgtctgccattttttgaccatggaacacattttgtcacgggtaagatccatgccatggaagttagtcaggcagtttttaccctgaacatcttcagtaatcagcttga

SEQ ID NO: 683836 - DNA, 1592 bp, Homo sapiens
tttgggggaacacaaattttccatctatatattgagggtacctctctaattctgtcttcgactttctcattcatcatgcatgatcttcatgttgttgcacagtcttcataaccaacttttcacttttccaactctatttctttcaattcttattgttttaaagtttgggaaaactcagggaggtatagtgaagaaaatttaaaatcacctaggtataatcactactaaattttactgcattttctttcaaaatttttcaatgcatttctgtacattatatgtagaatatacacttacagaatattataccaatattgttgccaacttttatctcttagcattgtatcatatttccccaatgatgttaaaattatttgacaacatcttttaacaactgcctaatatattatagcatgatagcaccattatttatttaaccaaactgatgatgttgaaaatttgcgttgtttccagtttttcactattacawataatagtttaagtaatattgtggcttttaaacatttgtatacatatcatatttgttttaggccaggttgctgcaagatcaactaattaaaatgttaaatattaaaatattttcatatttttatattcatatatagtactaaattattttcagaatctcagtaatgattattcattgctttaaaaaataatatttaaaaaataaaaataagtacagtacaaagaaattctattcaaccacctaaagtaaaggcattattaattttttaaataaaattatattattttaaagcctgttttttcattataaaatttgtgaaatttttaatgaaattatataattttctgtaatattttaaaggctgcattgtgttctagtgcatggacaagttataatttaattaactaattatttatttacaaacttttattcgcttctgttttataaattagacaaaactaaacaggcagaattcttatgccgaaatgctgggatttttttttttttttttttttacaaatagcacgttttatttgccactatttgaagtctgaactttaaacagattcttggactggtggttcatatccatcagctcgttcaactttagcacctgtctcgtccccagtggcttttccagaactactgccttcaccatgaagctccatgagctttcccaattcaaacttgggcttcttcagcatttttacttttctaacgaagacatcatggagaggataaatagattggcaagccttttctatgtcttttccaatgctgtctggaatcaatttattgaccacttctttcaagtcatttgtctgcacctctcggatcatgatttccatcatcttcttccggatttggcggacctgttggtgctgagcataagaggtcttccgtatctgatttttgcgttttttagtaaaaccaacacagaacagacgaagcaagtaaccatcggtagtcttgacatcaacgtgagcttcaatcattgtctgccattttttgaccatggaacacattttgtcacgggtaagatccatgccatggaagttagtcaggcagtttttaccctgaacatcttcagtaatcagcttga

SEQ ID NO: 683837 - DNA, 1592 bp, Homo sapiens
tttgggggaacacaaattttccatctatatattgagggtacctctctaattctgtcttcgactttctcattcatcatgcatgatcttcatgttgttgcacagtcttcataaccaacttttcacttttccaactctatttctttcaattcttattgttttaaagtttgggaaaactcagggaggtatagtgaagaaaatttaaaatcacctaggtataatcactactaaattttactgcattttctttcaaaatttttcaatgcatttctgtacattatatgtagaatatacacttacagaatattataccaatattgttgccaacttttatctcttagcattgtatcatatttccccaatgatgttaaaattatttgacaacatcttttaacaactgcctaatatattatagcatgatagcaccattatttatttaaccaaactgatgatgttgaaaatttgcgttgtttccagtttttcactattacaartaatagtttaagtaatattgtggcttttaaacatttgtatacatatcatatttgttttaggccaggttgctgcaagatcaactaattaaaatgttaaatattaaaatattttcatatttttatattcatatatagtactaaattattttcagaatctcagtaatgattattcattgctttaaaaaataatatttaaaaaataaaaataagtacagtacaaagaaattctattcaaccacctaaagtaaaggcattattaattttttaaataaaattatattattttaaagcctgttttttcattataaaatttgtgaaatttttaatgaaattatataattttctgtaatattttaaaggctgcattgtgttctagtgcatggacaagttataatttaattaactaattatttatttacaaacttttattcgcttctgttttataaattagacaaaactaaacaggcagaattcttatgccgaaatgctgggatttttttttttttttttttttacaaatagcacgttttatttgccactatttgaagtctgaactttaaacagattcttggactggtggttcatatccatcagctcgttcaactttagcacctgtctcgtccccagtggcttttccagaactactgccttcaccatgaagctccatgagctttcccaattcaaacttgggcttcttcagcatttttacttttctaacgaagacatcatggagaggataaatagattggcaagccttttctatgtcttttccaatgctgtctggaatcaatttattgaccacttctttcaagtcatttgtctgcacctctcggatcatgatttccatcatcttcttccggatttggcggacctgttggtgctgagcataagaggtcttccgtatctgatttttgcgttttttagtaaaaccaacacagaacagacgaagcaagtaaccatcggtagtcttgacatcaacgtgagcttcaatcattgtctgccattttttgaccatggaacacattttgtcacgggtaagatccatgccatggaagttagtcaggcagtttttaccctgaacatcttcagtaatcagcttga

SEQ ID NO: 683838 - DNA, 595 bp, Homo sapiens
caccgagtcttctggcgccrtgatcgtggactttctagcctccaaaactgtgagaaataatggttgtttaacccatccagtttatattttctatagcagtgtgagctaagacacctcttttgcttggtcaggactgatttttaaatgcctcccgtctggcatatggtaggaaggaaactttccccaatagcagaaacagtgacggatttctgggtcatttttggaagcatttgctccactttggtttctttggtctcataatctcattgtgccaattatgtacatcatcctcgaggtcagaagtgtttaagggggagggaagttctaacttaaagaggacagataagaactctcaccaccagacacagcctcacgctcccactcccgaccttggttctatacctcactctgggagtggcacttcataggaacttagtaaaaggtgattaaatgctggtgtgtttatcttccatgtccctttatgcctttcatctgtacacatacattaggttcacgttattcttaggggaagtgaagacactccttaaggtctcacttgtttagctaaagaagacagacatccacagagccttgg

SEQ ID NO: 683839 - DNA, 595 bp, Homo sapiens
caccgagtcttctggcgccatgatcgtggactttctagcctccaaaactgtgagaaataatggttgtttaacccatccagtttatattttctatagcagtgtgagctaagacacctcttttgcttggtcaggactgatttttaaatgcctcccgtctggcatatggtaggaaggaaactttccccaatagcagaaacagtgacggatttctgggtcatttttggaagcatktgctccactttggtttctttggtctcataatctcattgtgccaattatgtacatcatcctcgaggtcagaagtgtttaagggggagggaagttctaacttaaagaggacagataagaactctcaccaccagacacagcctcacgctcccactcccgaccttggttctatacctcactctgggagtggcacttcataggaacttagtaaaaggtgattaaatgctggtgtgtttatcttccatgtccctttatgcctttcatctgtacacatacattaggttcacgttattcttaggggaagtgaagacactccttaaggtctcacttgtttagctaaagaagacagacatccacagagccttgg

SEQ ID NO: 683840 - DNA, 1988 bp, Homo sapiens
cattagtatcaattcagttatttagctctttgctagttttgttaatttactaaaatggcagatatgctttacatctggcacatttaacatttaaatgtcaggccaggcacagtggctcacacctgtaatcccagccctttgggaagccgaggttggtggatcacctgaggtcaggagttcgagaccagcctgtgcaacatggcaaaaccctgtctctactacaaacacaaaaattagcagggcatggtggcgcatggctataatcccagcgactcaggaggctgatgcaggagaatcgcttgaacccaggaggaggaggctgcagtaggctgagatcgcaccactgactgcactccagcctgggcgacagagcgagactccatctcaaaaaaaaaaaaaaaattgaatgacataattatttttgtaaaatgtagactcaaagacagtttagttaggcctgaaagaatcctacttgttttatttgttgtccctatcaagacttttaaagtctcataacatactgtatgagcagacagacagatttttggaagttgggtaaagccaaaacaaaaggaagcatctcaaaaaacaggcagatatccgtatctgagcaaaactgacagatatatttacaatgtatttggctatgcctacagtaatggcttggcagttcatgccttttaacatgaatttgacatgggttccagacttcttgagtttatgtatatttggagctggctagcctgatgaagttaaccccatttactaagtagttccatcaagggaacagagttctacagaacaagagccttgtatcccttgtcgctaacttgccagttttgcttaatttttttgacaagaggccatgtgtggaggtgaaccaattctttcattttctgccaggatgtttcaactgcagtaggactttctgcacaagcagaacaggctgctgagaaagagcaccatgaacagacagtgctaagaaaacactccagtgaaaaattcaaggaggctgtgaatgatggagcaggggtacatttttccttcaagaagatgcatacaattgtttttaaatctttgagttttgattctcaaccagcaaatgcatgacttccctgtcaatgacgagtaaatgagtcaaacattttcttcatttcagaatctctatgtctaacaagatcatgttgaagtgactcattgcagtgctacgccatgtgacagcaccatgccacctcctcacccacatcaccccaggcagaggctgcagagccacagtcaccctgcacccccctctgccaagtgttacacaactctcttggattgaatcagcatcaatgcatgatggctccatgcagaaaagacatcagacaggcccatattctgttgcttactggcagtagtagcagccctgggacctcactttccctttgtaaacctcagtgtcctcattggtaaaatgaagataacagaacctgccttataaggatattgtaaagatgaagttatatgagatgatgtgcataaaagtcctagcagagtgcctgggatgcaagaagaactgaactgttgctgggtctctctaattgctattgtgcttaacttgggacctgcatcatgggaccagttggccgacgactggatgacggtgcctttgctgtcttcctgctggccagtgtacttccacatgcaatttgtctggcacaatggcctttcattagcaatctaattcattagcaattggagattagcaatctccaattgatttagcaattaaaatatgaccagcagagatgaataacttctgtctgcttggacttcttccatgagttgcatgccacttaccaagaaagaatttggaagtgacaccytcacccagtgtatctctggctcccaactggaatgagatggcctttccaacactgatggcttctctgggatgggaattagactggaaccatacaaactaatgttgctagtgggaacttccc

SEQ ID NO: 683841 - DNA, 2809 bp, Homo sapiens
cagagaagaatggaatgaagtaatgacaaaggcctttcctgagcaaatcatgacactagtgagcagtgtgctgagctgtgtgagtgccgtctgcgtgcttgatgcactcaccctcaacctgcagatgaagctgctgaggcttggaggagctaagtggttttccgaagtgtgcctcacacatgggcgctcttaatctctcagcaccactcccaagcgtgttctccagaccctcagcttaagcctccttaggggctagtttgactgtgtagtgctgggccctgcacccagcgtttcttattctgggggtctggagtgggcccaagcattcgcatctctcataagttcccagcgatgctgatgctgcaggttccatctcgctttgggaaccacatcccatggctgtcttgtcagctgacagacacatctgggcttcagtgtgcttgtctggaatttggaaggttccaacctggctctagaatcctgatgaagaaaaattcaagaggggttgaggatttagagcttcaggaaaaagaaagaagaaaacaattgctccyctagagaatgtaatttgaaaggaaaacgttctggatgcagcagaggaaggaaaatctggaaaggtggttcctgggagatttgatgcagttgtttcaaataccacctggggagcccatagctgttactccattttctggaaatgagcaggaaagctgctgatttatttcatttagttaaagtttgtacctcactcataattcttaaagcaggtgtattgcactgatgtcgcagtcttagagctgtgctgatttggcagccacaggcctcatgtggctcttgcatgtaccgagtccacactgatatgctgtaagcctaaagggctgctggattgtgaagacttagcaccaaaaccaatgtaaaatatctcatcaatactttttatatggactgcatgatagaatgacaatattttagatgtattggattaaatgaaattattacaattaattttacttggttctttttaatgtagccactaggaaatgtaaaattacatgtgtggtctggtttagctttctgttggacagctctgccctagaactttatttattttgtcattctccaaaagggcacaaccacacccagagaaaatgcctccatcattcctaaaagactgtgtaagaacctgtagtgatttcccaaatggacctgaggacttgaagtggctcggacagctttgaaagaaatagttgatggctttccctctcttacaagaactaaaagtttaagagtagaggattcatttattaagattttttaagtaaagtattgaatctcttgtttcagatgctgaaaaataacttagtgctttttttttccagaaacctttaggaaatcatcacttggcaatgatgagacagataaagagaagaaaaaatttctgggatttttcaaagttaataaaagaagcaatagtaaggtaatggattaaatacacatatgattttgtatcatgtaaaaaaaatagtctcttgaaatacatgcattcaacctgtcctggaacttttctaaacaattctatttaagaatactaattccttcaggtaaaagagagcttattagtatgcactggaatgacaggctgtgcttccacacttgattccaaaaggagtaatcttgggtgatggtggtttattcactagggggacaggaagcctgtgggctcctgatgaccggggccatgagcccttctgcctgtgggtgttccggtacttccacagaactctgcctgtggctgaaactcagtaaatcttgtttagattaatgaatgagtgaatggatgttatagttaagtgtaaatagccaatattgctatcagtgaactgtagcttatgcctcgtggcagagaagagtatcagtcattgaacttgtcttcttgctagtaatttttagatgttctttggtcctcctgatatgatctgggaatgtactatgtgataagttaattttattgattttgttggtgtttatgaaacacatctcagagtcatattttggatacagtattctagagtaattaagtcatagtacccagaataaaaatgaagatttttataattaattataagattatcaaacccataaatgccttctgactaccaagaaaagaaaatgctcattatccgtatttatatttgcttcacaagtatattttactaatatctagtattttatccttactaataagtaagactaaaaaagacaaaactgttccagtgaatgttaggttttaattccactagctcagtttggaagtgtgctccatctgtatatttctacaagagatgtgaagactggggactcaagtttgtgtgcagaccttctcagtgccatggtgcagataggtgcatgtagcccaaggccggacacctgatttcctgcccttcagtggcctgtggtgcagcctctgctgttagaattgtggtttacccaggtttgctgatgaggataccagggctcagagaaataaagtaaccttcttagtgtcccaggcttagacacagatgtgtctgcgtgcagagccagcacgtccctgtagccctgtggtgtttgggaagggaggaggagagtgagagccagatgagaacagaaggtccagtggagctcggccgaactggcagacttcctgtctttaagagtttttcacaaacctcagattcacctctgctgaagcttcggtaatggttttgtgattctcttgtacttaagagattgagcttttccccatgttgtgcttttctccatgtttctgcat

SEQ ID NO: 683842 - DNA, 1459 bp, Homo sapiens
tcactaccaagcttaacagaaccttaagcctatggcacaagatctcaactctctggctggcattcaaggcctcacaatcttgtcccagcttggctataagcctcatctttcatctgcccacctaccaggaaaccttaggctactctctgaaaatgccatccacctcaacatgtaattccattcacttggaatgttttacttatttaacttggcagtctcctttctcatcctccaagcccagatctaacaccacctcttctatgactcaccctcctcaggcacttaaaccctaggtacttamttctcttgaggcctatcatcatattgggatataattatttgtttgtattcacatcccacccccacttccaaacaacaaaaacaaatcccactacagtgggctactcagagactaggactgagtctcacttatcttagatttatttcttccccagccactgggcaaagaacaaaaggaaagggcaagagatgtgaatattcaccctcttgcttccctgtcattattattattattattattttgagacagtgtttcactctgccacccaggctggagtgcagtggcgtgatcttggctcaccacaacctctgcctctcaggttcaagtgattcttgtgcctcagcctcccaagtagctgagactacaggcacgcaccaccacacccggctaatttttgtatttttagtagagatgggatttcatcttgttggccaggctggtctcaaactcctgacctcaaatgattcatctgcctcagcctcccagagtgctaggatgacaggtgtgagccaccgtgcccagcctccctgctattatttataaactctttaataaactccacattggaagtgctcactgtggagtagggtttctcaagctcatattattgacatttggggctggataattctttgcgatggggttggggggtgctatcctttgcactgtaggatgcttacccactagatgataatagcaacccctgagttgtgacaaccaaaaatgtctctagacattggcaaatgtcctctgaggggcaaaatcatccctggttgaaatctactgctatgaagccagcaacatggattaaagaggcaagaatacagggcacagttgactagttgtagcccgggaagagagcactacctttaggagcagatgcccatcacatgcttgtatcctcacattgtgggctggtggtggaggggttggggactgctatttaaagtaagaactgactgcagccacacagtcagcatacttggggaattgtataacatatcaggaaaactgtgttttttttggtttataaaactcccttggccaggcgcagtggctcatgctgagcactttgggaggccaaggcgggcagattacgaggtcaggagtttgagaccaccctgaccaacatggtgaaaccccttctctactaaaaaa

SEQ ID NO: 683843 - DNA, 607 bp, Homo sapiens
tgtgtattgcagaaacaaggtggtcatagcagcagagcacagcgagggaagagtgacaggagaagaaaacaaaaggacagtcaatggcaaatgatgtagggtctaaaaggtcatggtaaggagtgcagattttgttctgagtgcaaagagaagcaacagcctgatgaagaagctgtggagtggcgtaaactgatatttatacagaatcactctactagttatgtggaaaataggttatagaagagcaagagtggaaaccaagagactgattgggagactacagcaggaatctaagagtggggtaatggttacttgggctaaggtaataatgktggagaagatgaaaaatggttggattaagacaattctttgaataacagtatcttggacatccatccattcatgcatgaattcaacaaatatttactgaatgtgtatcatgtaccacacacagagcagtaaacatgatcctcatgaaacattcaatctaaggtaagacatatttgtaatttcaacaaagtaagacaaatgtaatgatagggaagtacagggagctatgggagagcagaggtaatagtgatatctaaaagccaggtgaggtcacctg

SEQ ID NO: 683844 - DNA, 659 bp, Homo sapiens
atagtcatctgaggcaccattctttggggtcttgtgtttttaggaatttactggcatgacaatgatacaagacaatcgccataatttagagacaaaaatacatatatacatacatacgtacgtaaagttagggaatcaaggcgactgcaaaataataaaatcgagggtgagttactataagaaatgcatccattgaggtcctagtcgtgggctacatgtggttactgattttctccaagaacatccctggtcacaaatagagttataacttatttcctataccggactcctgaacatccagtggagagttctcaccttctttactaccatcaaaaccagagttcatggtgagaaatgaataagaatrggataatttacatttttatttgaagtgcacttaaactaaatgaattattgcagcacacaatctggaagattaagatataaatgctgtttcttttagctcttcagaaagcaatgacaaggcatctgactcatcctcctgcacctcttttcaattactgacttaaaccaggtaagcctgaccacaaaagagaaacttgtctgctcccttttatttggtttaagtttcctcagggatgtcctgagaatcctatgtgaaaagccaaccctgacactcacaccatttcgattcttga

SEQ ID NO: 683845 - DNA, 566 bp, Homo sapiens
ctgacatgatcaggtttagttttctcattaaggtaatagaacatgcacaattgaaaccattactgaagtagggctatggccttttgcttgcctttttccccttaaatttctaatagtgtgcttgatatttaatactaatggtgtaacctgtgtactaattgtttcagtttttaactatccttccacagtcattcacatttattttttattctaccctagtgctagacatttgtttattctccatgaatattataactttatttgtttattctccatgaatattataacttgaacactgatgaagcatattaagaaatgatttctaattgccaaagctgtaccaatcatagctagttttagcctttgctttgcaaaaccagtcaccatcttagtcctcatttccttgacatatttacatttgacatagctcacctttccctcctttttgaagtatttgttcatttggctcctaggacaccattcgtctagttttccacttacttcattgatcactccttcgtatgtttggctggatcttcctcatccatccycctagcctcctgtcc

SEQ ID NO: 683846 - DNA, 1029 bp, Homo sapiens
aaccaaaacaatttttttctttatcaacagaaataagctatagagtaacacctaaatacacctgaagttatacagaatctagcagatgaaaattggcatttrctaaatgaaaatattactaaattctttacatctattgctaaacagtgatcacattttatgctatcattggattgatcttttcttacagaattatgtgaaataatttaattgataaaaaaatacaatacagagtgaaatatttaagaataaaaatccaaaaacagtatctttaaactaaaaaaaacagtttcagtactatttctcaattttttagaggcatgttaaatgtctttatcttttctctaaagtaaatgttaataattattactcaagtgaaatatttttatcaacttcatataatcatgttttccaaaaataacaatattcctttcattagaatgacaccacaaatattacaaatgataatatactacattagttttatctactggtcccaacagagttatcattctaaaaattacactaattttaaaataccacagcaaatcaggatttattttgtatgtgtgtttttattttaagtttcagggtacatgtgcaggatgtgcaggtttgttacataggtaaacacatgccatgttggtttgctgcacctatcaacccatcacctaggtattaaactcagcatgcattagctatttttcctgatgctctcgccctcccagaacccccaacaagccccacttgtgttgttccccactctgtgcctacatgttcacattgctcagctcccacttataagtgagaacatgcagtgtttgattttctattcctgtgttagtttgctgagaataattgcttccagctccatccacatcccttccaagggacaagatctcgttcctttttatggctgtgtagtattccatggcgtatatgtaccacagcaaaacaggatttattacaaattttagggcttccttacctctaccaacaagtttctcggcatctagtttggagggaaca

SEQ ID NO: 683847 - DNA, 915 bp, Homo sapiens
agaactgggattaccagaggccagaaaagctgggaaagagagaagggtgaagacaaattaattaagcagtacaaaaatgcagtcagatagaaagaataggttgtagtattccatagtacagtaaataaattatagttaacaataatgtgttgtatgtttcaaaatagccagaaaaaaaatataatattctcaacacaaaaaaagatgtttgagatgattgatgtttcaattaccctgatttgatcattacacattgtgtattggtatcaaaatatcacatgtatcccccaaaaaatgcaacaattgtatatcaataaaaataaatgaattttttttaaagagaaagaaagtgtggatacacttagaccttaygtaatagattattttgcagacatatgacttaattcctaaaaattacttagagcagaattcaacacattaaaaggacattataaatgttaactatcattactattgtttgaaaattccttccaggaccagtatcacaagtgcatcaattgcgttgggcctatgctgggtttaatgctctgtggttgctgcctttaaatttgtaacaatattcgagcaggggccccattgttttattttgcactggcctccccaaattatgtagtcagtcctagccacactttcaggagctgatcattaccagagtgactctgttttctggggtagcaattctttcttccctatcactaatctctccctttctagactataaggaaggactactgaaagaacttttacagattatagaacaacacacttataagcaaacctcatcggccccccaaaagcctttgttttctcacctttccctgtggtaaggaaacacaaaccattcatgttgatacattggattgcataaccttggttttatcacccaaaggaaaa

SEQ ID NO: 683848 - DNA, 661 bp, Homo sapiens
gatattatccatgaccaataggaagattcacctaaagttgttggataaattcagaaaactaatgtaactaagtacccaaattgttagtgcaaatcacagtgatgactgtccgtaaggattgacaragttgatgcgtgatcatgaatttcattcataatgcaaaaataataataatacagcacttcttctccataaatgaatcagcaagagtttggttagtaggcaaaaagtataactctcaactgataaggtaacttactatctgaatggattgggatagtccacttcttaacatgtctaaaaataataatatcaatcacgtatattcaaaagtaaagatgtttattctcatctgagtcagagaccacaaaatgctaaacctgatgaaatttgagctttatcaacatgggatcgtctgtgtatattaataataaccaccaaacttaaactcatgagtactttcttaagtgccaggtactgttctaagaactatacatgtattaacttcttaatgagcctatgaaggaaatacttgtattatcctcattttatagatgaggattataaaacataaaacaggcccggtgcggtgactcacacctgtaatcctagcaatttgggaggccaagacaggcagatcacgaggtcaagagatcaagaa

SEQ ID NO: 683849 - DNA, 1526 bp, Homo sapiens
gctgaaatcttaggcaatgcctcctgaccccttttccaactgttctctccttcctatgggggtagaggcatcattgctttcatttttattaattttggttgatttctgtgaaatctgtctggacagggaatttggtatgtttcttgcttggtggatgctggcattctttcaactcagtaggtgcacagagcagtataggaagaaggaggcttaaggattgatgactgaaaatgtaatgagagaaatgcaaattctcaaggctcatgtgtcagcctactgcatgttgacacttttttgtatgatctatctgaatagatagaacttaggaatcacttttacatgtgaaacaaaggtaaactatgcactctgatcaccttcggttgatgtcaccctgaagagttgttcatcccactggttggagcctcacccccatcagatgagcagtcttctcccttgagacagaccaatctccttgtaacctcacagaggatgacaaccagcacacagctcaatgggtctaccagacctttaacacctgtcagacggcagagtacctgagaacaaagggcttttgtgggtcggttggcaccatctgtgaaatactcctcacagctgctgtccacattctatttttctccctccatggaaagtgggagaaaaggagagctccgctggctatcatatgactgagtagcagggctttctttgcaaggcaaggaggcagcatctccatggtcaagcctggcatgaggatcaccaggatcacaagcccatgacagaggtgtgggagatcaccagaaaatttctcttatccatctggttcacttgagattgacaacagctcacttctcaccctgctggcaggagagttgatatttagtgttacaccatttcatgccgtctgctttaatgatgacagcttatttaaaaatccattgtggagcactgccattcaatgataaaaaataaaagatacattcagctgcttattgggctattttgtcaaaatctgagaaaatattttacattggtccaaatgactaatgattatttgttttcctacttgtgggttgtttctctctctctgagtttacagcttttaacataacacaatcagagaacagaaaaacatcagaaccaaataacacatacacgaagccttaagatctaaaggcacagtcttaccgtcgtgtgagaccacatttacaccttgccagaaagatcagaatttatcttaatttcaaaagtcttttcaaagggaaccttcattacctcctttaacaacctttacagtcaggaaaactttgttctactctgaaaatacactctccatcattctggatcaatacttctctactctccaagttaaacaaatccagtttgttaattattttagtggttttctgccacctcgtacataggctaagaaagactttaaaagggtgacttttatgatatrtgaattgtatctctattttaaatgtacagaaggtgatctcacccctacacacatagtttattcatat

SEQ ID NO: 683850 - DNA, 660 bp, Homo sapiens
tggcaattctttaacatccttatctgataactccaaaatctagattacccatggcagagtaatccagagtatgccctgtgtatgggctgcatatggcctgtagcttgtttttgtaaggtctgtgggcaaagaatgttttttatatattaaagattgtaaaaatgagaatatgcaacagaggtggtacatatcctgtaaaacctaawatatttactgtctggccctttatagaaaaagtttgtcagctcctgacttttaggtctgtttctattgtctcttttttctcttggtcttatttctaaatatgcctggaagtagtattttagcattagtgttcacttactacagtttactaagtctagtaaagattttttaaatgaggtgtaacatccacaaagtgtacagtctggtgagttttcagttatgcatgtactcacctagctgtgatatacataaaaatataaaacatttacagcatcccagaagactcctttgaactccctcaaaacatgtattccctgccaggccaggtgcgacggctcacgcctgtaatcccagcactttgggaggccgaggcaggcagatcacgaggtcaggagattgagatcatcctggctaacacggtgaaacctcgtctctactaagaaatacaaaaattag

SEQ ID NO: 683851 - DNA, 658 bp, Homo sapiens
ttgaagattgttgcaagcataattcctttcaaaaattatgagaggacatcagtgggcataatagagtaacaacctctgaaaaccctctcttccataaaagcaatgagaacactagcaaaactgtctagacattaaccagaggcttgcagcaatccatttattcaagaaaaggcctgtaatcccagcacttcgggaggccaaggcgggcgatcaygaggtcaggagatggagaccatcctggctaacacagtgaaaccccatctctactaaaaatacaaaaaattagccgggcgcggtggcaggtgcctgtagtcccagctacttgggaggctgaggcaggagaatggcgtgaacctaggaggcagagcttgcagtgagccgagatcacgccactgcactccatccagcctgggtgacagtgcgagactctgtctcaaaaaaaaaaaaaaaaaaaaaaggaaagggttgcatctgggtaagaaaagcaagctttctgacattttaatgtaccctattcccactccccctttccccagctccacaacagcctcggccacacaatcatgctgacatccagcagcagagcagccaccgtagggctcagaaggggattggaactcctccaaagcttcattaccagagaattgccatttggcct

SEQ ID NO: 683852 - DNA, 1257 bp, Homo sapiens
gtaaatttggttaaatagttgcacatgttttctctatgaacagaaatcagaaatggaaatggaaaaccatgtcattgaatagcaactaaattcaaagtgaaataaaaataacatcagggacatgagtttaacttgaataaaattttgtagtggacgttaaaactaagtacattgagagacaccgtatctgaatggggagactcrctatcataggaataaaaatcctcccaacattaataatgtatggatattgctgcagttcttacacaatatgtttgagctagctaaaaggatttcaaaaattacatggaaaaataaatgcttcagaatcaccaagacactaagtcaaagaataatgagagggaattgcctttatatccactatatagtggagaatgctaaacgctgcctgcattagttacctatttctatgtatatacaatctaatgttaaaatctcagagagaccaaaggatcacagtcatattcagtcacacaaaggtccctttaaagagattaaaggtgttgctctcagattgtctcaaacaattaaacctctagggagcttaagagtatttttcctcagcctctcagcagaagctcaagatagtgaagggtttatccagagagatttgtagggtttcgtctaatgtagttaacacattatgcaagcaaacaaaaagacccacaaatttcctgagaaatctgtgtgtcagtttggagtggaaaaggcagacccagtacaacataaaaaggaattgttggacctccaaaattctagcaggaagcaggctgagaaaacagatgctaccttttctttaaaaaaaaaaaaaaaaagtccgggcacagtggctcacacctgtaatcccagcactttgggaggctgaagagggcagatcgcttgaggtcaagagctcaagaccagcctggccaacatggtgaaaccccgtctctactaaaaatacaaaaatcacccaggcatggtggtgggagcctgtagtcccagctactcgggatgctgaggcaggagaatcactcgaacccgggaggtggaggttgcagtgagcccgagattgcgccactacactccagcctgggtgacagagtgagactgtgtctccaaaaaaaaaggatgattcagagggcaaaaataaggagtccagaggatggagccaagagccatggagaattatttttagcaggaatgagactgagttctaaaatttggatttcagaattgctatggaccagtaacacc

SEQ ID NO: 683853 - DNA, 1257 bp, Homo sapiens
gtaaatttggttaaatagttgcacatgttttctctatgaacagaaatcagaaatggaaatggaaaaccatgtcattgaatagcaactaaattcaaagtgaaataaaaataacatcagggacatgagtttaacttgaataaaattttgtagtggacgttaaaactaagtacattgagagacaccgtatctgaatggggagactcgctatcataggaataaaaatcctcccaacattaataatgtatggatattgctgcagttcttacacaatrtgtttgagctagctaaaaggatttcaaaaattacatggaaaaataaatgcttcagaatcaccaagacactaagtcaaagaataatgagagggaattgcctttatatccactatatagtggagaatgctaaacgctgcctgcattagttacctatttctatgtatatacaatctaatgttaaaatctcagagagaccaaaggatcacagtcatattcagtcacacaaaggtccctttaaagagattaaaggtgttgctctcagattgtctcaaacaattaaacctctagggagcttaagagtatttttcctcagcctctcagcagaagctcaagatagtgaagggtttatccagagagatttgtagggtttcgtctaatgtagttaacacattatgcaagcaaacaaaaagacccacaaatttcctgagaaatctgtgtgtcagtttggagtggaaaaggcagacccagtacaacataaaaaggaattgttggacctccaaaattctagcaggaagcaggctgagaaaacagatgctaccttttctttaaaaaaaaaaaaaaaaagtccgggcacagtggctcacacctgtaatcccagcactttgggaggctgaagagggcagatcgcttgaggtcaagagctcaagaccagcctggccaacatggtgaaaccccgtctctactaaaaatacaaaaatcacccaggcatggtggtgggagcctgtagtcccagctactcgggatgctgaggcaggagaatcactcgaacccgggaggtggaggttgcagtgagcccgagattgcgccactacactccagcctgggtgacagagtgagactgtgtctccaaaaaaaaaggatgattcagagggcaaaaataaggagtccagaggatggagccaagagccatggagaattatttttagcaggaatgagactgagttctaaaatttggatttcagaattgctatggaccagtaacacc

SEQ ID NO: 683854 - DNA, 1257 bp, Homo sapiens
gtaaatttggttaaatagttgcacatgttttctctatgaacagaaatcagaaatggaaatggaaaaccatgtcattgaatagcaactaaattcaaagtgaaataaaaataacatcagggacatgagtttaacttgaataaaattttgtagtggacgttaaaactaagtacattgagagacaccgtatctgaatggggagactcgctatcataggaataaaaatcctcccaacattaataatgtatggatattgctgcagttcttacacaatatgtttgagctagctaaaaggatttcaaaaattacatggaaaaataaatgcttcagaatcaccaagacactaagtcaaagaataatgagagggaattgcstttatatccactatatagtggagaatgctaaacgctgcctgcattagttacctatttctatgtatatacaatctaatgttaaaatctcagagagaccaaaggatcacagtcatattcagtcacacaaaggtccctttaaagagattaaaggtgttgctctcagattgtctcaaacaattaaacctctagggagcttaagagtatttttcctcagcctctcagcagaagctcaagatagtgaagggtttatccagagagatttgtagggtttcgtctaatgtagttaacacattatgcaagcaaacaaaaagacccacaaatttcctgagaaatctgtgtgtcagtttggagtggaaaaggcagacccagtacaacataaaaaggaattgttggacctccaaaattctagcaggaagcaggctgagaaaacagatgctaccttttctttaaaaaaaaaaaaaaaaagtccgggcacagtggctcacacctgtaatcccagcactttgggaggctgaagagggcagatcgcttgaggtcaagagctcaagaccagcctggccaacatggtgaaaccccgtctctactaaaaatacaaaaatcacccaggcatggtggtgggagcctgtagtcccagctactcgggatgctgaggcaggagaatcactcgaacccgggaggtggaggttgcagtgagcccgagattgcgccactacactccagcctgggtgacagagtgagactgtgtctccaaaaaaaaaggatgattcagagggcaaaaataaggagtccagaggatggagccaagagccatggagaattatttttagcaggaatgagactgagttctaaaatttggatttcagaattgctatggaccagtaacacc

SEQ ID NO: 683855 - DNA, 620 bp, Homo sapiens
ttggtaaatctcatacagttactgaggtacgagacttactgaggtatacagactacaatggtatgagcccacagctctctctcccaccccacatgttctgcacagtaacccgacggccaatcatcaagaagagaagccattgccttccccttgcatccgggttgggctcagggcctcactgggaacccagataacatggcagaagtgaccactacacggcttctaagaccagctcagaagacactcagcagcctctggctctttgaatggtggctcttcagatgctccttcctggggcactctccctcagaagccagatgctatgctgtgagaagcccaagccacgtggagttctacatggaggctctctggttgatagtcccagctgggcccagtccttgagaggtatcatagctcaaaaactaggtatgtgggtgaaasagcctccagatggactggcatccccagtcaatcaggtcttccctgatgaggccccagacaaaacaaagaagagacaatccctgccatgccagcctggcttcctgacccacagaagccaggagcctaaaaaaatgaagtgtggggtactttcgtatccacagcaaaaaattgcaacagtt

SEQ ID NO: 683856 - DNA, 649 bp, Homo sapiens
tacattttaaagtgttggtggaggtgggaggagtggctcacagaactgtcagtaacaggggcctgggaaagtgagggtccttgaaaaagtagatagtgtcacagcccaagagtagaaatatatcttcctttaaactgctatctatctttccacctagtaaatttatggagataaacatcaacctggccaggtgtggtgactcacacctgtaatcccagcattgggaggccgaggcgggtggattactggaggtcaggagttcaagaccagcccggccaacatggtgaaaccctgtctctattaaaaacacaaaattagccaggcatggtggcacacgcctgtaatcccagctacttgggaggctgaggcaggagaatggcttgaacccrggaggtggaggttgcagtgagctgagatagcgccactgcactccagcctggacaaaaagagctaaactccttctcaaaaacaaaaacaaaaacatcaacccaccatagacagaccccggttccgtaattctgagcacaaaccctttgagataatgaagttttgcagccggaattctagttcagtcccagtgcaggtgttaaaacttgggaaataaacaaggtacagaactggaaactgggtagttctctaggtggctgca

SEQ ID NO: 683857 - DNA, 649 bp, Homo sapiens
tacattttaaagtgttggtggaggtgggaggagtggctcacagaactgtcagtaacaggggcctgggaaagtgagggtccttgaaaaagtagatagtgtcacagcccaagagtagaaatatatcttcctttaaactgctatctatctttccacctagtaaatttatggagataaacatcaacctggccaggtgtggtgactcacacctgtaatcccagcattgggaggccgaggcgggtggattactggaggtcaggagttcaagaccagcccggccaacatggtgaaaccctgtctctattaaaaacacaaaattagccaggcatggtggcacacgcctgtaatcccagctacttgggaggctgaggcaggagaatggcttgaacccgggaggtggaggttgcagtgagctgagatagcrccactgcactccagcctggacaaaaagagctaaactccttctcaaaaacaaaaacaaaaacatcaacccaccatagacagaccccggttccgtaattctgagcacaaaccctttgagataatgaagttttgcagccggaattctagttcagtcccagtgcaggtgttaaaacttgggaaataaacaaggtacagaactggaaactgggtagttctctaggtggctgca

SEQ ID NO: 683858 - DNA, 641 bp, Homo sapiens
ttcatcatttctcaaattgggtctcaagtcttaagacagcccacaggtgtgctagtgggctgctttgcaggaagctggctgaggaacagggtgtcccgggccctgctaggacagtaggaggaggtctgagtcagatctcccagaaaggatggtgccgacatcagggctgtcctcagaggccaatagagagatgggtgatgacaaagaaagtcccggcttggggcaggacggctggcaccaagtggccaatatccaggccaggagaggtggaaacaactccactagagacaaatcacaagtcaccaaagcagaccctctgccagcaaggactccatcagctactggctacaccgggcccacctccacccaaagggatttaaaacttcaaattgggggaacctgagctcatagttgctgattttatttacggctcatatcccttcattgttcaccagaggctcgtgtgttttagtgttttgtgtttgtgtgtgtgtgtgtgtgtgtrtgtgtgtggtggggggaggtatttcatttgaatttatttatcaattctgttttcctgtttttaaaattagttttctgattttgtttcattattgcctcctacttgctttccttggggtttgttgtgtgcatgaatt

SEQ ID NO: 683859 - DNA, 1731 bp, Homo sapiens
caagttcccagctctggacctttgagcatgcttccggttctgctttgaggcctctctggccatgattgcttccctaatgaccactgcttcagagagacctgccccaactccacccgctgcagtggcatggttgtgcctctgcactctgacagaagactggctatgcagctgtccagtgttgaacacagccttgcattgtaattgcttaaatgtctgtttctccaactgctctatgaccttgttaaagatgggaaccatrtcttagtttgcttacccctgacatagaggagcctcaataaataataaatcttaaaagtttaataaataatggtccaggcttttcccaaagacaaagaaggaaggagttcccagtgaattgggcacagtcctaaactgagtgagttagtctacaatggtggacattttattccactgatttgtggattgtggtcaattgtgaatactttagaatggttcagccctctgctggctgctgtgtgacatgtggagacagagatgagacacatgacttccagcacatttgtcatcgcagtcccagtgagtgacataagcatacgaaacagctacttaatagtaaggcaaccctgttttcagacactatagataatgcatttacccagccatcaatccataagaaaatactcaggtatttcttaggaatagctaggtgcttgtaaagaaagaatcatgtattgaaaagaaagccaactcaggtttgaatacaggatctactattcacacattgtgtgaattcggacaagttaagaaacctcagttgaaccccagtttcttaatatataaaatgagatcataataaaagatgaggctcaaatgagattatgcctatgaagcacttaacactatacctgacatttggtagtatctcaagacatgatagttgatgtcattctgcaggatgttcaacctcgagatattgtgaatgctcaggtatttgatgttacataaacaagaacagtagaatatgaacattttctgttattttttgtggtaatttattttttaactgtggaaacacattgtgggctcatctgccacacttctatgatagtgggggtcgtttttagtactcactcctgaatcctgtgaattgccttagttcctagagggccaaaccaaggcattgcatatctggataaatgttaccaacagccaagttcaagtttctacaggctccttttgtctcatacttgctcatccactgctcttctcagtggtggagaggtggggtcagaggatgggaggcagggagatctggtttgctaaagaagacacaaacctgagagtttcctaccgctgtgtgtcaccaaaacacagattctctgcacagatttagattttcttcttatattgtgtgggagaggctgctattctctatctgtctttaggggaaacaggaaagaaacccctctggacatccagggtcactcagaattcactcgcttaatacttctgggtgtaattattgtatcccccctcctgagggggtgtcctcagcacctcccactcttccttgcttactcattaacttctgtcttttccaatggatgtgagcccctttgggacacaagcagtgtctgggtcacctatattctcagcacctagtgtagtacctgccacagaggaaacactcaacaaatatctgataaacaaatgaaaaacatgaacaaatgaatcaagcaacaaagaaat

SEQ ID NO: 683860 - DNA, 1731 bp, Homo sapiens
caagttcccagctctggacctttgagcatgcttccggttctgctttgaggcctctctggccatgattgcttccctaatgaccactgcttcagagagacctgccccaactccacccgctgcagtggcatggttgtgcctctgcactctgacagaagactggctatgcagctgtccagtgttgaacacagccttgcattgtaattgcttaaatgtctgtttctccaactgctctatgaccttgttaaagatgggaaccatgtcttagtttgcttacccctgacatagaggagcctcaataaataataaatcttaaaagtttaataaataatggtccaggcttttcccaaagacaaagaaggaaggagttcccagtgaattgggcacagtcctaaactgagtgagttagtctacartggtggacattttattccactgatttgtggattgtggtcaattgtgaatactttagaatggttcagccctctgctggctgctgtgtgacatgtggagacagagatgagacacatgacttccagcacatttgtcatcgcagtcccagtgagtgacataagcatacgaaacagctacttaatagtaaggcaaccctgttttcagacactatagataatgcatttacccagccatcaatccataagaaaatactcaggtatttcttaggaatagctaggtgcttgtaaagaaagaatcatgtattgaaaagaaagccaactcaggtttgaatacaggatctactattcacacattgtgtgaattcggacaagttaagaaacctcagttgaaccccagtttcttaatatataaaatgagatcataataaaagatgaggctcaaatgagattatgcctatgaagcacttaacactatacctgacatttggtagtatctcaagacatgatagttgatgtcattctgcaggatgttcaacctcgagatattgtgaatgctcaggtatttgatgttacataaacaagaacagtagaatatgaacattttctgttattttttgtggtaatttattttttaactgtggaaacacattgtgggctcatctgccacacttctatgatagtgggggtcgtttttagtactcactcctgaatcctgtgaattgccttagttcctagagggccaaaccaaggcattgcatatctggataaatgttaccaacagccaagttcaagtttctacaggctccttttgtctcatacttgctcatccactgctcttctcagtggtggagaggtggggtcagaggatgggaggcagggagatctggtttgctaaagaagacacaaacctgagagtttcctaccgctgtgtgtcaccaaaacacagattctctgcacagatttagattttcttcttatattgtgtgggagaggctgctattctctatctgtctttaggggaaacaggaaagaaacccctctggacatccagggtcactcagaattcactcgcttaatacttctgggtgtaattattgtatcccccctcctgagggggtgtcctcagcacctcccactcttccttgcttactcattaacttctgtcttttccaatggatgtgagcccctttgggacacaagcagtgtctgggtcacctatattctcagcacctagtgtagtacctgccacagaggaaacactcaacaaatatctgataaacaaatgaaaaacatgaacaaatgaatcaagcaacaaagaaat

SEQ ID NO: 683861 - DNA, 1731 bp, Homo sapiens
caagttcccagctctggacctttgagcatgcttccggttctgctttgaggcctctctggccatgattgcttccctaatgaccactgcttcagagagacctgccccaactccacccgctgcagtggcatggttgtgcctctgcactctgacagaagactggctatgcagctgtccagtgttgaacacagccttgcattgtaattgcttaaatgtctgtttctccaactgctctatgaccttgttaaagatgggaaccatgtcttagtttgcttacccctgacatagaggagcctcaataaataataaatcttaaaagtttaataaataatggtccaggcttttcccaaagacaaagaaggaaggagttcccagtgaattgggcacagtcctaaactgagtgagttagtctacaatggtggacattttattccactgatttgtggattgtggtcaattgtgaatactttagaatggttcagccctctgctggctgctgtgtgacatgtggagacagagatgagacacatgacttccagcacatttgtcatcgcagtcccagtgagtgacataagcatacgaaacagctacttaatagtaaggyaaccctgttttcagacactatagataatgcatttacccagccatcaatccataagaaaatactcaggtatttcttaggaatagctaggtgcttgtaaagaaagaatcatgtattgaaaagaaagccaactcaggtttgaatacaggatctactattcacacattgtgtgaattcggacaagttaagaaacctcagttgaaccccagtttcttaatatataaaatgagatcataataaaagatgaggctcaaatgagattatgcctatgaagcacttaacactatacctgacatttggtagtatctcaagacatgatagttgatgtcattctgcaggatgttcaacctcgagatattgtgaatgctcaggtatttgatgttacataaacaagaacagtagaatatgaacattttctgttattttttgtggtaatttattttttaactgtggaaacacattgtgggctcatctgccacacttctatgatagtgggggtcgtttttagtactcactcctgaatcctgtgaattgccttagttcctagagggccaaaccaaggcattgcatatctggataaatgttaccaacagccaagttcaagtttctacaggctccttttgtctcatacttgctcatccactgctcttctcagtggtggagaggtggggtcagaggatgggaggcagggagatctggtttgctaaagaagacacaaacctgagagtttcctaccgctgtgtgtcaccaaaacacagattctctgcacagatttagattttcttcttatattgtgtgggagaggctgctattctctatctgtctttaggggaaacaggaaagaaacccctctggacatccagggtcactcagaattcactcgcttaatacttctgggtgtaattattgtatcccccctcctgagggggtgtcctcagcacctcccactcttccttgcttactcattaacttctgtcttttccaatggatgtgagcccctttgggacacaagcagtgtctgggtcacctatattctcagcacctagtgtagtacctgccacagaggaaacactcaacaaatatctgataaacaaatgaaaaacatgaacaaatgaatcaagcaacaaagaaat

SEQ ID NO: 683862 - DNA, 583 bp, Homo sapiens
gtgaacttatatataaataacaacaatagcaaagacaacaataaaccaactgtaatgcaatgtaaagtgaaatcartggtgagctgagtcaaagaagcacagagtatgaggggtgataccattagttctgactagaggatcaagaaggttttctcgggagaggtggcctttgagcgacatccttgaggatagtaatggcaagcacagtagtaggtggtggtggtgacgatgatgatgatggtgaaaagagcagctgccaatcactaaattcttatgatttacctagctctatattgtttgctgaagaacttctatgttattaatattttaactggtaaagcacaggaaggggatttcagataataaaaagaatggaataaacatgtttgtgtgttggtaggtgtagaacggagagtcatttggtgtgttcaaggtccactgtgcatggtgggttgtagtacaaaataagattgaaagaggagtaggaaccagagcagcaaaaagctgccaatgctttatgaattacacaagtcatacgtagagctctctggttacttgtgtggaaagttgaccccactgagct

SEQ ID NO: 683863 - DNA, 583 bp, Homo sapiens
gtgaacttatatataaataacaacaatagcaaagacaacaataaaccaactgtaatgcaatgtaaagtgaaatcagtggtgagctgagtcaaagaagcacagagtatgaggggtgataccattagttctgactagaggatcaagaaggttttctcgggagaggtggcctttgagcgacatccttgaggatagtaatggcaagcacagtagtaggtggtggtggtgacgatgatgatgatggtgaaaagagcarctgccaatcactaaattcttatgatttacctagctctatattgtttgctgaagaacttctatgttattaatattttaactggtaaagcacaggaaggggatttcagataataaaaagaatggaataaacatgtttgtgtgttggtaggtgtagaacggagagtcatttggtgtgttcaaggtccactgtgcatggtgggttgtagtacaaaataagattgaaagaggagtaggaaccagagcagcaaaaagctgccaatgctttatgaattacacaagtcatacgtagagctctctggttacttgtgtggaaagttgaccccactgagct

SEQ ID NO: 683864 - DNA, 583 bp, Homo sapiens
gtgaacttatatataaataacaacaatagcaaagacaacaataaaccaactgtaatgcaatgtaaagtgaaatcagtggtgagctgagtcaaagaagcacagagtatgaggggtgataccattagttctgactagaggatcaagaaggttttctcgggagaggtggcctttgagcgacatccttgaggatagtaatggcaagcacagtagtaggtggtggtggtgacgatgatgatgatggtgaaaagagcagctgccaatcactaaattcttatgatttacctagctctatattgtttgctgaagaacttctatgttattaatattttaacyggtaaagcacaggaaggggatttcagataataaaaagaatggaataaacatgtttgtgtgttggtaggtgtagaacggagagtcatttggtgtgttcaaggtccactgtgcatggtgggttgtagtacaaaataagattgaaagaggagtaggaaccagagcagcaaaaagctgccaatgctttatgaattacacaagtcatacgtagagctctctggttacttgtgtggaaagttgaccccactgagct

SEQ ID NO: 683865 - DNA, 587 bp, Homo sapiens
tacacattgtatgcatgtatcaaaatatcatatgtaccccataattatgttaaattatgatgttatcaacaacaacaaaaaagctccacatagtgtcctgcccttttctcccttctctcccatctgccaggttccttcacacagtgctccttccctctataggatacaacaaaatgatattttgkaagggaataccagcccctcccaaggcaccaaatctggtggcatcccagcttctggaactgtgagaaaataaaatttggttctttatcaattacccagtctatgttattttgtaatagcagcacaaatggactgcggcatttgcctttgtaagaaaaatgatatgccatgtttgggaacgttcaaatacatgctatagaagagcaatttaacaaatgacctttagctacatcaacctgttttaatatatgcatgctttcaccttacatataacaagctgaaataaaatattcagtgtgacacatttattgataacctcattttattcatggggaaaaattaaattttcaatgtaaaatttttccttttgtagaaaataacttacaagaattttcagcttctta

SEQ ID NO: 683866 - DNA, 1405 bp, Homo sapiens
tttacacatatatatgtatgtgtgtatatttggtgaagtgtctgttcatatcttttgcttattttttaattgggttttttaaaattgttgagttttaagagttctttgtatagttggtattcaagtcctttatcagatgtgttttgtgaatatatttttccagagtatgatttttgattctctgaacattttcattcacagaacaaaaccttttaattttaataaagtcaaacctatcaatttcttctttcatagattatgcttttggtattgtacgtcatcatcaaaaccaaggtcatataggttttataaaataytttcttctagaagttttataatttcatatttgtacatataggtctatgattaattttgagttaatttttgggcaaagtataagacgtgtgtctagattttttctttgtgatattttattcattatccattttctatatttgtctttacaatataagttatggaaattgttgatataatctgagtattacttctttaccagttacgtgttttacaaatattttcttccagctgtagtctgtgagttgctttaaattattttcttgatttctttttataatatactcattggcataatattattcacatacacaacttcagacactattcacattgtattttactgaacatcgcaatcctgtgtacagaaattttaagcctaattttacagatgacgaattaataattcttgtctttatgattagacttttgtctgatctctgaaattcctttctattttgagaaaaaaaaagtatcttattcttttttcttctgaattaaaaaatgtattaacatttaaaatattattacacataaagtttatttttaaataaagtatcagatagagatactgttcaatttttttccaatatggataaataattattccgacaacatttattacctagtctccgattttcctgttgattgatggtcacctctgatgtgtatgaatttccttcacatgtgtttgatgaggctttttcttttgggttttgtttttttattttggcccatttctctaaattttcaccaacgaaatacccttatattcacattaaatacatttaaaatttcaaaattttagttgggtgagtttctacttatacttcttaagattcatcttggttcctctttgttgggcagatgctacagaaaacagtatggaggttcctcaaaaaattagaattaggactattgtatgatccagtaatttcacttctgagtattaatcaaaaggaattgaaatcaggattctgaagagatgttaatactgctgtgttcaatacagcactattcacgaatagccaagatgtggaagcaacataaatgtctattgacagataaatggataaagaaaaaatactat

SEQ ID NO: 683867 - DNA, 1405 bp, Homo sapiens
tttacacatatatatgtatgtgtgtatatttggtgaagtgtctgttcatatcttttgcttattttttaattgggttttttaaaattgttgagttttaagagttctttgtatagttggtattcaagtcctttatcagatgtgttttgtgaatatatttttccagagtatgatttttgattctctgaacattttcattcacagaacaaaaccttttaattttaataaagtcaaacctatcaatttcttctttcatagattatgcttttggtattgtacgtcatcatcaaaaccaaggtcatataggttttataaaatattttcttctagaagttttataatttcatatttgtacatataggtctatgattaattttgagttaatttttgggcaaagtataagacgtgtgtctagattttttctttgtgatattttattcattatccattttctatatttgtctttacaatataagttatggaaattgttgatataatctgagtattacttctttaccagttacgtgttttacaaatattttcttccagctgtagtctgtgagttgctttaaattattttcttgatttctttttataatatactcattggcataatattattcacatacacaacttcagacactattcacattgtattttactgaacatcgcaatcctgtgtacagaaattttaagcctaattttacagatgacgaattaataattcttgtctttatgattagacttttgtctgatctctgaaattcctttctattttgagaaaaaaaaagtatcttattcttttttcttctgaattaaaaaatgtattaacatttaaaatattattacacataaagtttatttttaaataaagtatcagatagagatactgttcaatttttttccaatatggataaataattattccgacaacatttattacctagtctccgattttcctgttgattgatggtcacctctgatgtgtatgaatttccttcacatgtgtttgatgaggctttttcttttgggttttgtttttttattttggcccatttctctaaattttcaccaacgaaatacccttatattcacattaaatacatttaaaatttcraaattttagttgggtgagtttctacttatacttcttaagattcatcttggttcctctttgttgggcagatgctacagaaaacagtatggaggttcctcaaaaaattagaattaggactattgtatgatccagtaatttcacttctgagtattaatcaaaaggaattgaaatcaggattctgaagagatgttaatactgctgtgttcaatacagcactattcacgaatagccaagatgtggaagcaacataaatgtctattgacagataaatggataaagaaaaaatactat

SEQ ID NO: 683868 - DNA, 1118 bp, Homo sapiens
tgtcacttatctttaataattagactcatgcttaactgtccagacttaaccatggctactctcctcagtcaccaatgttccacttttaccttgagaatttgcctgaacacactatgctggcttgtgatttctattgttcaactgtccattacactccctccattcatcttggaaaaaattttcaaacatttattcctcctcttgtcgtcacctgatatacttaggtgttcctcctgttgtgtaccagaaatacacctgacattgtctctggactgtgaacactttgagaataagaactatgtcttcttcataagtgtatatttagaaaccaatgcatttcttatataatggatgcttaatcaatatttgatgaaggaaggcaagcaggcaagcaaagaaggaggaaggaagagggaaggcaaccagaaagaaaagaaagaaggaaggatggtagaagaggtgaaggaagggagaaaatgatattaggaaacactrcacagttattctatctgtgatacataaaaatgcctgaatctcagttttcctctcctgtttgattaagctgaagtaaaagaagcagaaccttaagtatgctcgactatataaaagtaaatagagtatatcataaaagccaagtaaacttctcaaagagaaatagaattaaaagtcaagtgcatgccgttatgttttctgattcccgctgtgatttaagtttaatctctgggttcctaaacaaaaatttcagataactatccacttaacatttttctaaggatctagacttgcagtaaagatacttacttacttaaatagacctactgtatgagacaatactattaaaagaaaatgtactagtacttttgtgtatgcctgaagaaatcagtttgctaattttaggactttgccaggtggactgatgctgatttccaagattgtctggccctatgtctttcttgacatactagaaaggacatttgatgtacacactgtgatatgtacagggaaaccatagcccttgtcctgaaatgacttaggaaataaatttgtctatccccactgcctttgatcttattaaaagtcatcgaggcttattcctagcactgagaacatagaaacag

SEQ ID NO: 683869 - DNA, 1118 bp, Homo sapiens
tgtcacttatctttaataattagactcatgcttaactgtccagacttaaccatggctactctcctcagtcaccaatgttccacttttaccttgagaatttgcctgaacacactatgctggcttgtgatttctattgttcaactgtccattacactccctccattcatcttggaaaaaattttcaaacatttattcctcctcttgtcgtcacctgatatacttaggtgttcctcctgttgtgtaccagaaatacacctgacattgtctctggactgtgaacactttgagaataagaactatgtcttcttcataagtgtatatttagaaaccaatgcatttcttatataatggatgcttaatcaatatttgatgaaggaaggcaagcaggcaagcaaagaaggaggaaggaagagggaaggcaaccagaaagaaaagaaagaaggaaggatggtagaagaggtgaaggaagggagaaaatgatattaggaaacactgcacagttattctatctgtgatacataaaaatgcctgaatctcagttttcctctcctgtttgattaagctgaagtaaaagaagcagarccttaagtatgctcgactatataaaagtaaatagagtatatcataaaagccaagtaaacttctcaaagagaaatagaattaaaagtcaagtgcatgccgttatgttttctgattcccgctgtgatttaagtttaatctctgggttcctaaacaaaaatttcagataactatccacttaacatttttctaaggatctagacttgcagtaaagatacttacttacttaaatagacctactgtatgagacaatactattaaaagaaaatgtactagtacttttgtgtatgcctgaagaaatcagtttgctaattttaggactttgccaggtggactgatgctgatttccaagattgtctggccctatgtctttcttgacatactagaaaggacatttgatgtacacactgtgatatgtacagggaaaccatagcccttgtcctgaaatgacttaggaaataaatttgtctatccccactgcctttgatcttattaaaagtcatcgaggcttattcctagcactgagaacatagaaacag

SEQ ID NO: 683870 - DNA, 1118 bp, Homo sapiens
tgtcacttatctttaataattagactcatgcttaactgtccagacttaaccatggctactctcctcagtcaccaatgttccacttttaccttgagaatttgcctgaacacactatgctggcttgtgatttctattgttcaactgtccattacactccctccattcatcttggaaaaaattttcaaacatttattcctcctcttgtcgtcacctgatatacttaggtgttcctcctgttgtgtaccagaaatacacctgacattgtctctggactgtgaacactttgagaataagaactatgtcttcttcataagtgtatatttagaaaccaatgcatttcttatataatggatgcttaatcaatatttgatgaaggaaggcaagcaggcaagcaaagaaggaggaaggaagagggaaggcaaccagaaagaaaagaaagaaggaaggatggtagaagaggtgaaggaagggagaaaatgatattaggaaacactgcacagttattctatctgtgatacataaaaatgcctgaatctcagttttcctctcctgtttgattaagctgaagtaaaagaagcagaaccttaagtatgctcgactatataaaagtaaatagagtatatcataaaagccaagtaaacttctcaaagagaaatagaattaaaagtcaagtgcatgccgttatgttttctgattcccgctgtgatttaagtttaatctctgggttcctaaacaaaaatttcagrtaactatccacttaacatttttctaaggatctagacttgcagtaaagatacttacttacttaaatagacctactgtatgagacaatactattaaaagaaaatgtactagtacttttgtgtatgcctgaagaaatcagtttgctaattttaggactttgccaggtggactgatgctgatttccaagattgtctggccctatgtctttcttgacatactagaaaggacatttgatgtacacactgtgatatgtacagggaaaccatagcccttgtcctgaaatgacttaggaaataaatttgtctatccccactgcctttgatcttattaaaagtcatcgaggcttattcctagcactgagaacatagaaacag

SEQ ID NO: 683871 - DNA, 1118 bp, Homo sapiens
tgtcacttatctttaataattagactcatgcttaactgtccagacttaaccatggctactctcctcagtcaccaatgttccacttttaccttgagaatttgcctgaacacactatgctggcttgtgatttctattgttcaactgtccattacactccctccattcatcttggaaaaaattttcaaacatttattcctcctcttgtcgtcacctgatatacttaggtgttcctcctgttgtgtaccagaaatacacctgacattgtctctggactgtgaacactttgagaataagaactatgtcttcttcataagtgtatatttagaaaccaatgcatttcttatataatggatgcttaatcaatatttgatgaaggaaggcaagcaggcaagcaaagaaggaggaaggaagagggaaggcaaccagaaagaaaagaaagaaggaaggatggtagaagaggtgaaggaagggagaaaatgatattaggaaacactgcacagttattctatctgtgatacataaaaatgcctgaatctcagttttcctctcctgtttgattaagctgaagtaaaagaagcagaaccttaagtatgctcgactatataaaagtaaatagagtatatcataaaagccaagtaaacttctcaaagagaaatagaattaaaagtcaagtgcatgccgttatgttttctgattcccgctgtgatttaagtttaatctctgggttcctaaacaaaaatttcagataactatccacttaacatttttctaaggatctagacttgcagtaaagatacttacttacttaaatagacctactgtatgagacaatactattaaaagaaaatgtactagtacttttgtgtatgcctgaagaaatcagtttgctaattttaggactttgccaggtggactgaygctgatttccaagattgtctggccctatgtctttcttgacatactagaaaggacatttgatgtacacactgtgatatgtacagggaaaccatagcccttgtcctgaaatgacttaggaaataaatttgtctatccccactgcctttgatcttattaaaagtcatcgaggcttattcctagcactgagaacatagaaacag

SEQ ID NO: 683872 - DNA, 427 bp, Homo sapiens
cgaatgaggaattttgaggactactgggcactataacttttcagagcaggcagggctgcttctcagcccaggaacttgggtaattgtcacacattggtaaaattcatsggagacaattgcccttaaatcaacattttcatctgcaaggtgctgtcagggatggtgtaggttatgaatcctgtcctcagaactggtgtacagctaagaacagttttggtctttttttgaaattctcttttttttgatatttgaatttgtttactattattatgcttttaaatctatatttatggattaaaatacggaaaggaagcataatggatgaaaaaatgtttcccttgggtgctggaatgatacatatttcactctaagtattctgtatctcctacacttctcaataagtatgtttatagtagagagtgtatta

SEQ ID NO: 683873 - DNA, 1208 bp, Homo sapiens
gaaagaaatgctacacagagaggccaaaaagaatctgaacaggccttgccaaatttcccccagcttgtcaccattaggtcatactccatttttgtccagtcatatttctccacacctctccacttcttccctcagactcagcataaaaatacacactgttccttaggtctttgaaccttaatttctgaagcctctcatgtcacataaaactttgttaaataaatttgtgatgctttgctcttgttaatctgtcttttcttataggagtgtcagtcatggaccttgtggtgggtgaggaaaagacgctactttttctcccctgcaacagctaggtggagctatcagatgtgtagttgtttaggtggatgtggagttaggaagaaatgtctaggcttgcgttatatatttgggaattatcagtgtgtgggtcttatttaaatgtgatatcaagcgtgtgaatgcagaaagtaaagatgagaatcaagaatggaaccctaggggacgctaatgtgaaaagattacagaaaattagggaagggattataagaaagtctgaaacaatgtcatttcctccacacattcatagagctccaggcccacaaatacttgggtttttattttttaatttccctgctatatctaggtacttggggctgtcaccagtgcccctagaatccatccatcttaagaagaaaaaggtctttcatctcagctttctagcagttctttgttttttagtctgccgcctctctgctttccaacacctggtctttgatgttattgcctccagtgtccgcattcttccccctttctcctctatagcagctactgctgatctcatgttcgctggcattctttccatccaactgatttcatctctaatcaaacaactagagttccttgctgatttgctttcatatatgtgtgtgtgtgtgtgtgcatgygcacgtgcacacatgtgtttagtataagtaccttaggagatttcagtatgtgtagttacaatccctactctcagttcctgcatgatgctaagttgtatcttgtccctgggctttttaacctgctgtttccaattcctagaacactcttttctttttccttagactagggagctctgcttcatttctgaaatctccattaagaggccagagaactttccccaagcttccaagtttggttttgatgaccttgtgtttatttttaca

SEQ ID NO: 683874 - DNA, 1208 bp, Homo sapiens
gaaagaaatgctacacagagaggccaaaaagaatctgaacaggccttgccaaatttcccccagcttgtcaccattaggtcatactccatttttgtccagtcatatttctccacacctctccacttcttccctcagactcagcataaaaatacacactgttccttaggtctttgaaccttaatttctgaagcctctcatgtcacataaaactttgttaaataaatttgtgatgctttgctcttgttaatctgtcttttcttataggagtgtcagtcatggaccttgtggtgggtgaggaaaagacgctactttttctcccctgcaacagctaggtggagctatcagatgtgtagttgtttaggtggatgtggagttaggaagaaatgtctaggcttgcgttatatatttgggaattatcagtgtgtgggtcttatttaaatgtgatatcaagcgtgtgaatgcagaaagtaaagatgagaatcaagaatggaaccctaggggacgctaatgtgaaaagattacagaaaattagggaagggattataagaaagtctgaaacaatgtcatttcctccacacattcatagagctccaggcccacaaatacttgggtttttattttttaatttccctgctatatctaggtacttggggctgtcaccagtgcccctagaatccatccatcttaagaagaaaaaggtctttcatctcagctttctagcagttctttgttttttagtctgccgcctctctgctttccaacacctggtctttgatgttattgcctccagtgtccgcattcttccccctttctcctctatagcagctactgctgatctcatgttcgctggcattctttccatccaactgatttcatctctaatcaaacaactagagttccttgctgatttgctttcatatatgtgtgtgtgtgtgtgtgcatgtgcacgtgcacacatgtgtttagtataagtaccttaggagatttcagtatgtgtagttacaatccctactctcagttcctgcatgatgctaagttgtatcttgtccctgggctttttaacctgctgtttccaattcctagaacactcttttctttttccttagactagggagctctgcttcatttctgaaatctccrttaagaggccagagaactttccccaagcttccaagtttggttttgatgaccttgtgtttatttttaca

SEQ ID NO: 683875 - DNA, 1208 bp, Homo sapiens
gaaagaaatgctacacagagaggccaaaaagaatctgaacaggccttgccaaatttcccccagcttgtcaccattaggtcatactccatttttgtccagtcatatttctccacacctctccacttcttccctcagactcagcataaaaatacacactgttccttaggtctttgaaccttaatttctgaagcctctcatgtcacataaaactttgttaaataaatttgtgatgctttgctcttgttaatctgtcttttcttataggagtgtcagtcatggaccttgtggtgggtgaggaaaagacgctactttttctcccctgcaacagctaggtggagctatcagatgtgtagttgtttaggtggatgtggagttaggaagaaatgtctaggcttgcgttatatatttgggaattatcagtgtgtgggtcttatttaaatgtgatatcaagcgtgtgaatgcagaaagtaaagatgagaatcaagaatggaaccctaggggacgctaatgtgaaaagattacagaaaattagggaagggattataagaaagtctgaaacaatgtcatttcctccacacattcatagagctccaggcccacaaatacttgggtttttattttttaatttccctgctatatctaggtacttggggctgtcaccagtgcccctagaatccatccatcttaagaagaaaaaggtctttcatctcagctttctagcagttctttgttttttagtctgccgcctctctgctttccaacacctggtctttgatgttattgcctccagtgtccgcattcttccccctttctcctctatagcagctactgctgatctcatgttcgctggcattctttccatccaactgatttcatctctaatcaaacaactagagttccttgctgatttgctttcatatatgtgtgtgtgtgtgtgtgcatgtgcacgtgcacacatgtgtttagtataagtaccttaggagatttcagtatgtgtagttacaatccctactctcagttcctgcatgatgctaagttgtatcttgtccctgggctttttaacctgctgtttccaattcctagaacactcttttctttttccttagactagggagctctgcttcatttctgaaatctccattaagaggccagagaactttccccaagcttccaagtttggttttgatgaccytgtgtttatttttaca

SEQ ID NO: 683876 - DNA, 1005 bp, Homo sapiens
cctcggcctcccaaagtgttgggattacaggcgtgacgactgcgcctggccgttttgctgttattcttaaagacataatgaaaaacagcaacacatttctcaaacggttgttaaaaattagaactttattgacttacattagtctgagaatgtacacaaagaatatcatagttcatgtaacaagagcctccatttcagagagaaaacacgaatagggatacatataagcacatgccatttaaatctatcagattgttgagtgataataaaataccatttcagaactatgtttcaaactcataggaaacaataaacaataacctttagaacagaatctttaaagtttagcttttaagcaagtactattataacagaaaagctttttggggggctgcatttcaaaactcattcatgcatcctaggtaacaatttggggtcactaatgttaatattaacatatgtatcagatgcatgtctagaaaacacacacacacacacattcattcattctcattctctctcccctccctgctcgacctccatctttctctctctccccatcccatatacagacatatagtcatatggagagagagtacatggaaaatagcagacactaaaaacaagctgtgtgatcttataagagacatgaaacccattgaaacacttacttcatcagccaccatacacctggaaaaaawaaaaaagaaaaattaattatcagagtgaacctttttccttttttttttgagatggagtctcgctctgtcaccaggctggagtgcagtggtgcgatctcagctcactgcaacctctgtctcccaggtccaagtgattctcctgcctcagcctcctgagtagctggaactacagatgcgtgtcaccacgcccatctaatttttgtatttttagtagagaaggggtttcactatgttgcttaggatggtatcgatctcttgacctcgtgatctgctcgcctcagcctcccaaagtgctgagattaca

SEQ ID NO: 683877 - DNA, 1005 bp, Homo sapiens
cctcggcctcccaaagtgttgggattacaggcgtgacgactgcgcctggccgttttgctgttattcttaaagacataatgaaaaacagcaacacatttctcaaacggttgttaaaaattagaactttattgacttacattagtctgagaatgtacacaaagaatatcatagttcatgtaacaagagcctccatttcagagagaaaacacgaatagggatacatataagcacatgccatttaaatctatcagattgttgagtgataataaaataccatttcagaactatgtttcaaactcataggaaacaataaacaataacctttagaacagaatctttaaagtttagcttttaagcaagtactattataacagaaaagctttttggggggctgcatttcaaaactcattcatgcatcctaggtaacaatttggggtcactaatgttaatattaacatatgtatcagatgcatgtctagaaaacacacacacacacacattcattcattctcattctctctcccctccctgctcgacctccatctttctctctctccccatcccatatacagacatatagtcatatggagagagagtacatggaaaatagcagacactaaaaacaagctgtgtgatcttataagagacatgaaacccattgaaacacttacttcatcagccaccatacacctggaaaaaaawaaaaagaaaaattaattatcagagtgaacctttttccttttttttttgagatggagtctcgctctgtcaccaggctggagtgcagtggtgcgatctcagctcactgcaacctctgtctcccaggtccaagtgattctcctgcctcagcctcctgagtagctggaactacagatgcgtgtcaccacgcccatctaatttttgtatttttagtagagaaggggtttcactatgttgcttaggatggtatcgatctcttgacctcgtgatctgctcgcctcagcctcccaaagtgctgagattaca

SEQ ID NO: 683878 - DNA, 1005 bp, Homo sapiens
cctcggcctcccaaagtgttgggattacaggcgtgacgactgcgcctggccgttttgctgttattcttaaagacataatgaaaaacagcaacacatttctcaaacggttgttaaaaattagaactttattgacttacattagtctgagaatgtacacaaagaatatcatagttcatgtaacaagagcctccatttcagagagaaaacacgaatagggatacatataagcacatgccatttaaatctatcagattgttgagtgataataaaataccatttcagaactatgtttcaaactcataggaaacaataaacaataacctttagaacagaatctttaaagtttagcttttaagcaagtactattataacagaaaagctttttggggggctgcatttcaaaactcattcatgcatcctaggtaacaatttggggtcactaatgttaatattaacatatgtatcagatgcatgtctagaaaacacacacacacacacattcattcattctcattctctctcccctccctgctcgacctccatctttctctctctccccatcccatatacagacatatagtcatatggagagagagtacatggaaaatagcagacactaaaaacaagctgtgtgatcttataagagacatgaaacccattgaaacacttacttcatcagccaccatacacctggaaaaaaaaaaaaagaaaaattaattatcagagtgaacctttttccttttttttttgagatggagtctcgctctgtcaccaggctggagtgcagtggtgcgatctcagctcactgcaacctctgtctcccaggtccaagtgattctcctgcctcagcctcctgagtagctggaactacagatgcgtgtcaccacgcccatctaatttttgtatttttagtagagaaggggtttcacyatgttgcttaggatggtatcgatctcttgacctcgtgatctgctcgcctcagcctcccaaagtgctgagattaca

SEQ ID NO: 683879 - DNA, 616 bp, Homo sapiens
agaatgacccgcctggcttggccctgcccagggagatcccagggacaagcgccgatgcctgagaggctgcaaaagagaccagcccagcgggtgtcgagggcctgggcccatccaaaggccatgctcgttctgcaggtgtgaatggatgtttgggaaaggagcccatagaggagaagaaagcggggagcttggttggggggtgtgctggtgccaaggcggagcaggcagcctagagagcaaggggcagccatcagggtacaaggaaggggtctggacccctgggacggcggctgcaggatgagcgcaggggacgaggggggccagggcattgtcaccgtgatggcttcccgagctgcttcccatccaccctcctgcaagacctgcgtgtggccctcccgcctcagacagccccaagcttccaggcctggatctatgtctgccctgtgtctgggggtgtmcttggacgccgtgaggaagggggtaagcgtcccagcagatggagaaagccccagaactgagggctgttgcctcagcatctgaaaatgcctgaattctcatcccagctcacaactgcttcctgacagtcgctggttcgttgctactgctgtctgctttg

SEQ ID NO: 683880 - DNA, 1461 bp, Homo sapiens
tgatgaaaaccatgtatactctgccgtctgacttacacagttccagagagtcacaatttcacaagttctctgaaattcatccacagacacacggggactcacagattcccttctaggaagccctcccccaggatcactgtgcaaggtgcccccgggctccccgatccccgacctggtcacaggctggcccctccattgagcagcagacaggaggctctgtagccccttggcctcacctgggtgggcttatccaccatcttcttcagtttttggactatcgtcagacaggtcctgtagtcacggcccagctcctgtgttttggtcaacaggtcaccctgtcaggaaagaaagcccttatgatggtctctcagacactctgggagcgcgtgaaagtgcccaggaaaggggccctttgtgtttctgaggccggcaggaatgtccgtgatctcttcccagagcgtggatacactgaaggcctgaactggctgcctggcccctgcccacccttttgcttgtcttagaggctctgagacaccccagaaacagcctcccacacccccagtactttcccagccctgcacttgcccctctcctattgaggaactcccaggggagtctgcctatttgggttctgcagccccaggctccttggagggtgagaccccagaggatcctcctggaggagtctgccagatacctgtagccctcctggccagacatgaattcaacaaaaccagcatcgtcagaaacagcccagcctccactcccacctcctgaccattagagagctccagacctcaccccaggagccaccagggaggagggaaaggagagggactgtggcaggtgagcagagagccaacacgtacctgggggccctcctgggccaggcacgggcaggatttctcctcatcacgcaggtgggctcttgccaggtcgtagtactcagggctcagacgagagaagaccagacctgaggaagaccagacttcagcttcccctccgcaggcggaaggagagggaaagcccgttctcctggctggtgggagtccaggaggtgaccagggcctaggacaggagctgggccttgcagggggccaggatacctgtccacatgctttgccctggagccgctctgacccactctcagcacaaacacgtgttctcacgttccttctagaaagccaggagggcgagactctctcttctcctctgttcccccagcaacacagatttgggggtcggtttgtctagaaacttccctcaatctcctttcaagggattttctttttttaccttccatccagatggcccagccaaatccactctcccttccagaagtgttcttgcccttggggctcacactgacctcaaggcctgggagagagcagggtgcagggggcaggaagtctgccttgaacacrgaagagatcttgttctctcaccagccccgcacaatcc

SEQ ID NO: 683881 - DNA, 515 bp, Homo sapiens
agcatttttgtctgtgcagggctcacctatttcgtatgtctttaaaactttgaccaattataaatcttttagcaaggtagagagtaaaatcctatattttctgtggatgttgacacatgtaagttcctgatcattatttattaaacaattagctttaacatgtaagatggaatgggaaaaacatttaaacctaatgtgaattgcctaggtatgagaagccttagaactttgttagaaatttctgttttccatttctcaaatactgtgaccataactcatagtttatttataaatagaaagtgacacttcataatacctggcagctttcaaaactagattatatctgtctttgcctgaagggctccagtaacactattgtacaatattttcttctgaccatctggcagttcttaggaaccaacctctgtcaacattttatagctactgcactggttacagctaatcctttcaatgaatgagctggaaaaaatgtagatacatcaatatcgtwttcc

SEQ ID NO: 683882 - DNA, 605 bp, Homo sapiens
ttaataattatttcccctccgggcaccaagagctttagatcctcagagcctaaaattgcagagacaracacaaatccccacgtgattgctcggggtgatggggagcagagccactgctgcttccatttcggggttcctggacccaccccttccatctattctgcagcagggctcactccagggactacacctgctctgtcttctcactcccctttgcgcagactttgagagcagggttcatttgtattgctctgtgtacatacactcactcccactgccctgcatcagtaaggccactgatggaggagaaaggtgctttcacatgccacatatgccacacctctgagtggtatggctcattttcctcaagcaaaatatcaggaccatggtcctaatacctaacaccaggatgatgggtcaggatgttaaattggagccaactcaggatatctacaaaagcaaaatggctactcaatttgggtaaagagctggcaaagttaaaaaatatcataagcagtctatatgtggtcaggaagaagggggacaccgaagaccaggatatataaaggctctgatcctggcggaaattcaactttggaaattag

SEQ ID NO: 683883 - DNA, 246 bp, Homo sapiens
ctccctggtttaagcaattcttctgcctcagcctcctgagtagctgggattacaggcacgtgccaccatgcccagctaattttttgtacttttagcagagacgggatttcaccatgttggccaggatggtctcgatatcctgaccttgtgatccgcccacctcaggctcccaaagtgctgggattacaggcgtgagccaccacacccrgcctgggtggcttttaatgatgctgtatcatccattcc

SEQ ID NO: 683884 - DNA, 2370 bp, Homo sapiens
aatttcacaatagtccagccggctaatgagctatgcttatcattagttctctttcagtcttgagcttctctctttcaccatcaaatgaaagaaagaaaacagcatgctacaggacattattttaaactttttaaattcagggagacttcgtatgtagaaaacaatgttaggaagtggcaatatattcaaacctatactgatttgaagctagcaaccaccaacaattataatgcaaataataattaatgtaagatgaatacaaatagagattcttgttgtcctaacaagatgttcctttttaggctgttctttgagtggatcgtgataaagcaaacatactgttttaaggacgatggggcagtgcttatgctgctttctttctggcccgtgttgggcctcttagggtcactctacaggatggaggagaaagacaatacaagagggaatacaagaggggaagtaaaaggagccagatagaccccattcacacacatttacgatgattttactacaattttacaccccttagggattattattattattattattttgatggagtcttgctctgtcgccaggctggagtgcagtgcgtgatctccactcgctgcaacctccgcctcccgggttcaagccattctcctgcctcagcctcccaagtagctgggactacaggcgcccaccaccacgcccagctaatttttgtattttagtagagacggggtttcaccatgttagtcaggctggtctggatctcctgacctcgtgatccgcccgtctcggcctcacaaagtgcggggattacaggagtgagccattgcccacccccacctgccaccgccccatttagggatttccatagcttgcattcaaaacagctgctctatgttttgrctgcttttctcagagtcttggaggactgagacatttgggggaaatttacattgcatgttcaacacccaaatgggaagttcacagttcaccagtggaattttactttctatagctaagggtttcttgaagccctttaagatcctgaaggaagagaaagccagaaccaaataagagctgcttaaataaatgatttaaaggatatttgatgaattattaactttttgggtgaggtgtcaaatacagggtgtctctctctctctgggatagtgtgcatgccataggattattgtgaagatcaatagaggtaatccacggcaaagtgctgagcaatgtgcatggtgtttagtctccttattgctgtctttaatgctatttctattaactatatcttcaatatataaaacatacaatagacattgtccagtataatttaaaactatgttaaattttgaaatggaatacgtgaaaactttgacaactggctcccaaggcaatcctagatttgaattccattggattcaaatgtgtgtatagtctccttattgctgtctttaatgctatttctattagctatatctttgatatataaaaacatacaatagacattgtccagtataatttaaaaccatgttaaattttaaaatgggaatatttgaaaactttaacaattggctcccaaggcagtcctaggtccaaattccattggtccaggaatgtggtacaccctacagggcccagttgcccttcacaaagttgacggagtcaattgtttgctgcccctggaggagcaagcagagatttgacaagatgaccagacagacatctttgggtgctgattctacctgacttaaggtgtgattggctcctttggtgtgggcactaggccaccagacgggcaaaacttcctctctcttccaagcacaggaatctgagcagaatgacttttcattaccaatgaattctttatagtcttcttttattttttttcaatgagttgcttttatttttgtcaacaaactgtgtcatttaccatagtaagaaaactcctgttgttggaggtctttatcagagttcctacaaatcaggttaattggtgatcaacagagcttttctgtctttaatgaggcctagtagcccaaggcaaggcctacctcttgataagggactttctttttttcttactctgaactctttgatcacttaaaaaagaaagaaagaaagaaagaaagaaagaaactaggaagaacaaccaccgggaatgtcattgttctttaattgcctgattaccaaatgttggagataaaagatagatgttctcaattaataacatttacatagattagcatcactaacaagcctcattagtagctgctgatttttgtttagatggtgtcccaagtcatttgctctctctctgaatgtgcgatcgaatgcacctttagtatgacaaaacattgccttctaatctatttccat

SEQ ID NO: 683885 - DNA, 627 bp, Homo sapiens
gctcagggagccaggaagaaagagagtgatcactttgcccctttggggcarttttgtaattctgatgcttcagcttagtgcagatttgagcaaatctgcagatatttgaacaaggtcttaatagaaacacttcaaatttcaagtttacattttgaagtctggtcacaacattctacatgatcagaacaaaaacactgttgttgataataacattagcaagacattaattcctactgtaggccatcagtaacagctgatgtatatctagaaattgccacacaccaggcacactttaagagcttcacgtgagttaactcacttaatcttgacagcaacccctgctgtaggtaatattattattttacaagttgagaaaactgaagaacagagaaattaagtaacttgcccagagacacacagccaggaagtgactaaacttcaaagaagttcattgtatgtgtttctgtgtgtgagcatgtattaaatatggtcaaagtgtttccttgaaaataagtagagccccactaaatcaatttgactctccaggagacaacataggaaattgttttctgctttattatgggtaatgtacataatattctattaaataaatcttatagttgacgg

SEQ ID NO: 683886 - DNA, 610 bp, Homo sapiens
agcccaggaagccatggaaggaccagacagcggggaatcctcccacaccccatcttccggcacacaggaaaggaacagaactttgttttgcagaaaagtagatgtaggtgtaagtgtctgggagtgggcgccgggggttgcaacatgccctccagctctcaggacccaagagcaatgcttcagttgccrgacgcctccaggagcaatgggcttttcggttgcaaaaccaaccttatgtctagcaaaccctaaaggaagctgaagaatcccctaggaaaagggatcaattggagtaatattggagtgtgatggatgccaacccctccccaaccatcttccacccttcttaccggcgccgacgccctggggcacacacacactataggtgaatcccaaacagctgtaaggtttcccgaccctgccgctgagggccaggcccacgcggtttcctcctctccaggactgttttctccttctccttcccctccccacatccccggcctgcccttatattgcaatctcaactcctctggacagtacttttgagacacacttatttctaccacgcaccttgcgggtcgctgggggtccacgtgggcgtggaagtctc

SEQ ID NO: 683887 - DNA, 610 bp, Homo sapiens
agcccaggaagccatggaaggaccagacagcggggaatcctcccacaccccatcttccggcacacaggaaaggaacagaactttgttttgcagaaaagtagatgtaggtgtaagtgtctgggagtgggcgccgggggttgcaacatgccctccagctctcaggacccaagagcaatgcttcagttgccggacgcctccargagcaatgggcttttcggttgcaaaaccaaccttatgtctagcaaaccctaaaggaagctgaagaatcccctaggaaaagggatcaattggagtaatattggagtgtgatggatgccaacccctccccaaccatcttccacccttcttaccggcgccgacgccctggggcacacacacactataggtgaatcccaaacagctgtaaggtttcccgaccctgccgctgagggccaggcccacgcggtttcctcctctccaggactgttttctccttctccttcccctccccacatccccggcctgcccttatattgcaatctcaactcctctggacagtacttttgagacacacttatttctaccacgcaccttgcgggtcgctgggggtccacgtgggcgtggaagtctc

SEQ ID NO: 683888 - DNA, 2979 bp, Homo sapiens
agaggagtaaagcagttacagtaactaggacagtgtaatggtggtgtgagaactggcagctagatcggtggaatagaatacagtccagaaatagtcacgcatatagtcagttaatgtttatcagaggtaccaagacaattcaatgggaaagttcaattcagatttactctggtatcctcttccattattttttcacattttacatactagttattaaggtcagtctatttctcatttattgcctattaataaaccagagctgatacactgtgcactctccatatgtgtctgttgaatccttgaatcagaaaccaacgtgatactcaggacattatataccatttgtgtgtatatacaaaattgggatttggtaagtgttttcaataaaaggaatgctcacgtaatagttaaattcaaagacacaaacttctaggagccatttttagatacatggacaaggattaaattaaaatgtatacaatttttattgaaatctaggcagatggkgtgtttccagagataacttttctttccaagatacggctactgtggaatctaatatttgatgaatattagataaagacacagccagagactcatatcaaacgaggctccctacaactggaagggccgtaggcatgcatagcactgaagtaacactgattcattcattcagtatttattatgtatctacgagataccaagcacatacagtaatgatgaacaagacatacatcaccctgtcaccacttttctcatgtagaaattgcagaggatattttaaggcttcactaaaacaaatacccttttctagaatataaattagtagtgattacacactgaagatcaaaactctcacactccttgtgtatcctattagtgttatccaacagaaatttaacacatagtatgtatataattttatattttctggtagccacatttaaaaagtgtaaacaggtgaattaaattgggtaatatattttatttaacttaatgtatcaaaaatatcatttcaacatgtagtcaatcttttttaaattattaaagtaatattttaaattttttattttgtactaaaccttcacatttcagcatatacattacacttatagcacatctcaatttggacaagccacatttccagtgttcaacagccacatgtggccagtggctaccttactggacactggaggcttatgtgtgaatcagcccccattgagctacaacctgttgaagtttacaagtggactcccgataaatggagagctgatggtatttctggactataatgttagaggaaagtcactggatacagtgactttctgttatagctctataacgctccaccagttttcatctgcaagagtcccagagttttactatatttgaagacagatctatactaaagtaacactgatacattcattatttattatgtatctgcaagatatcaaacacatgcagtaatgatgaacaagacatacatgcatgtcagacatacatgcatatatgcaaatatgtacaagtggtcttgaagattttaatgttcagtgatttcactagtaatgagacagcttttgaggacctaaaaaaaatctctactcacatttctcaattgatatctgatggggaatgttgaaacgaaccagtagaccatatatcagttctctgatacacaaataaaatgttttcagctctaggttaatgagcctatgctcatttgcatgcttggcttccatttaaaattcttttgcatttcattacaataattttttccctctgctctaaggtcattgtttccattaagttatagtataaatccccttattttcaagaatatgatctctttacgacactatacacgaagatctgtgttttaaatttgatatggtttgaatgtttgtcccctccagatctcatgttgaaatgtgattcccaatgtcaaaggtaaggcccagtgggaggtgattggatcatgggggcagatccctcatgaatggtttaacaccatccccttggtgataagcgagttcttgctcagttacttcatgtgagatctgcttgtttaaaagtatgtggcacctctcccctcactctcttgctcccattctcaccatgtggtatgctggctcccagtcatcttctgccatgattgtaagcttcctgaggccctcaccagaagctgagcagatgttggcatcatgcttcttgtacagcgtacagaaccatgaaccaaataaacttcttttctttaaaaattacccaggctcaagtattcccttacagcaatgcaaaaacagcctaacccagaattctcaatttatagtatctcatccagactgcctctcaactggaatttagagaggtagtgacttggaaccagtttggacgtgtcattgttttaacacaaatgtttatagactcaacataaaattagttttttaatcttttacagtagggtttctctgggtggctggtaccacccatctccactccaacagaatcacctggggaggagaagcctgggcccacagctgaactggaatctctagaaatggtgttcgggaagttgcatgtgtaataagtaccaagggaaactcatttcacactgaagtttgacagccagtgccttatagtgaagttctaccttaatatcactaaggataaaattgcatactaccatttgaatctgttttattactggaggaaatgctgttttcagtacttatgtactttgtttactacctttgctgaacattttgtgtactgtgagtaaatttttaagggtattcattcagctcatagaaagtatgttgtgctttcttgatatgtaagttatgaatgatggattcaactgaagtctaattatattgatcatgaatggactaatgtctaaaatcaaattgactaggacctagatcatattcctttgtattttttcaagtgtagtctctgactgtgtcaggtaagatattc

SEQ ID NO: 683889 - DNA, 2979 bp, Homo sapiens
agaggagtaaagcagttacagtaactaggacagtgtaatggtggtgtgagaactggcagctagatcggtggaatagaatacagtccagaaatagtcacgcatatagtcagttaatgtttatcagaggtaccaagacaattcaatgggaaagttcaattcagatttactctggtatcctcttccattattttttcacattttacatactagttattaaggtcagtctatttctcatttattgcctattaataaaccagagctgatacactgtgcactctccatatgtgtctgttgaatccttgaatcagaaaccaacgtgatactcaggacattatataccatttgtgtgtatatacaaaattgggatttggtaagtgttttcaataaaaggaatgctcacgtaatagttaaattcaaagacacaaacttctaggagccatttttagatacatggacaaggattaaattaaaatgtatacaatttttattgaaatctaggcagatggtgtgtttccagagataacttttmtttccaagatacggctactgtggaatctaatatttgatgaatattagataaagacacagccagagactcatatcaaacgaggctccctacaactggaagggccgtaggcatgcatagcactgaagtaacactgattcattcattcagtatttattatgtatctacgagataccaagcacatacagtaatgatgaacaagacatacatcaccctgtcaccacttttctcatgtagaaattgcagaggatattttaaggcttcactaaaacaaatacccttttctagaatataaattagtagtgattacacactgaagatcaaaactctcacactccttgtgtatcctattagtgttatccaacagaaatttaacacatagtatgtatataattttatattttctggtagccacatttaaaaagtgtaaacaggtgaattaaattgggtaatatattttatttaacttaatgtatcaaaaatatcatttcaacatgtagtcaatcttttttaaattattaaagtaatattttaaattttttattttgtactaaaccttcacatttcagcatatacattacacttatagcacatctcaatttggacaagccacatttccagtgttcaacagccacatgtggccagtggctaccttactggacactggaggcttatgtgtgaatcagcccccattgagctacaacctgttgaagtttacaagtggactcccgataaatggagagctgatggtatttctggactataatgttagaggaaagtcactggatacagtgactttctgttatagctctataacgctccaccagttttcatctgcaagagtcccagagttttactatatttgaagacagatctatactaaagtaacactgatacattcattatttattatgtatctgcaagatatcaaacacatgcagtaatgatgaacaagacatacatgcatgtcagacatacatgcatatatgcaaatatgtacaagtggtcttgaagattttaatgttcagtgatttcactagtaatgagacagcttttgaggacctaaaaaaaatctctactcacatttctcaattgatatctgatggggaatgttgaaacgaaccagtagaccatatatcagttctctgatacacaaataaaatgttttcagctctaggttaatgagcctatgctcatttgcatgcttggcttccatttaaaattcttttgcatttcattacaataattttttccctctgctctaaggtcattgtttccattaagttatagtataaatccccttattttcaagaatatgatctctttacgacactatacacgaagatctgtgttttaaatttgatatggtttgaatgtttgtcccctccagatctcatgttgaaatgtgattcccaatgtcaaaggtaaggcccagtgggaggtgattggatcatgggggcagatccctcatgaatggtttaacaccatccccttggtgataagcgagttcttgctcagttacttcatgtgagatctgcttgtttaaaagtatgtggcacctctcccctcactctcttgctcccattctcaccatgtggtatgctggctcccagtcatcttctgccatgattgtaagcttcctgaggccctcaccagaagctgagcagatgttggcatcatgcttcttgtacagcgtacagaaccatgaaccaaataaacttcttttctttaaaaattacccaggctcaagtattcccttacagcaatgcaaaaacagcctaacccagaattctcaatttatagtatctcatccagactgcctctcaactggaatttagagaggtagtgacttggaaccagtttggacgtgtcattgttttaacacaaatgtttatagactcaacataaaattagttttttaatcttttacagtagggtttctctgggtggctggtaccacccatctccactccaacagaatcacctggggaggagaagcctgggcccacagctgaactggaatctctagaaatggtgttcgggaagttgcatgtgtaataagtaccaagggaaactcatttcacactgaagtttgacagccagtgccttatagtgaagttctaccttaatatcactaaggataaaattgcatactaccatttgaatctgttttattactggaggaaatgctgttttcagtacttatgtactttgtttactacctttgctgaacattttgtgtactgtgagtaaatttttaagggtattcattcagctcatagaaagtatgttgtgctttcttgatatgtaagttatgaatgatggattcaactgaagtctaattatattgatcatgaatggactaatgtctaaaatcaaattgactaggacctagatcatattcctttgtattttttcaagtgtagtctctgactgtgtcaggtaagatattc

SEQ ID NO: 683890 - DNA, 1186 bp, Homo sapiens
tcaacaaaagtgttacgatggtcttgtagctgataaagaaattagcaaaggcccttgcacacaccaccattccaccaaccccacacacaagtgggaggattcccaagcctccaggacctctgctttgcctgcagtctgctcctctcccctccactgggcatctgaggacatgccagtcttgtgtcacatgcagcagtatttcccttagtgtgtgctgggcatgctctctaaacccagggactctatttataaagccttctagttgattcagggaagggaatcctaattgcttcttcttgccatcgtcattttctttcctctctatctgcttttcactatttccccaatgagtcctggcaggtcctctcacatccttctcagctctcccacaaagaatgtcgtcgtgctgagttttctgtcttctctcttccctttctgtaagggataaaaattcaaaacatgtcctcaagcagagtagcttaaccatatatttgtagtttgggcttctggctccacatctgtagattctccccatatctccccaacagcttgtctcgaacagtctttgtttccctaaagtaaggtagcagtgcccctctctaagaaggttgtaaataatgaaaacatacatacacacacacacacacacacacacacacacacacacagatgcctctgtcatggctatgtttgtgaacttggcagagaagctyataatcacaggagcacaaagcctattgactcaacccggcatttcatacaattactgaatatatgctggttgattacatagacagtctctggaaatgcaagaacttgtcacattggagacctccaaggaggggaactgagtaagttggggcagagatgggataaagagttccttctcactgtacacctttctgtatcatgcatttcctatatttaaaacacactgacatacctatgtaatgtcaataggtaagggacaggcgtcctgatatgttggttacaccaaagtgatcatatccagtgaccgtaagccatgtgtgtcatggggctggctgatgttgtctgcagttgagggactaggcttagagcccagttctggagaacatgccatgcactgtgcaattagtcctttccactaggatttcctggttgggaagagctgagttcctcagcacacagtcctttactcttcaag

SEQ ID NO: 683891 - DNA, 1781 bp, Homo sapiens
ttgtggtgcacacctgtagtcctcgcaacttgggaggctgaggatggcttgagcccaggagttcaaggctatagtgagccatgatcatgcactccagcctaggtgatagagcaagaccctgtctcaaaaacatgcactccagcctaggtgatagagcaagaccctgtctcaaaaaaaaaaaaaaaaaggaaaaaatattggaaaaaatgtgatcaggtctgagcactttttagcattcttttgtttcttttcagtgacatgggagtgtttgctctgtgctcaggaatgtgtttgggctttcttaaccctaagggagtgagtcgaggtcaagagtggttgggttcaactctgacaaaggcaggtgaactcctgacctggcaaattcatttttttccctgttccaagaattacttgactcatctttaaagcggtcacatttacactgacatttttcagtggtgagcaaaatcttgctacataaaaaactgtgcaaaatccttccgtcttgtaatatatraattcagggcctcagatggggtaaacagggcctacagtgccgaacatttatctttcttatttgaacgaacaactcttccttccttcctggaatgtgacttaacgttaagaatttctattaaatctctgggtacacccagagacctcagaaagctctctacagagagagcaaacatcctcctgtacttggcaaaagaagaaacagatgcttgcgtggcttgcaggctcagctgctcagggccgctctgtggaagagaaccagtgaacctgggttgccagaaaaaatgttaatgttgagttgagaataagcatttgcacttgtgagtagtcaacagatatgtaggacatgtgagtgcaacggaagcggcacccaaactggactgccctgtagtcaaagttaggggaactggggctattttgggtttgggccattgggtatccattttccctttctgagaagtaccccttctccatctagctcaggaactctgggaagatggccacacccaggctccaggggtgggctctaattagtctatgcaaattagttcatcccattcacttctctcccccctttcatgattggtttaagagacaggcctaccagcaatggtatgcaagacctttgctgggatttctgagaaagacacttgctctgtgtagaagctactaggataacttctctcctctggacagtgtggaaaatagacttgagtcttaagagcatggtggccctttgccacaattctgaatgcaatgtcaacccaaggaggaaaggagagctaagataattaagagatgggagctggccgggtacggtggctcatgcctgtaattccggcagtttcggaggccaaagcaggtggatcacctgaggtcaggggtttgagaccagcctggacaacatggtgaaatcctgtctgtactaataatataaaaattagcagggcgtggtggcacatgcctgtaatcccagctactcggaaggccgggcaggagaatggcttgaacccaggaggcggaggttgcagtgagccgagatcatgccattgcactccacctgggtgacaaagcaagactgtctcaaaaaaagaacaaggaaaaagaaaaaacaacaagagatgggagctgaaatcctgatcaaattggaccaactgacttttcactcactgaaccaataaattcttattgttgaagctaggctcagctgaggtttgtagtacttgcaaccaatgtttccaactgcccaactgccacatggtgtg

SEQ ID NO: 683892 - DNA, 1781 bp, Homo sapiens
ttgtggtgcacacctgtagtcctcgcaacttgggaggctgaggatggcttgagcccaggagttcaaggctatagtgagccatgatcatgcactccagcctaggtgatagagcaagaccctgtctcaaaaacatgcactccagcctaggtgatagagcaagaccctgtctcaaaaaaaaaaaaaaaaaggaaaaaatattggaaaaaatgtgatcaggtctgagcactttttagcattcttttgtttcttttcagtgacatgggagtgtttgctctgtgctcaggaatgtgtttgggctttcttaaccctaagggagtgagtcgaggtcaagagtggttgggttcaactctgacaaaggcaggtgaactcctgacctggcaaattcatttttttccctgttccaagaattacttgactcatctttaaagcggtcacatttacactgacatttttcagtggtgagcaaaatcttgctacataaaaaactgtgcaaaatccttccgtcttgtaatatatgaattcagggcctcagatggggtaaacagggcctacagtgccgaacatttatctttcttatttgaacgaacaactcttccttccttcctggaatgtgacttaacgttaagaatttctattaaatctctgggtacacccagagacctcagaaagctctctacagagagagcaaacatcctcctgtacttggcaaaagaagaaacagatgcttgcgtggcttgcaggctcagctgctcagggcygctctgtggaagagaaccagtgaacctgggttgccagaaaaaatgttaatgttgagttgagaataagcatttgcacttgtgagtagtcaacagatatgtaggacatgtgagtgcaacggaagcggcacccaaactggactgccctgtagtcaaagttaggggaactggggctattttgggtttgggccattgggtatccattttccctttctgagaagtaccccttctccatctagctcaggaactctgggaagatggccacacccaggctccaggggtgggctctaattagtctatgcaaattagttcatcccattcacttctctcccccctttcatgattggtttaagagacaggcctaccagcaatggtatgcaagacctttgctgggatttctgagaaagacacttgctctgtgtagaagctactaggataacttctctcctctggacagtgtggaaaatagacttgagtcttaagagcatggtggccctttgccacaattctgaatgcaatgtcaacccaaggaggaaaggagagctaagataattaagagatgggagctggccgggtacggtggctcatgcctgtaattccggcagtttcggaggccaaagcaggtggatcacctgaggtcaggggtttgagaccagcctggacaacatggtgaaatcctgtctgtactaataatataaaaattagcagggcgtggtggcacatgcctgtaatcccagctactcggaaggccgggcaggagaatggcttgaacccaggaggcggaggttgcagtgagccgagatcatgccattgcactccacctgggtgacaaagcaagactgtctcaaaaaaagaacaaggaaaaagaaaaaacaacaagagatgggagctgaaatcctgatcaaattggaccaactgacttttcactcactgaaccaataaattcttattgttgaagctaggctcagctgaggtttgtagtacttgcaaccaatgtttccaactgcccaactgccacatggtgtg

SEQ ID NO: 683893 - DNA, 1781 bp, Homo sapiens
ttgtggtgcacacctgtagtcctcgcaacttgggaggctgaggatggcttgagcccaggagttcaaggctatagtgagccatgatcatgcactccagcctaggtgatagagcaagaccctgtctcaaaaacatgcactccagcctaggtgatagagcaagaccctgtctcaaaaaaaaaaaaaaaaaggaaaaaatattggaaaaaatgtgatcaggtctgagcactttttagcattcttttgtttcttttcagtgacatgggagtgtttgctctgtgctcaggaatgtgtttgggctttcttaaccctaagggagtgagtcgaggtcaagagtggttgggttcaactctgacaaaggcaggtgaactcctgacctggcaaattcatttttttccctgttccaagaattacttgactcatctttaaagcggtcacatttacactgacatttttcagtggtgagcaaaatcttgctacataaaaaactgtgcaaaatccttccgtcttgtaatatatgaattcagggcctcagatggggtaaacagggcctacagtgccgaacatttatctttcttatttgaacgaacaactcttccttccttcctggaatgtgacttaacgttaagaatttctattaaatctctgggtacacccagagacctcagaaagctctctacagagagagcaaacatcctcctgtacttggcaaaagaagaaacagatgcttgcgtggcttgcaggctcagctgctcagggccgctctgtggaagagaaccagtgaacctgggttgccagaaaaaatgttaatgttgagytgagaataagcatttgcacttgtgagtagtcaacagatatgtaggacatgtgagtgcaacggaagcggcacccaaactggactgccctgtagtcaaagttaggggaactggggctattttgggtttgggccattgggtatccattttccctttctgagaagtaccccttctccatctagctcaggaactctgggaagatggccacacccaggctccaggggtgggctctaattagtctatgcaaattagttcatcccattcacttctctcccccctttcatgattggtttaagagacaggcctaccagcaatggtatgcaagacctttgctgggatttctgagaaagacacttgctctgtgtagaagctactaggataacttctctcctctggacagtgtggaaaatagacttgagtcttaagagcatggtggccctttgccacaattctgaatgcaatgtcaacccaaggaggaaaggagagctaagataattaagagatgggagctggccgggtacggtggctcatgcctgtaattccggcagtttcggaggccaaagcaggtggatcacctgaggtcaggggtttgagaccagcctggacaacatggtgaaatcctgtctgtactaataatataaaaattagcagggcgtggtggcacatgcctgtaatcccagctactcggaaggccgggcaggagaatggcttgaacccaggaggcggaggttgcagtgagccgagatcatgccattgcactccacctgggtgacaaagcaagactgtctcaaaaaaagaacaaggaaaaagaaaaaacaacaagagatgggagctgaaatcctgatcaaattggaccaactgacttttcactcactgaaccaataaattcttattgttgaagctaggctcagctgaggtttgtagtacttgcaaccaatgtttccaactgcccaactgccacatggtgtg

SEQ ID NO: 683894 - DNA, 1573 bp, Homo sapiens
tagcctatcagttggtttgtgtctgtgtgtgtatacacgtgtttcccaaaagattatggcgctcagtagcaatcaatacagacacacaggatgagatttaaatatgcagctggatctttcaatagatagacttctggctctctaattcgactcatatgaattgccttcatttctttaggacaagcattttgaggtgtaagaaaaaaggtattcatctaagatgacatgcatgtcggactcacattctatgcttggctgaacaaggatcaactgctttattagaccagattcacagcatacgtgcaggtccaaacaatatgatttctgattttaagagttcttattactcaaaatatcaaaagatagtcactgcaaaagcccaaaaagaagtacagaatccatcaagagttaagattccctgcaaatcataaaccattctttagacagactgaaaggcattatcttcttttgttttgagacagagtctcgctctttcrtccaggctggagtgccgtggcatgatctcggctcactgcaagctccgcctcccgggttcacaccattctcctgcgtcagcctcctgggtagctgggactacaggcgcccgccaccatgcctggctaattttttgtatacttagtagagacggggtttcaccatgttagccatggtggtcttgatctcctgacctcgtgatctgcctgcctcggcctcccaaagtgttgggattacaggtgtgagccatcacctggccctaagacatcatctttttatgctgatatcaatgttgagatgttaataaaataattagtctataactcatacagctttatcatctgccaaactatgctaatcatgctttgattctttaactggggctccccctagcccccatttacaataccatgtggctgggcagacagatctgtgcctaatagtctttctgaatacagaggagctagtgaaaaacttgtctggatggtgaaagtgaagggaagtttcatctcaatgtagacaacagattgctgaaggatgtctcaggacacccagtgggaccaaaggtcacaaaaaggtggctcactctcattttcagccagagtacatatgtcttgtttggtccacacattacgtttacaaattaattgcccacatttaaaaattagaagattccatttgaaagctggctctctggcatctcttaaagtactggaatttctggtcacagttggtcaaccttcctacatggtgacaaacggctgaagccaagaagccactgccctctttagatggagtcaggtgcccagtgtgccatggtttccccctgccccatttggcacattaatgttacctatctgtttcctgcgagcatctccagtcattctcgggactacggtgtgaactgcactatgtagttctttgtgtccatggcacctagtgcctgcttggtacacaaggggtatgcaatatgcctgctgagtgaagaattcaatgaatgaattaatctattacttaaagggaatatctaaagaaggatggaagttccttttctacaggggtcacttaagactgttta

SEQ ID NO: 683895 - DNA, 1573 bp, Homo sapiens
tagcctatcagttggtttgtgtctgtgtgtgtatacacgtgtttcccaaaagattatggcgctcagtagcaatcaatacagacacacaggatgagatttaaatatgcagctggatctttcaatagatagacttctggctctctaattcgactcatatgaattgccttcatttctttaggacaagcattttgaggtgtaagaaaaaaggtattcatctaagatgacatgcatgtcggactcacattctatgcttggctgaacaaggatcaactgctttattagaccagattcacagcatacgtgcaggtccaaacaatatgatttctgattttaagagttcttattactcaaaatatcaaaagatagtcactgcaaaagcccaaaaagaagtacagaatccatcaagagttaagattccctgcaaatcataaaccattctttagacagactgaaaggcattatcttcttttgttttgagacagagtctcgctctttcgtccaggctggagtgccgtggcatgatctcggctcactgcaagctccgcctcccgggttcacaccattctcctgcgtcagcctccygggtagctgggactacaggcgcccgccaccatgcctggctaattttttgtatacttagtagagacggggtttcaccatgttagccatggtggtcttgatctcctgacctcgtgatctgcctgcctcggcctcccaaagtgttgggattacaggtgtgagccatcacctggccctaagacatcatctttttatgctgatatcaatgttgagatgttaataaaataattagtctataactcatacagctttatcatctgccaaactatgctaatcatgctttgattctttaactggggctccccctagcccccatttacaataccatgtggctgggcagacagatctgtgcctaatagtctttctgaatacagaggagctagtgaaaaacttgtctggatggtgaaagtgaagggaagtttcatctcaatgtagacaacagattgctgaaggatgtctcaggacacccagtgggaccaaaggtcacaaaaaggtggctcactctcattttcagccagagtacatatgtcttgtttggtccacacattacgtttacaaattaattgcccacatttaaaaattagaagattccatttgaaagctggctctctggcatctcttaaagtactggaatttctggtcacagttggtcaaccttcctacatggtgacaaacggctgaagccaagaagccactgccctctttagatggagtcaggtgcccagtgtgccatggtttccccctgccccatttggcacattaatgttacctatctgtttcctgcgagcatctccagtcattctcgggactacggtgtgaactgcactatgtagttctttgtgtccatggcacctagtgcctgcttggtacacaaggggtatgcaatatgcctgctgagtgaagaattcaatgaatgaattaatctattacttaaagggaatatctaaagaaggatggaagttccttttctacaggggtcacttaagactgttta

SEQ ID NO: 683896 - DNA, 1573 bp, Homo sapiens
tagcctatcagttggtttgtgtctgtgtgtgtatacacgtgtttcccaaaagattatggcgctcagtagcaatcaatacagacacacaggatgagatttaaatatgcagctggatctttcaatagatagacttctggctctctaattcgactcatatgaattgccttcatttctttaggacaagcattttgaggtgtaagaaaaaaggtattcatctaagatgacatgcatgtcggactcacattctatgcttggctgaacaaggatcaactgctttattagaccagattcacagcatacgtgcaggtccaaacaatatgatttctgattttaagagttcttattactcaaaatatcaaaagatagtcactgcaaaagcccaaaaagaagtacagaatccatcaagagttaagattccctgcaaatcataaaccattctttagacagactgaaaggcattatcttcttttgttttgagacagagtctcgctctttcgtccaggctggagtgccgtggcatgatctcggctcactgcaagctccgcctcccgggttcacaccattctcctgcgtcagcctcctgggtagctgggactacaggcgcccgccaccatgcctggctaattttttgtatacttagtagagacggggtttcaccatgttagccatggtggtcttgatctcctgacctcgtgatctgcctgcctcggcctcccaaagtgttgggattacaggtgtgagccatcacctggccctaagacatcatctttttatgctgatatcaatgttgagatgttaataaaataattagtctataactcatacagctttatcatctgccaaactatgctaatcatgctttgattctttaactggggctccccctagcccccatttayaataccatgtggctgggcagacagatctgtgcctaatagtctttctgaatacagaggagctagtgaaaaacttgtctggatggtgaaagtgaagggaagtttcatctcaatgtagacaacagattgctgaaggatgtctcaggacacccagtgggaccaaaggtcacaaaaaggtggctcactctcattttcagccagagtacatatgtcttgtttggtccacacattacgtttacaaattaattgcccacatttaaaaattagaagattccatttgaaagctggctctctggcatctcttaaagtactggaatttctggtcacagttggtcaaccttcctacatggtgacaaacggctgaagccaagaagccactgccctctttagatggagtcaggtgcccagtgtgccatggtttccccctgccccatttggcacattaatgttacctatctgtttcctgcgagcatctccagtcattctcgggactacggtgtgaactgcactatgtagttctttgtgtccatggcacctagtgcctgcttggtacacaaggggtatgcaatatgcctgctgagtgaagaattcaatgaatgaattaatctattacttaaagggaatatctaaagaaggatggaagttccttttctacaggggtcacttaagactgttta

SEQ ID NO: 683897 - DNA, 613 bp, Homo sapiens
tttttcccttggagatctcggggattttttctttatctttgaaatctaataattttacttgcgtatggtttagagttgacaattctggattaattttcccacataattgatgagtccttttggtatatagatttatatattcttttatatcctgaaacatgcttggattatggtcccaaatattagttctgttcctttgttgtttgtgtatatcccttaaggactgcaataatttgtatgttgtttcttctttgcctgtcttccatttcaactayttctctctgaaatgtcttccatttcaaccacttcttttctctcaaagcttttagttttgtatcttcttttcatatcttggttatttccctgtcccttattaagattttatttaattctcttttcctctggaaactttgcaatttgttcttcacttctgcagtaatttgtctttttcttatatttctttcttggatctaacacactctcttttatttcttcccattttttgtccatttttactttaaaatttatgattcaaggtgtttttttcatattcccaaaagcttctttgaagatatttacttcactttggagtttatgtcagttttcttctgct

SEQ ID NO: 683898 - DNA, 666 bp, Homo sapiens
cttcccttcggggctctctgactcatgtccccactgtgcactcagaggcatcacctaggctccctagggagctcccttgccctcttccccttttgagtataggcctgcgctgtggcttctggacagattactgctggagggaacttcctccacatgcaatcttgtcacaacatcacctaatataatatgtgtgctactgcctctgcaccatggtcatatctttttcctaaatcaaaccccaaatgcctcaaacccctacagtaatgcacaatattcctttcatagaatgttaatagattttacctgaaaaatatgaccccatggtgaatttagttttggaaatgctgttaaacagatttccctaccacagggcatcccagarcctttactatatttatttgcattgtgactttccaagagaggaatgaaaaactcagtgtttccaaaactcatgtgggaaactcagtgttttccacactggaaacatttattggggagcatcttgggaaagcagaagcatggctggctttttacatcatgggaagcggcctcagggctgaggtgaatgggcattagtggggaaagtaacttctttgaattgctcacgtaaatactggtgtctaaaaaccattctccactaaattaaactagggctccttgagaaat

SEQ ID NO: 683899 - DNA, 638 bp, Homo sapiens
gaaagtataaaattcagtgaaagtcttagttttatgtaaaaattataaatcrtgttttacctaatcaaaaaatttaaaaaacttgatctgaataaaattgtgtttacatacatagctacatgcaagataaattattttgtttgaattttctaaaaaatggtcttacatttcactattactgaaattgcctttgcaaaaattatgttagtgggaaaaatctgacgtaggaaaattatggcagtgaaagaaatttgacctaacagattccatcttgcttctaacctgcaaactgtcttcctccatgtcctgggttcaggtgattctcctgcctcagcttcccgagtagctggggttacagatgcccaccaccacgcccagctaatttttgtatttttagtagatacggggtttcaccatgttgtccaggatggtctcaaactgctgatctcaggtgatccacctgcctcagcctcccaaagtgctgggattacaggcgtgagccaccgcacccagcctgtagtttaacttagaaacaaagataataacagtccctctctgtaacaaaccccttccttgtttaggcaccagacagacttggtaaaactaacaaattagccacaagattaaaaattatggct

SEQ ID NO: 683900 - DNA, 1422 bp, Homo sapiens
tttcctgtgcctctttattacctaattctctctccctcctttctttttgactttccttcatctcactgctgattctcctatatcttccttctttcccattcttccttatcttttcttctttcttcaaaccccatagccattttcttctatttgcctaagcactgtcatcttaggtggagcggtttccagaaacacagcttcactttcaggaagaaatagatgggattaaaataatatttaaaacatggagtcctaaagttattatattatgccctcccatttcccttcttctcctccttctcttctttctatttctccatataccaagtacaatggtaaaagaataaaagtgacttacatgtgtatatggacagaagtctcattactaacatgtgcatgtatgagagtgggtaatggttatgtcagttgtgctatttgttttgtgttaacttgtagtaattgagccttttggctgttcatgctttcacatttttctgcaaaatcaggcacttatttgagaaaattttcttgacctgctaacatatttagtttggctgaaagtaatttttattattcccaaccacttttaattgatagctactaattataaatacgaccttattcaagtctttttttacaacactttcacaagcaatttgcctcaaatctatcaggtttgataaacagtctttataattcagttaccagggaatttctgaaagtacagacacacaaagcaaaaagcaaacaaaacaacctccacaaaaacaataacaacaaaatccctttggttcttgtcaacactgttcagagcatgtctcctttgaaacaagaccatttcagcaattaaaaaaaaaatacagcagattttcccttcttgcttctttccccctttttttaaataaaattgccaacttaaaaatattataacattttaccattgtcagcagttatacagaattttgctcayaaatccaagatggttccgcctttccttatttttttttaaggacacactgattaggtattagaatcaatacccccctgcctttgatagaattcttttttcttttacaagtaatctctgaattaaaggttaggcaatcgatttcttcagctatttttaccattgtcttagtcacagagatctgatctaagacagaccataatttttccccttaattcagaatattcgatagaatatgatagtacaaatagcataatctagactgaagcaaattgcttacaaaaggcatgaaagcttcataatcattctgtcttcaaatgaacacagagtattgatttgaaatattgttccagctcctgtcctcttgaggagtatactgacaattcactgaatattacaaaagcatctcagttgtgtggattgcagaaaaatgctgactatgataacatctgtga

SEQ ID NO: 683901 - DNA, 2298 bp, Homo sapiens
cagaagaggtcagttaaatattcacccaggccctgggggctctcttacagctgttctggcagatattgaagtaatatggtctcatgcgatacaaaaatacttggaaatcccactgaaagatttaaaggtgagctaaaatcctcagttatttggattgtttttaagattcttggtcaatgaaagtacacgttaccgagttgtttgtaatatagtgtccttcttgaaacattcttgaccttcagggtgaggattcttggtggcatgaggatgtcttttcttcttcacttaattcccttctggtgctttttttctttctctgtttctttggtgtctctattactcgaatcagcaagcttgctcatttttgtcttctctttggaccttactgacacatcagttgtcttatttttgattttacaagtttttaaaaatttcaaggaaaaaaaaacacttgagcattttttttttccttataaaacccaaaggatagtacagaggtttgagctttaatctgggtgtgtaaccgtagctgctactcctttggagggaagtctctctaaaaaggagtgtgaatttgacctgactagacttgagtgctaacccttttatctttgttcttctttttagtattatagatgtatcttgttaattcctgatatctataataagcagcatgtgaaagaactagtgaatatgatactaatgaagatgggtttttcaggtatgtctgatatcccagtgaaacctattttaaatggaattttctttctttaatgacagagttaatcttatttactgacttatttatttatttatttatttgagacagagtctctctctgtcgcccaggctggagtgcagtggcgctatctcagctcactgcaagctccacctcccgggttcacgccactctcctgcctcagcctcctgattggctgggactacaggcacccgccaccatgcccagctaattttttgtattttttagtagatacagggtttcactgtgttagccaggatcgtctccatctcctgacctcgtgatcctcccaccttggcctcccaaagtgctgggattacagacgtgagccaccgcgccgggcctactgacttatttaaatgcttattctgaaaggatcagtgttcctcagatgccctgcccagaggtccctaggctccccgcttcagctgattatctgttttgggatctttaccgtgctacagctaatgactactctgccttttcttttccccccccagggattgtggtccatcaggagtctgtgtgtgccacctatggaagtggcttaagcagcacgtgtattgtagacgttggggaccagaagacaagtgtatgctgtgtggaggatggggtgtctcatcggaatactcggtaaggaacttggaaggtggcattccctgtttcctcttccctcataatctgttcaaccgtaaataataagaaatcacaggttaaaaattataagataaccataaattcaaaagtctgcatggtaaaccagcaagattatggaagtgcatattctagcaaggctaaaactaaaacgaatcattttacccttcccattggaacttcttaataggaatttacatcagcagcccctgaaagtcctggkatgttttatgcgctttcccataggggaaacgtaaacagtagcttcgtgtctttagctgtggtttggcatagagctactaatcacatccttatagcagagctttatttaggcaagtcatgtaggagaaaatcgaccttttcaatctgaattctctggccagtgttttgaatatctgcattttttgtcatagtggtgttctgcgggtgagtaactttatgatgatagacaggtaaagaaaataactatcaggaccagatttgcagcttgtccttcttcaggcaagcctaacatatgtaagcacactcaggtaatgcaggtatgggctctctgaagcattttgtgctccagagatggcttcttgctgcccctcaggatgctttcattcttcccgtcctccacattaggtagtttgagtctttaaaagagggcttaaatcgtccatgagaaagggtcatctgctgcctcccgccccaagttctagtacattctaaaatccattttgagttatttggctcatccattgttagaatatccaatgccacttgttctcaaagtgtggagaaaatgctggacccaggtttcctaccaataaaataatatagcagctgtcttcccaaattgtagaaaccttcagttagtagacagctttctctaagctatt

SEQ ID NO: 683902 - DNA, 614 bp, Homo sapiens
ttttctaagtggaaaagcaaagaactgcttttgaaagttgaaatagacacttaagaaagctttttatctatccaaagcaagtgatgaaaatttagctgtccctcaaaattattttgtttaaaaattgaagagctttttacttgatgtgttcaccatgtaataggtcccttccaagttgtttctttcgtagayacattataatcagtaattattctatctactcatttctctatactttgtctgcattcttcagtgaaatttatgtttgctccataatggcagaatccatgtcataactgctcaccactgtattccaaaggcccaactcagtacctgccacacactagtgggctcaaaaacaatttttggtgagtaaatgcacagttaattgagtatcccatggctgcaataaccatcttagggtttaacaaatgtctataagctgcatatgtaaatatttttggtctcagagatttaagaggtcacaaagggaagaagggcagtccataatttatttaaaatctaacttaagttataacaccttaagactttgcatgtaaaaaagccacaatgcagctttcttcagtatggataaggattagttattgcatttc

SEQ ID NO: 683903 - DNA, 1051 bp, Homo sapiens
cgctgcgcaaaggaaggcttttattcccacctccctgaaatgcgcgtgtgcattttccttttgaacactggtttttgaggtactggagacctcttgatgtaagagttctccaaaatgttcttcaaactaaggcttttcattagatgaatggaacttggagatctggcaaggattatgctgcagcaaacccatagaattattttcatgtctgtgctctgcattaacttgtaattcaacatcaggattacctttgcttcttatttttaactaatgagtctgttatgggtccaaagcaaataacagaggatgagagaaaagagttcaaagtgtttaatggtcagaaggcatcatggcaactgtcgcaatggactgagagctaagcccctgcgtgacttggctcctgaagatgctcactgggtgytctccagctatacccctgcaggtgcagtcaatacacgcacagagcatccacacttttctttcaaggaggattgtctaaaaatgcctactgaagattttttaagttagatatttacctccattaattcctccacgtgcctctcagcgttcataaatcaacagctgaaagatgtctcctagagtgctaggaaggtactaggatgaggactttgaaagtttcaaaggggcttgtttggcattgctttttgttgattggcttgtttaggggaaaatgttggccctggctgcttctgtgtgctttctcaattccctgttctttcgacttacgacctcatttcctaaagttcaggccaactccggctgcactgcatgttaaagcaccagggaataagagcatcatggactagtactcctgggattcatcagggacaataaactcaccctagcaagaaaagtgtgggcatgctcctgacatacaggacatcctattcatttggcactcccaagatgacgttgttcaagcttttgaaacccattgttcattttgattaacacaaaaataacatactaccctttgaagttttttgaaatttcaaaataaattcaacccataactcagaaacaattaagg

SEQ ID NO: 683904 - DNA, 1383 bp, Homo sapiens
taagagacaatttaaaaccctcataggagacctctacttttgcacttatcacaccatgtcataataatttgcttgaaatatttttctcatttatcaggctataaacatttatttttataatctcaactcccattaaaatgtctgctgcaaggtgagtgcttaataaatatttttctgtttatttatgctatgtcttctttcaaaaagaattgagtatggaatayatagatgcatttagtggaatgagattttttctaaaaaaagaaagcaaagaaaaagtgtttaacagattgactgactaaagatctaaaaaaaataattaatgttcaggaatttaggagtggtatgtttttcccaattttagaatcaataggggagaaaataagaattaaaaaaaaaaaaccttccttaaaactttaagcctgcacactttatgtgaaatataaaaaggttatttaaactttaaatcactggaagaaataaagtaaattcttttgattattgtaaatgtttgttctgtgcttaagtcaccagtctccatttttgccattcacatctaagcttcaacattttaattaaacggctaagcagttgaatcatatgtctaataacatcaaaaactatcttctacacctattaacaaactcaatacaaaggcagccctgctcagaataggaaagtaggcagtttgtcgtggtgtttgcctctcttccatattagggactcttccagggcataggttaaacacaaataattttctaagagacaacttaaaacaagagaacagcaattaaaagcaaataactaagaaggaaatgaagaaaaaaagataacataactatatcagaaaaaccagtctgagagaggctaccacaattgaaaacagaactaagcacgaagctttctggcaaaaaaagaaaatacataggcagagtgtggcgagtgaatcatataagataattaaagaaagtacaagatcatcaaaataaacactttcagagttctgaaaattatttacctttttgtaatattgatgatattttccatagaagtgataaaaccttcagagatgctcttcctttggcaatttcttatatcagtttaattcctcatttcagtttcacacaccctctgtactctctcaacaatccatatctttttatacaccatttcctctgagtataatgcttttccttgttcatccttgcctggattgctccttactgatcctaaggtgtcagtcgctgtaggaaaccttttgtcattcatctccctccctggttgttcacaggggtgttgaggtctctctctctatctctctcacacacacacacgcacacacgcttgaaagcgcacacatgcgtacacacacacacacaggca

SEQ ID NO: 683905 - DNA, 433 bp, Homo sapiens
gcaaacacaagctcaaagaggacaaatgactaacccaaggtcaaagttatcaagtgccaaaattcaatccagcccttctaaccctagattcttcccatcatattttaactactaaagagaaataaatatctcctttaaatggccttattgtccagaatatcctaaagaactccacatttactggttggcaatggcattctactgtgagcaagagccttttccttctcccccattcatcttcagcatggattcctgtttttctcccagtggtttrtaattcacttctgtccttaattattccgttgatcaaattgtctcagatttgtcacaagctggcctctgggtccttgtgacatgctcccatcagttttctcttaaataacattttaagattagctattatttttcctatttaaaagctgtaagttatatg

SEQ ID NO: 683906 - DNA, 638 bp, Homo sapiens
atagtagtgctggcaattgtagtagcaagttggtatattgtatttcattcattctggattttccaatgtatatcaaccctaaaataggcattccttttccccgctttcttttcagcccaccaattggtgctcatctgccatctttattgattcttaacaacttttcactgttcattttcaccaatatatgctatagttcatgtggactgcgttagcacattgaccacttgatgcccattctctgggaaatagcttttggtcccgtttaataaagatcaaatttgagtcaagtgtagcaaatatagctttcctcatggtgcaatgattacayagaatgtgttaaggggcaaactctttctagcctgatgcccttttgttggtataattccaatgttaaacttactggagtatttcagaagttgtgtttaaaagtataaagtatattggctaaggcttaatttggctaaggctttattttggctactgaaaattaaatgacactgaattttttgtaacttagagatatattcacataatgggttattgatatttaaaactggtaggtgtgaggcccaggaatttaattcttaacagtgttaatatataggggcatccacaaaattttgtatttggtgctg

SEQ ID NO: 683907 - DNA, 2436 bp, Homo sapiens
gattgagacaatataatcaacagagacaatataataaacgtaaacctctttgtacagtatttagtgcacaagagtggctcagattwttttttctaatttttttccccttagctcatggggagcacattcaggccaaataaaaatctgtttgcaatacttcctggaactgaccaggttaaaattgtcttaaatgtcataatcataaatctctcaatgatggattagcctttttgagtggggagaaagtactacccagctcactcattgagctggcaaagctagcttctactggcatttcctagagataccagctcagttaggatggccaaatttagcaaatattggcaaatatttaagcacaatgtttgggacatagttatactaaaacctatttgttttttatctgaaattcacatactagtgggtatcctgtcattttatctaaaaacctatcccaaatttgtttacaaagtctttattacagacacattactatttttgaacttatccttcatttcactctttcttatagtgttatcttgatgttatatatattaaaatccattggcttattgtacatgatactactttctattaaggatttgccacattaaaaatatttaatgagatacaactccatcatattaagacacaataaaatgttaccatttttgtaaactgtgttaaaatgatctaaaagaagaattcttttttttaattatcttaaataataacgaagaacaaatctttaggcagaactctatgcactatctgttcatgtttttatctgtccagatcattatctatttggttttgtgttctatatttctgtgcaccaaattctgtcatattactgtgtctcctccctgtatctgtcttttatttccccgtggtcacacaaactttattttgtttgttctgagagttttaattttgtgaaatcaaatgatttgtcctacctttcctcttcaggacataaacagagggggaggttctaattaggaaataacttgaagtctgatggaaggcctatcctatggccctgaattgcctggtctagagttactctgaggtaaatggagggtagttaatttgataggaacaggaggactcagaaggtctggtgctctggagttattcttcctctgaggcagctgtggctgaagggaaagagcactgggactgtcatacaaatctttaccttcaggttcttgtcctgaaacataatagttatatttcctcacaaccatgacttcatgctctgaatttcactcttctctgttatgatgcaggaatcataattatgtaactaatttatataattttataaaggaatcatattaagttacaatttaattagaatacaaacaattttttgctaagaaacacatgaaagtaatttatgagctataaagtattataccaatataagatattcattttaatatttctaattataagtcattattcagaacttatctcatagatatatctttgatatgtgtatctcagtatatagattatacacactaaacgtcattggacttaagatattggttttgtatgttcttcactgtttttaattcatcttgtataaagtgatatgaagtgtacgtcatgggagttttttttaatctattaaatcaataaaatgtgattttcaaaagaaaggaaaagaataagagtaagaatactacaaagaattccagaacatcagggatgctgtttactcttcatgcagaaaaaggaacaaacctggggaggttttattatttatcaggcattaacaattgatagattctgcttgattacctgccattacccttcataacctgtattggcagtgggaaagcctccattcagaaccagaggcaagggcacctaagggtcccttcaatcagaaggaagatgctgctgaggtgggagcaaggctaaagttcctgtcagtaacatggaatccttttctgtgcctgcatgctcagggcctctttcattctgtttttgactctgttgtaaaagagcctagccactgctgattataattctgctgtgtaatatgcttactcatctcaaagaatccttgtctcaactgattactgttttgtaacccttgcattctgcagggaatcatgcacttcaatccatgctagacataaaatatctgttttgacagtctttgatttcacttaaagggtacagattttaaataatcaaagagggcttatataataaagtttgaggtctcagaagtgctcttctgtcaggaagggggagaagaaaagaagacggcttttttaaaataggatcatagaactagaggatatcatgatcacctagctacaaggcttcagtttacagatgacaaatggcaaaaaaggaggggatgaaagaagctgaagtgacttgcctaaattcatacagctgctcaaaaacaga

SEQ ID NO: 683908 - DNA, 595 bp, Homo sapiens
taaagacagaaagcaaatggagatttagtttttctcttctctaagtagataactctcagatctctatctctagctctgacatttctccaaagccattggacatcttccttttgaggatctcccagctctgcaaactcaaaatgtcacaaactaagctcattctctttcctctcatgtttctttatttcctgatttcttyctgaaatggttcaatgatcctcaagttacccaggcttaaatgcttgtggcagttctgagttctccctctcccttgtattctatattttgcaattgccaagtcctcttgattcttctttcaaaattcttcttgcctttgattttactgtcactactctcattcaagctgatttaatttttttcctaaaatatctttaaaatatcttttttttaaaacctcaagccagcacattgctggttccagagcaatgtctctgaatcactgccttgattgtgctactctaactactctaacaccttcagtggctccgtaggcctagattatgagactgccagatgaattgcgggtttccaaaatacatttggattcattatttgcatgaaaatacttatagtt

SEQ ID NO: 683909 - DNA, 595 bp, Homo sapiens
taaagacagaaagcaaatggagatttagtttttctcttctctaagtagataactctcagatctctatctctagctctgacatttctccaaagccattggacatcttccttttgaggatctcccagctctgcaaactcaaaatgtcacaaactaagctcattctctttcctctcatgtttctttatttcctgatttctttctgaaatggttcaatgatcctcaagttacccaggcttaaatgcttgtggcagttctgagttctccctctcccttgtattctatattttgcaattgccaagtcctcttgattcttctttcaaaattcttcttgcctttgattttactgtcactactctcattcaagctgatttaatttttttcctaaaatatctttaaaatatcttttttttaaaacctcaagccagcacattgctggttccagagcaatgtctctgaatcactgccttgattgtgctactctaactactctaacaccttcagtggctccgtaggcctagattatgagactgccagatgaattgcgggtttccaaaatacatttggattcattatttgcatgaamatacttatagtt

SEQ ID NO: 683910 - DNA, 734 bp, Homo sapiens
catttgaaatgctgcatgcaatacagtaaagttctgaatgttgtgggcatggattttatttcttcaaggcttgcattttacacttcttcattgtatacattggtacatccatgggagctgttctgtgaaaacatctggcctctgtgatatattttcattcatttttctatcaggttatattgagttttctgataagtgttcttaccactgtattctcatttcaacagataaattgcatcattttggttgtttctgatctgacacaaataatacgttgaaagacagcccagtttaatcctttgtggacaggtttcactggctcccattctcatgcaatattctttagctcttatttattaactgtttttcaagaacttagatgcaaaytgcatagtgctgaaaaagcaatgcctaggaacatcgttctgggttctcatagcctcatcagtatgtaaatcattgagtagaatacaaatgccccaccagcaaaatagtcagaatggtgcttctaccaatgcatatggatgaaggcatggccaataaattccttctccaaatatgttctcttgttgcattatttatggactttgaaaatgcaggttgactcctgcagtaattcgttggcactattctcttcctactggggtctgtgagctgtaacctgatccttggatgaaaagcatttatcctttccttgacagaaaaattgttactctagaccagcaacaattgca

SEQ ID NO: 683911 - DNA, 642 bp, Homo sapiens
gctgttaaaaagaaaaaataaaatcttcggtttttcttaaaatgtgttttaagcataaaaaatacataatacaaatgcacagtttaaggaagtgattctacagcaatcacatcatgttcttgatcacccacagcgaagtattgctggcacccctaaacctcccctgcctcctcctcagtggtcccgatttattcaactagccttatctgttctcccggttttaacatcactttcacggctgcggaacttctgtgcagaattgttcccattctcttgaaggcttargttgtttgcactatttagatgttataaataatgctgagacaaatatttgttcacaaggatgatttccttaggataaattctcagtacagatgaggaattttcagccaatagccatctttattttcaaggttcttggaatatgttgccacagtttccccccaaagagttttgccaattaaccatccatcggcaagtcaaatcaataagtgcctaccctgagccagtcccagggaataaatggcagatccatgtttaagtctcagttccatcacatccttgccagcatttggttttagttttctgagattaaacaaattttttagtttgcatctctctgacgttagaaaggcaaaactc

SEQ ID NO: 683912 - DNA, 656 bp, Homo sapiens
aaaaagataggcaacaaaagcaaaaatagacaagaggaactgcatcaaagtaaaaagcttctgctcagcaaaagaaacaatcaagagtaaaatgcaagctatagaaatggagaaaagatctgcaaaccacatgtttgatgaggagttaatttccaaaatatacaaaggaacacccagagctcaatagaaaaaataactaataatctgacttaaaaatcggcaatggactagaatagacatttctccaaagacctacaaacaacctcagagaagcaaagaatacatagaatgatggttgccaagggctagagagagttggaaaatgacagttgctaattaatgggtataaaatttcagttacgtaagatgaataggttctagagatctgctgtgcctacagataacaatactgtattgtgcagttcaaaatctgtcaaagggtatatctcatgtcatatgttcttaccgcaataaagtacaaaatataaattaaataaaataattttgaaaataawttgccatgcaataaacagtactctgaagtgattactattgtgagactgtctgctccacaaacattacaaatcccaaggcaaaaattgagtgactaatcaaaattatctgaagatgtctcaaaacatgttccctggtgcaca

SEQ ID NO: 683913 - DNA, 613 bp, Homo sapiens
aaatgtatttaaaatgcttatatcttaacactttaacttcaacctgaaaatttcagtgagagaaaaactatccaggttcactataaatgcatgcaaaatagacagtaaagaaggaaagatcaggttttgctctcatatttacaatgaaatttctcacttccttgtgaccactggttattctaatggaaatccctgtcaaatgctatataataaaagttttgattataaagaagattggaacttttggtagctctggtttatgattttatatctataggtttaaaaagacttctgtagaataataaaagctgaagcagttcactaaaagcgaaatgtgatttctgtaatgacgtttcttttcaaactgataggaacaacataaaaatcccacgcttaaataaatgaaaagttaccaactatctttgatgtcagtttgaggacttktaataattcttctcttgcccatgtttcaataactacatgaccccactcaatccttccctttatagacacagagtaaaatacctttatgtcaggaaattgccccaggtaggtatccagtgttagcaaggacccatccacgagtttttgatggaagtcttcccacagcaca

SEQ ID NO: 683914 - DNA, 1496 bp, Homo sapiens
ttaacaaacattgttagtatttgcccaaaagagtggtggtggggggaccctctttcctcattataatctagtgggggagctaaaatatataagcaaaaaacaaaacaattgcactgcaaggcatattacatttagcattgcaacagccattcaaagtgttgaagtacaaaaacaaaatgtccatcacatttaaagataatgattaatacaaataaactgacaagaaataattaagactatgcttgacggcaaaagggattctgaattaggatattttccatataacacttgcattgtgcaggtatagtggcattatttccttgaaatctatgtaacactcaggtgaggtattctgtatttgagttaagctcaggttatttttgcagctctataaacccggttactaccagacaaaagcttaggatgagtccatttgctggcacgtatgaacttcaaacagaatggttctattcagaatggcaaagcagaaatcaaagtgctaaacaattgactccctttctagtgtctcaacatggttttaaatcaaaactcaaggtttctattcccttgttgaaacatgcagaaagtttgtgtgatggcaaacttccatcagctagagaaaataaagcaaatcatggtggggttccaaacagcaaagtgtagtagaaaactatttccagagagaggaagaggagaataaagagaaaatgctgatgataaacacttgagtaaaagcagtcgatgaagaggacccagagaagtcaggatgaagttctcaataccaccaagaaaagcatattgcaacaaaagaagtgggtctttcccctactaaatatccattatatgagagcattgtgtcacattctgagtacataaatagtggaaaaaatatggctttggtagattttattgtcaatctrtgctgcaactccctaccagatctgtcattggagaaagatcatacttcctgcctcagcgacatcaggcttggctgtaggactgtagacaatgaaacttaagtggaagtaacatgtgctactttcaagctgaagctataaaagccatcacatgctcctgccatttctttcctctccccatacagaatttgtttcttcaatctggatcccagagtgaagggaccacagagcacagccaccacctgcattttcatgagtgagaaactaacctctgttgttgaaagccactgagatgttgctaccatggcataacctagcccaaactgcccagtaaaatgattcaccatcaacagaggaaatgctgaaatgtggagagaggctgaaatctaaccacaacaataaaaagcccaatagaattagtgaacagaaaagaaataaaagcatttacagaaacatttcagaaaaatcaaactggaaagatgaaggacaaactgaacggttcacaaatggaagcccaagtggtggtcaagcaacggaaagagatagaatggaactgagagagaagcaagctccagaatc

SEQ ID NO: 683915 - DNA, 1496 bp, Homo sapiens
ttaacaaacattgttagtatttgcccaaaagagtggtggtggggggaccctctttcctcattataatctagtgggggagctaaaatatataagcaaaaaacaaaacaattgcactgcaaggcatattacatttagcattgcaacagccattcaaagtgttgaagtacaaaaacaaaatgtccatcacatttaaagataatgattaatacaaataaactgacaagaaataattaagactatgcttgacggcaaaagggattctgaattaggatattttccatataacacttgcattgtgcaggtatagtggcattatttccttgaaatctatgtaacactcaggtgaggtattctgtatttgagttaagctcaggttatttttgcagctctataaacccggttactaccagacaaaagcttaggatgagtccatttgctggcacgtatgaacttcaaacagaatggttctattcagaatggcaaagcagaaatcaaagtgctaaacaattgactccctttctagtgtctcaacatggttttaaatcaaaactcaaggtttctattcccttgttgaaacatgcagaaagtttgtgtgatggcaaacttccatcagctagagaaaataaagcaaatcatggtggggttccaaacagcaaagtgtagtagaaaactatttccagagagaggaagaggagaataaagagaaaatgctgatgataaacacttgagtaaaagcagtcgatgaagaggacccagagaagtcaggatgaagttctcaataccaccaagaaaagcatattgcaacaaaagaagtgggtctttcccctactaaatatccattatatgagagcattgtgtcacattctgagtacataaatagtggaaaaaatatggctttggtagattttattgtcaatctatgctgcamctccctaccagatctgtcattggagaaagatcatacttcctgcctcagcgacatcaggcttggctgtaggactgtagacaatgaaacttaagtggaagtaacatgtgctactttcaagctgaagctataaaagccatcacatgctcctgccatttctttcctctccccatacagaatttgtttcttcaatctggatcccagagtgaagggaccacagagcacagccaccacctgcattttcatgagtgagaaactaacctctgttgttgaaagccactgagatgttgctaccatggcataacctagcccaaactgcccagtaaaatgattcaccatcaacagaggaaatgctgaaatgtggagagaggctgaaatctaaccacaacaataaaaagcccaatagaattagtgaacagaaaagaaataaaagcatttacagaaacatttcagaaaaatcaaactggaaagatgaaggacaaactgaacggttcacaaatggaagcccaagtggtggtcaagcaacggaaagagatagaatggaactgagagagaagcaagctccagaatc

SEQ ID NO: 683916 - DNA, 1684 bp, Homo sapiens
tgtctagtttccattagttgaaagcccactgtatgctgggctgggagatgggcagtgttaacgttaccactttgcatctacatgttgattcctttatagagctatacaacagatatagaaactgaggcataaagaagttaacaaaaaaataaacatgttatgggtaacactgttagtgaaggatagacatgagaaccaagtgatctgatagtttttcttttttttttaacatagacctccagagaattcagctgcccaaagttggtgaagttggtgaaatgcattaattttttagccaatagggtcaaatgaaatattgtatggaaaagtggttagcaagtgacaatttagtttctaaaactcctggttgtcataataataattgttgttattttgtgaagcttttgtgcttccaggtttttttattgttattaaaaaggctcacataactaatgtcctgttccacagggaaggctaatgttggttagaaagcttatttctattatactttctgtcagcacaagaaaaagaaagaaaaagtgcttctatatggatgttttctattttgtattataattactatctattccagcaattgcatttttgaaagaaatattacaaaagaagcaggctatggtaagcaaagaagcatattggtggtgataacttcatgcgaatagtgacagtcttttgagttgccagcattacacaataaaccatgctggaactaaaataacttgagattggctacattgtatcactaaataccgtttctcatctacatcttcttgtacaggctgagaagttaacgtttagcagaagtgaaagtgaacaataacaggagcaaaatgttgcattaatatttaatgtaatactttttgagagtataaagggaataacaccattcaaatgcaaatgtagtctctaaggatgatgttttactgagaatacctttattttgctgaagttttccttgtgagaaataagaacactgtaaataactgtaagcttagcttctaacatttttatatgagtctgtgayggtcttctcactttttctatagttctctaaaacagtagttcctaaactttggaatttcacacatcagtaaataaggatatttcttttaaaactaccatataatgttaaccattatttaataaaagtaattttaacccaataattacaaaataaatgatagtcctataattgaacgtatttggttttatgaaatactatgcaaatagttcttttctcttccttcctttgcattcaaacacacaaaatctatgcttggcatacaaaactaattctcattttcatctcaattgaaaaaaatatacacagatagtccttggattcaaagtggtgtttttttgtttgtttgtttgtttgtttttgaaatggagtctccctctcttgccaggctggagtgcaggagcacgatctcggctcactataacctctgcctcccagattcaagtgattcccctgtctcagcctcccaagtagctgggactacaggtgcatgccaccatgcccagctaatttttgtatttttaatagagacggggtttcaccatgttggccaagatggtcttgatctcttgacctcgtgatctgcctgcctcagcctcccaaagtgttgggattaccggcctgagccactgcccctggccctgg

SEQ ID NO: 683917 - DNA, 1350 bp, Homo sapiens
gacagatagacagataatttcaagaaatttgcttagaactggccagacaaatctgaagtccatagggtgagtcatcaggaagggtagagcagaaactttgaaggagctgrattccaaaagtggaattacttcaaggaaaccttgattccgttcataatgtctctcagctgattggctcatgtccatccagattatccaaaataatctccattacaaaaactcaactgattgagttataaatgttaatcatattcacaaaataccttcacagcaacatctacattagtagttgtttgaatgattgggtagtatagccaagctaagtggatacatacaacttaaccatcacagaggctcattcccactctgaaaaattattaatggctgcctgaaatgccatttttagatggattctgaggctgtttctagactcagaataagagtacttagcagtgtctgcctagtactttctccataaacaagagatatacaaacacaaatattttcttgtacaagaaaaaaaaagtgaatgatctagtcacaggaaagcatgagatagtttctgagtttttacaagatgattatattcaacacggggaaagtcaaagggctacaaaaatggaatttgctatttgtaatctatcaacagaaactgacaaacataaatgtaaatagcatgaccactgtaattagtatgatgaaaaagtctcaaaaatagtatgatgctatcaaagaaatgcagtggtatatcatgatgcgagcacaatttctccaggccaatggtatatgcctacaaatttttcaattgccattttctatgtagaatatataatttggtacattcattggacaacaaaagtaatatctaaagacatataagatggattgcattttccttcttgggaatttaagtcattcaagtgttgataacatacatccgatgcatcagatgtatagtatgctgtgtagtgagaataagtgggggaaaatggctgaagtcagaaaagagatttcactacctcttttgaatatttaaaaaaacacttgaaaatccaataaatgttttaatcctttgtgtttggtaaggtttttttatttttttctttttttgacataactcttagacatgacatttaaactgcaattcaccctccaggcatagttgttttcaaatgctgacttgtaccttcaatatctttgaaacccatattttctcattcaattaggtgatgtttctcatttccttttttaaaataaaacctctaattgtaggtgaaataataactatcatttattatcataaagctttcttcatgcagagaggcaatgaaactgattaaaataatcaca

SEQ ID NO: 683918 - DNA, 606 bp, Homo sapiens
atggttgttatgaagagtaaaagatttaatatttacaaagtgcctaaaatagtttctggcacatggtaaagctacrgtagaatcatagatatataaaaacaaatagggtaggccgggtgtggtggctcatgcctgtaatcccagcaccttcagaggctgaggtgggagattgcatgaggccaggaattcgagattagcttgggcaacgtagcaagaccctgtctctacagaaacttaaaaaattagccagttgtggtggtgcacgcccatagtcctagctacttgggaggctgaggcagaattgcttgaacccaggaattcgaggttgcactgagctatgatcatgccattgcgctctagcctgggtgacagagcgagacctcatctcaaaatgcaaacaaaaacaaatagggtagaattgaaccttgtattagataagtggctcacctccacaagctaatcattaaccattgttaaacaaagaaagaaagaaacacttgtcccctctggaatatactagagagatctgcccaattccacataatctcttccagaaaatggaagaggagggaatatttcccaattcattttataaaacttgtttta

SEQ ID NO: 683919 - DNA, 606 bp, Homo sapiens
atggttgttatgaagagtaaaagatttaatatttacaaagtgcctaaaatagtttctggcacatggtaaagctacagtagaatcatagatatataaaaacaaatagggtaggccgggtgtggtggctcatgcctgtaatcccagcaccttcagaggctgaggtgggagattgcatgaggccaggaattcgagattagcttgggcaacrtagcaagaccctgtctctacagaaacttaaaaaattagccagttgtggtggtgcacgcccatagtcctagctacttgggaggctgaggcagaattgcttgaacccaggaattcgaggttgcactgagctatgatcatgccattgcgctctagcctgggtgacagagcgagacctcatctcaaaatgcaaacaaaaacaaatagggtagaattgaaccttgtattagataagtggctcacctccacaagctaatcattaaccattgttaaacaaagaaagaaagaaacacttgtcccctctggaatatactagagagatctgcccaattccacataatctcttccagaaaatggaagaggagggaatatttcccaattcattttataaaacttgtttta

SEQ ID NO: 683920 - DNA, 606 bp, Homo sapiens
atggttgttatgaagagtaaaagatttaatatttacaaagtgcctaaaatagtttctggcacatggtaaagctacagtagaatcatagatatataaaaacaaatagggtaggccgggtgtggtggctcatgcctgtaatcccagcaccttcagaggctgaggtgggagattgcatgaggccaggaattcgagattagcttgggcaacgtagcaagaccctgyctctacagaaacttaaaaaattagccagttgtggtggtgcacgcccatagtcctagctacttgggaggctgaggcagaattgcttgaacccaggaattcgaggttgcactgagctatgatcatgccattgcgctctagcctgggtgacagagcgagacctcatctcaaaatgcaaacaaaaacaaatagggtagaattgaaccttgtattagataagtggctcacctccacaagctaatcattaaccattgttaaacaaagaaagaaagaaacacttgtcccctctggaatatactagagagatctgcccaattccacataatctcttccagaaaatggaagaggagggaatatttcccaattcattttataaaacttgtttta

SEQ ID NO: 683921 - DNA, 650 bp, Homo sapiens
tgctgacaggggatggtgggaagtgggtggctgtgtgggagtgctctctgggtcattttcctcagggcagggtgatggggatctgggggaagctctgtccgggggcttggctatttgtcctgctctgcatgggaatgcccaggcagtcccrgatgcccctagggcaatctcgaacctactgctctgcccctctgttgccaagtgggcaactcagacctgggaggttaagggtgggaaggcattataggggagagggtcatttgggttcaggaaggtgggcaggtacaggttaggaaacagattaaaggcttagtgaaaatgggaggccctctaaatgagtccctgggagtttgggagtgatggcgccagattcccttctctcatcttttgtagggcaacagactgcctcatcttgccatcctataccacccaaggggtgtgagagccagggtgggacatacaggtgatacaaataatttgatgagtgattgtgtcattgaaaagtggcagcccccaggatttctttcactgactttctatccagcaggccttcagtgatgtcaatgtataaagttttattatctctcagcctttgtgtgggcttctccagctaacgcgatacaataacttaccctggccttctcccagct

SEQ ID NO: 683922 - DNA, 650 bp, Homo sapiens
tgctgacaggggatggtgggaagtgggtggctgtgtgggagtgctctctgggtcattttcctcagggcagggtgatggggatctgggggaagctctgtccgggggcttggctatttgtcctgctctgcatgggaatgcccaggcagtcccagatgcccctagggcaatctcraacctactgctctgcccctctgttgccaagtgggcaactcagacctgggaggttaagggtgggaaggcattataggggagagggtcatttgggttcaggaaggtgggcaggtacaggttaggaaacagattaaaggcttagtgaaaatgggaggccctctaaatgagtccctgggagtttgggagtgatggcgccagattcccttctctcatcttttgtagggcaacagactgcctcatcttgccatcctataccacccaaggggtgtgagagccagggtgggacatacaggtgatacaaataatttgatgagtgattgtgtcattgaaaagtggcagcccccaggatttctttcactgactttctatccagcaggccttcagtgatgtcaatgtataaagttttattatctctcagcctttgtgtgggcttctccagctaacgcgatacaataacttaccctggccttctcccagct

SEQ ID NO: 683923 - DNA, 650 bp, Homo sapiens
tgctgacaggggatggtgggaagtgggtggctgtgtgggagtgctctctgggtcattttcctcagggcagggtgatggggatctgggggaagctctgtccgggggcttggctatttgtcctgctctgcatgggaatgcccaggcagtcccagatgcccctagggcaatctcgaacctactgctctgcccctctgttgccaagtgggcaactcagacctgggaggttaagggtgggaaggcattataggggagagggtcatttgggttcaggaaggtgggcaggtacaggttaggaaacagattaaaggcttagtgaaaatgggaggccctcwaaatgagtccctgggagtttgggagtgatggcgccagattcccttctctcatcttttgtagggcaacagactgcctcatcttgccatcctataccacccaaggggtgtgagagccagggtgggacatacaggtgatacaaataatttgatgagtgattgtgtcattgaaaagtggcagcccccaggatttctttcactgactttctatccagcaggccttcagtgatgtcaatgtataaagttttattatctctcagcctttgtgtgggcttctccagctaacgcgatacaataacttaccctggccttctcccagct

SEQ ID NO: 683924 - DNA, 650 bp, Homo sapiens
tgctgacaggggatggtgggaagtgggtggctgtgtgggagtgctctctgggtcattttcctcagggcagggtgatggggatctgggggaagctctgtccgggggcttggctatttgtcctgctctgcatgggaatgcccaggcagtcccagatgcccctagggcaatctcgaacctactgctctgcccctctgttgccaagtgggcaactcagacctgggaggttaagggtgggaaggcattataggggagagggtcatttgggttcaggaaggtgggcaggtacaggttaggaaacagattaaaggcttagtgaaaatgggaggccctctaaatgagtccctgggagtttgggagtgatggcgccagattcccttctctcatcttttgtagggcaacagactgcctcatcttgccatcctataccacccaaggggtgtgagagccagggtgggacatacaggtgatacaaataatttratgagtgattgtgtcattgaaaagtggcagcccccaggatttctttcactgactttctatccagcaggccttcagtgatgtcaatgtataaagttttattatctctcagcctttgtgtgggcttctccagctaacgcgatacaataacttaccctggccttctcccagct

SEQ ID NO: 683925 - DNA, 650 bp, Homo sapiens
tgctgacaggggatggtgggaagtgggtggctgtgtgggagtgctctctgggtcattttcctcagggcagggtgatggggatctgggggaagctctgtccgggggcttggctatttgtcctgctctgcatgggaatgcccaggcagtcccagatgcccctagggcaatctcgaacctactgctctgcccctctgttgccaagtgggcaactcagacctgggaggttaagggtgggaaggcattataggggagagggtcatttgggttcaggaaggtgggcaggtacaggttaggaaacagattaaaggcttagtgaaaatgggaggccctctaaatgagtccctgggagtttgggagtgatggcgccagattcccttctctcatcttttgtagggcaacagactgcctcatcttgccatcctataccacccaaggggtgtgagagccagggtgggacatacaggtgatacaaataatttgatgagtgattgtgtcattgaaaagtggcagcccccaggatttctttcactgactttctatccagcaggccttcagtgatgtcaatgtataargttttattatctctcagcctttgtgtgggcttctccagctaacgcgatacaataacttaccctggccttctcccagct

SEQ ID NO: 683926 - DNA, 1886 bp, Homo sapiens
ggaaggacctggatggagcagggccgctgctccacaaagtgctttcgggccaggcctcttgccagtgggcatcaggacactggggtagggctaagctggccagatttgccctcctggctggcacgggaccctcccccaaccgctccaggagacccagctcctcctgccgagggcctgagaccaggacacactaggaaactgaaatctgatccccaggtatgcaggctggggagggggtgacacaggaccattaatcaaaggcaaatgccaaggagaaaattacagaggtaagaagatgattgtatttaacttgtttttctccccttacagccccagctcgtgagcctctacatgcccacatctgtgcgtgcatgtgtgtgcataagtgtgtgtgtgtgtgtgtgtgagtgcaggcacaggcagggtgtggggagaaggggcaggctaagaggggcatggccagccagtgggcccccaaaggggaggagggatccagttggcgctgggagggagtgctttgctgtcccagggggtgcttccggtccagcccacttcccaagctggcagtgtcccagctcctcattatctcagagtcaaaacaccagggggggaggccgggcagctggaagcccagctggcccccacccccatccctccctggcccactgaggcacttccttccagtctcaggtccacagacaaaatcctccttgtgttgcagtttttgctcagaagcaggggcagtgcccaccgagagggtgctcctgccgcctcaccctgcccccaccccgccctcactctgggcctggacacaggtcaagaactgccccaacgcacaatcatctgttcaccgcacaatcatctgttcaccgagtgctcctcctgcggatcactttttacatcttgttttgggccgggtgtggtggctgacacctgtaatcccaacaatttgggaggctgaggtgggaagatcacctgaggtcaggaatttgagaccagtctggccaacatggtgaaaccctgtctctactaaaaatacaaaaattagccgggcatggtggcaggtgcctttattcccagctacttgggaggctgaggcaggagaatcacttgaacctggaagtgaaggttgcaatgagccaagatcgtgccacggaactctagcctgggtaaaagtgagactctgtctcaaaaaaaaaaataaaataaaataaaatagataaaataaaataaatcttgttttggagtccagttcagacaccaaggagggttctggggtcactgccagccagaagaaacgttttaataagctttcctgggcattcccaacagtacgggacaaaatctacacgccctgccctgagaaagcagcctcctggctgccatccctcggctcacagagctacagctgagaaatgggcctcctgcctgctcactgctgggggcaggagacgaggcctggctccttgccagaaactgggtaaggaggaaatgtgcgggttggccaagtggggcaacaggaggcccgcagaagtgaactgtttccaagsctccaaatctagcaggtgatgggcagagccaacttgcaacacctaaagtccctctgcaccacgccagggccttgggaagctgtgaaagtttactaacatgcagttctgtcctaaagatgccaggattctaattctttccccagatcgcatagtcctaagctcccccttgccaattagagagggaggggaccctgcccaactgacaaagtttgagggaggaggtactcagcaggctcaaggccattacaaacagcacgcaggaagatgttgatatttccatttcatgctgggtgagggggaagaaaggacgctcaatttcagagcctgatgagaagc

SEQ ID NO: 683927 - DNA, 1886 bp, Homo sapiens
ggaaggacctggatggagcagggccgctgctccacaaagtgctttcgggccaggcctcttgccagtgggcatcaggacactggggtagggctaagctggccagatttgccctcctggctggcacgggaccctcccccaaccgctccaggagacccagctcctcctgccgagggcctgagaccaggacacactaggaaactgaaatctgatccccaggtatgcaggctggggagggggtgacacaggaccattaatcaaaggcaaatgccaaggagaaaattacagaggtaagaagatgattgtatttaacttgtttttctccccttacagccccagctcgtgagcctctacatgcccacatctgtgcgtgcatgtgtgtgcataagtgtgtgtgtgtgtgtgtgtgagtgcaggcacaggcagggtgtggggagaaggggcaggctaagaggggcatggccagccagtgggcccccaaaggggaggagggatccagttggcgctgggagggagtgctttgctgtcccagggggtgcttccggtccagcccacttcccaagctggcagtgtcccagctcctcattatctcagagtcaaaacaccagggggggaggccgggcagctggaagcccagctggcccccacccccatccctccctggcccactgaggcacttccttccagtctcaggtccacagacaaaatcctccttgtgttgcagtttttgctcagaagcaggggcagtgcccaccgagagggtgctcctgccgcctcaccctgcccccaccccgccctcactctgggcctggacacaggtcaagaactgccccaacgcacaatcatctgttcaccgcacaatcatctgttcaccgagtgctcctcctgcggatcactttttacatcttgttttgggccgggtgtggtggctgacacctgtaatcccaacaatttgggaggctgaggtgggaagatcacctgaggtcaggaatttgagaccagtctggccaacatggtgaaaccctgtctctactaaaaatacaaaaattagccgggcatggtggcaggtgcctttattcccagctacttgggaggctgaggcaggagaatcacttgaacctggaagtgaaggttgcaatgagccaagatcgtgccacggaactctagcctgggtaaaagtgagactctgtctcaaaaaaaaaaataaaataaaataaaatagataaaataaaataaatcttgttttggagtccagttcagacaccaaggagggttctggggtcactgccagccagaagaaacgttttaataagctttcctgggcattcccaacagtacgggacaaaatctacacgccctgccctgagaaagcagcctcctggctgccatccctcggctcacagagctacagctgagaaatgggcctcctgcctgctcactgctgggggcaggagacgaggcctggctccttgccagaaactgggtaaggaggaaatgtgcgggttggccaagtggggcaacaggaggcccgcagaagtgaactgtttccaaggctccaaatctagcaggtgatgggcagagccaacttgcaacacctaaagtccctctgcacyacgccagggccttgggaagctgtgaaagtttactaacatgcagttctgtcctaaagatgccaggattctaattctttccccagatcgcatagtcctaagctcccccttgccaattagagagggaggggaccctgcccaactgacaaagtttgagggaggaggtactcagcaggctcaaggccattacaaacagcacgcaggaagatgttgatatttccatttcatgctgggtgagggggaagaaaggacgctcaatttcagagcctgatgagaagc

SEQ ID NO: 683928 - DNA, 614 bp, Homo sapiens
tgcagccagcagaggcctcggaggtggcgggtgggacccaacctgcggctggagcccaggagccaggggagacggcggcaagtgaagcagcctccgtaagacagcagggacaaagccctgccttttcctccctgccgcccgcctgcctgtccggggctcccctgtggcccctgctggtgctggtccaggcctggctcctgttgaggaagctggaggcgggccggtctggcaccaggcgcagacacctttctcccctccccgcccctcttctcctcggtggccctggctgtccytggaccacctccctgctcagctgacccgtacctctgccaccagagctctcttcctgctgtcgtggtggagaccttcccagcaactgtgaatggcaccgtggagggcggcagtggggccgggcgcttggacctgcccccaggtttcatgttcaaggtgagcccacagcctctgactgctgcagtccctcggtgccctggtgggcagatgagaaccctgagcctcaggagactctgtggtttgcccaaagttgtgcaggcgctactaggtcactcccagccagcaaggtggcatctgagccccatactgtcctgctgcttttg

SEQ ID NO: 683929 - DNA, 820 bp, Homo sapiens
ggccctttctcctaagcccccaggtcttcatggacctcctagtgggccagccctggctgggtaggatttcaagcagactgctacccagagcccacagtgagaattggcctggggctgctggagggggctcagatagggcatgagtagggtctgtgaccaggctgacaatgacacagagggaaataacaaagacccaggtaggccccaggcacagcccagctgcaggggcagcctcggcccagccactggcaggagtggatggccatacggctccccgtgacccacctggggccaggggcctgtcagcactcccagagaaggccctgcgggtgtcaggattgaagcaaagggcaagtsgaagttggagggactggtgggatggccccaagtccctctagaacttgtaacttgttgtcactcccaaaactttctggggttgtttgagaagcctggaatcctggaagggctgatgtgcacatcatgcatgcagtgggactcatcaaaaccagccacgaatggttagatccacctgcggacgacaggctggctcctgtggtgcctctgggcaggagcctcagccagcagcatcagggagtgctgcctggaggaggtgttctcaaggtgggcttggcaggctgaggcaccaacagcaggaggaggggccgtcttcccagcaggttggagtgggatgcgtgccctgtggggtggagccccttgctcatccctgtgcgacctggtgctctgcccctcaggatgaaggctggctcatgggcgtgaaggagagcgactggaaccagcacaaggagctggagaagtgccg

SEQ ID NO: 683930 - DNA, 433 bp, Homo sapiens
aacctttttcaagatgatcagcttagccaggcacggtggcttacacctgtaatccccagcattctgggaggctgaggagggtggatcacctgacatcaggagttcaagaccagcctggccaacatggtgaaaccyggtctctactaaaaatacaaaaattagctgggtgtggtggtgtgcacctgtaatcctagctacttgggtggctgaggcaggagaatcgcttaaaccccgaaggcagaggttgtagtgagctgagatcgcaccactacattccagcctgggagacagagcaagactccatctcagaaaaaaaaaaaagaaaaaaggaaaaaatcagcttgcttgtgtttgtcctgcatgtctttaaaccttgacccctgcgtggtctatgctgtggctaaaaagtagtagactgagatgctgacgacga

SEQ ID NO: 683931 - DNA, 602 bp, Homo sapiens
attagaaatctattttatctgaggaaactgaggctcggagagaacttaagttctttgtctgaggtcatgtggccagtgagtggaacacctgtgggrtcatattatttgtataattgttattgttattagctaacagttactatgtgagtaaggactaggcattgttctcagcactttacatttattaattcacttaatcctcattttacaggtaaggaaactgaggcacatagtggttaaagttacaaaactattctgtggcagtggtaagatttgaacccaggcagtttgaccctggcatctataacagatgcgcctatgaccacagactttgtttcctttgccactttggtggtctgtctcctagagcagagaatcactagtactattacaaaccattccagtaacaaattaacctacttaaaaggagcttgcggaaatgaaaatataacttgaattttgacttgaaataaactgaactttaaaaatcctttgaggctttttaaaaaatgtatttgaagaatttccaatcagatcaacttaggaaggcccacttaggtcaaatcagacatggaggaattaattttcttgtggagctggtg

SEQ ID NO: 683932 - DNA, 602 bp, Homo sapiens
attagaaatctattttatctgaggaaactgaggctcggagagaacttaagttctttgtctgaggtcatgtggccagtgagtggaacacctgtggggtcatattatttgtataattgttattgttattagctaacagttactatgtgagtaaggactaggcattgttctcagcactttacatttattaattcacttaatcctcattttacaggwaaggaaactgaggcacatagtggttaaagttacaaaactattctgtggcagtggtaagatttgaacccaggcagtttgaccctggcatctataacagatgcgcctatgaccacagactttgtttcctttgccactttggtggtctgtctcctagagcagagaatcactagtactattacaaaccattccagtaacaaattaacctacttaaaaggagcttgcggaaatgaaaatataacttgaattttgacttgaaataaactgaactttaaaaatcctttgaggctttttaaaaaatgtatttgaagaatttccaatcagatcaacttaggaaggcccacttaggtcaaatcagacatggaggaattaattttcttgtggagctggtg

SEQ ID NO: 683933 - DNA, 602 bp, Homo sapiens
attagaaatctattttatctgaggaaactgaggctcggagagaacttaagttctttgtctgaggtcatgtggccagtgagtggaacacctgtggggtcatattatttgtataattgttattgttattagctaacagttactatgtgagtaaggactaggcattgttctcagcactttacatttattaattcacttaatcctcattttacaggtaaggaaactgaggcacatagtggttaaagttacaaaactattctgtggcagtggtaagatttgaacccaggcagtttgaccctggcatctataacagatgcgcstatgaccacagactttgtttcctttgccactttggtggtctgtctcctagagcagagaatcactagtactattacaaaccattccagtaacaaattaacctacttaaaaggagcttgcggaaatgaaaatataacttgaattttgacttgaaataaactgaactttaaaaatcctttgaggctttttaaaaaatgtatttgaagaatttccaatcagatcaacttaggaaggcccacttaggtcaaatcagacatggaggaattaattttcttgtggagctggtg

SEQ ID NO: 683934 - DNA, 1124 bp, Homo sapiens
gaaagtctctctttgtgaagcgtttgccttatcagagaaagtggtaccagagaagagacacgagaactgctctctagggtgtgggcagtaagaagactgtggggtgcagaggtcagagctagaccgactctgagtcccatcctggctttgtgattaatatgaataaaacaataatacccttatttcatggtctgtagcagtgctgtccagcagaaatataatgtaggctttttatgcaattgtacatttcctaagagccattattttaaaaaagcaaaaaagaaacatgtagaatttaataatgtgttttatttaacttggtatatccaaaatactttcatttcaaaatgtactcaatataaaaattaatgagatatttatatctttttttttacaaacagttcttaaaactcggtgtacgttttacacttatagcatctctcagtttgaattctaaatttttcatcagaaatatttgatttgtattttgattttactaatttaaagtaaaaaagtaggttcactcgtctaagttgaattgtgcttagaccttttccagtagctgaatggaacattatttttaaaaggtaaattaattaaaatgaaatgaaattttaaaaatgtggtttgttggttatgccagccatgtttcartgctcaaaagccacatgtggctagtggctactgtattggacagcatgctccttcaggtattcatcttcactatcagaagagaccactagactcagacaatgagagtagcgtaaggggctgcagaaaggattggctgctgggtcaggttcagatggggaggacacacctgttggctggactcctggcagccaaaggctggcgactgatgagcaagtaatgagtgcctgactcagggacacatctgagcgtttgatgagcccttgaaattttatctgaaaatgcagtcctcagtttcaccatatcctgagcctaattttaccccagatgttgtgcagctgtgagttttcccaagggagtgctgctttgtggtatgtgtgagttggctctttggtctcagtgtggtagtgtgaactcctggaggctttgagggcagacacagacttgaagcacttttatttgagttgtttcat

SEQ ID NO: 683935 - DNA, 1124 bp, Homo sapiens
gaaagtctctctttgtgaagcgtttgccttatcagagaaagtggtaccagagaagagacacgagaactgctctctagggtgtgggcagtaagaagactgtggggtgcagaggtcagagctagaccgactctgagtcccatcctggctttgtgattaatatgaataaaacaataatacccttatttcatggtctgtagcagtgctgtccagcagaaatataatgtaggctttttatgcaattgtacatttcctaagagccattattttaaaaaagcaaaaaagaaacatgtagaatttaataatgtgttttatttaacttggtatatccaaaatactttcatttcaaaatgtactcaatataaaaattaatgagatatttatatctttttttttacaaacagttcttaaaactcggtgtacgttttacacttatagcatctctcagtttgaattctaaatttttcatcagaaatatttgatttgtattttgattttactaatttaaagtaaaaaagtaggttcactcgtctaagttgaattgtgcttagaccttttccagtagctgaatggaacattatttttaaaaggtaaattaattaaaatgaaatgaaattttaaaaatgtggtttgttggttatgccagccatgtttcaatgctcaaaagccacatgtggctagtggctactgtattggacagcatgctccttcaggtattcatcttcactatcagaagagaccactagactcagacaatgagagtagcgtaaggggctgcagaaaggattggctgctgggtcaggttcagatggggaggacacacctgttggctggactcctggcagccaaaggctggcgactgatgagcaagtaatgagtgcctgactcagggacacatctgagcstttgatgagcccttgaaattttatctgaaaatgcagtcctcagtttcaccatatcctgagcctaattttaccccagatgttgtgcagctgtgagttttcccaagggagtgctgctttgtggtatgtgtgagttggctctttggtctcagtgtggtagtgtgaactcctggaggctttgagggcagacacagacttgaagcacttttatttgagttgtttcat

SEQ ID NO: 683936 - DNA, 658 bp, Homo sapiens
tgtgtccaaaccgtgtggactgggaagaacttttcggatttgtgaaaggagaaccatgaaaaagtagtaattgtgttcctgattaaattgatatactggcttattaaaatartcaatgaccacaaaaccacgtattactttaaaaaatatttctacctaggcagctcttaaatgtatttaaaacttaaaaatcatttcgctaatggtaaaaattttagtattgtaactttttggaggtgacatgtttgttttgtgtgttttagatttgtgtagttctagggccaaaattaagattcttgggggaaataaaggttttgtgttgttttacggattggaatgccgtttgatttttggggctttgcttgcttccaattcaagtaatggatgaggtgtgtggcgtgatttcctccccattgctgtcagtttggctcatcctgtaaaggtggtaaatttcattctgattgtggtcaatttcagtctgaaggtagcactttataataatacaattttgttcaactagtcattctcctgtataagtttagaaaggctaaagaaattatgtggtgataccatacatgtgattattgactgaagcttgctttcttaaatttcctgtgaaagaaagataacatgtacatacctagttgtttttttctta

SEQ ID NO: 683937 - DNA, 1419 bp, Homo sapiens
ggggtgatgttggcagttaaagaacatacatcaggaaagagctaattgtttctccttcaggctttcagtctccctctagtgttttcttttgggaaaacgtaacagggagccagctgccaaaacaggcttgtagagcgtcacatagcaaagtgttgaaaaatgaggtttgcacagagaaacaaaagctgaataaacagcatggtgcctctcagatgatcgtagaggcaattggctcactataaccttatttgggttttccaatgccattaacggtccagcctcctccatcatcctatgcttataattatcaccatgtcctctgaggcatgagatgtgctatagccatagtacgtggcggtgcctcagtttcccctgcatctcatctcaattaayccccgatgaaatccttagtgattctgatactatttcaagcaggagttatcgccacccctacttaaccgctagtaacacggtccctattggcatcaggctggagagaaacgcaactccaaaatcttatcctgaggcatctgctttcaaaggttttccctaattccagctgtcttggcctgagttctccagagtacagagcctaaggcaaacacatttatgtcttgctactttagctgagagttcaagcccaagaaagcaggagtgaaggaatgaggggaaagaggcgggaaaatagggggagccaacacaaggtatattactgagactgctacaacctgctaccaagcataattcatggcttgatctggcaggattctaagagcctatgaactattgcatttcaggatagtctgtgggatggagggagaaagaaagggtgaatcatttttctgccggctcccatcgttctaagattcactctcttgtttctgtaagatgaactttcctgcaattctggttgaatgtgtgggcgtcaagcatgtcctaggacttctcaagcctcagtagcaacagaggcaccctaaggcaggaagtgaatgtcacatgtcttgggcaactgtctgggtgaagtgaaccttagcccttaccctgctgggctggtcatcacagctgcaggtggcagtgatagaatgggggcagggcaacaaaaaagggcctggtgaggctgaaaagatttaagtggtgtctgttacaagcatcatttatattgacaaaaaataaaaagaaaccaaaggactatcaaaaggagaatgattgaataaaatacatataattatatgcaattgtaaaaaaaaaaagttacagagcattttaggttctgttatggaaaatctataaaatatattattaagtgaacaagaggtacagatgagcatttatgatatgcaatctttcacaagaaaagtaggaaaattaaactacatttgaatccattagtatatacataaaaaattctggaatgatgca

SEQ ID NO: 683938 - DNA, 1419 bp, Homo sapiens
ggggtgatgttggcagttaaagaacatacatcaggaaagagctaattgtttctccttcaggctttcagtctccctctagtgttttcttttgggaaaacgtaacagggagccagctgccaaaacaggcttgtagagcgtcacatagcaaagtgttgaaaaatgaggtttgcacagagaaacaaaagctgaataaacagcatggtgcctctcagatgatcgtagaggcaattggctcactataaccttatttgggttttccaatgccattaacggtccagcctcctccatcatcctatgcttataattatcaccatgtcctctgaggcatgagatgtgctatagccatagtacgtggcggtgcctcagtttcccctgcatctcatctcaattaacccccgatgaaatccttagtgattctgatactatttcaagcaggagttatcgccacccctacttaaccgctagtaacacggtccctattggcatcaggctggagagaaacgcaactccaaaatcttatcctgaggcatctgctttcaaaggttttccctaattccagctgtcttggcctgagttctccagagtacagagcctaaggcaaacacatttatgtcttgctactttagctgagagttcaagcccaagaaagcaggagtgaaggaatgaggggaaagaggcgggaaaatagggggagccaacacaaggtatattactgagactgctacaacctgctaccaagcataattcatggcttgatctggcaggattctaagagcctatgaactattgcatttcaggatagtctgtgggatggagggagaaagaaagggtgaatcatttttctgccggctcccatcgttctaagattcactctcttgtttctgtaagatgaactttcctgcaattctggttgaawgtgtgggcgtcaagcatgtcctaggacttctcaagcctcagtagcaacagaggcaccctaaggcaggaagtgaatgtcacatgtcttgggcaactgtctgggtgaagtgaaccttagcccttaccctgctgggctggtcatcacagctgcaggtggcagtgatagaatgggggcagggcaacaaaaaagggcctggtgaggctgaaaagatttaagtggtgtctgttacaagcatcatttatattgacaaaaaataaaaagaaaccaaaggactatcaaaaggagaatgattgaataaaatacatataattatatgcaattgtaaaaaaaaaaagttacagagcattttaggttctgttatggaaaatctataaaatatattattaagtgaacaagaggtacagatgagcatttatgatatgcaatctttcacaagaaaagtaggaaaattaaactacatttgaatccattagtatatacataaaaaattctggaatgatgca

SEQ ID NO: 683939 - DNA, 1035 bp, Homo sapiens
aggggtatgattaaaagacatctgctctaaacttcctaatgttttgctagtcagtaaaacaaacagggtctctactaacaaatcttacggatgcaaagctatcaacggagcttctagaatacctcaacagcaaagcaagtacagagtaaaaacaaaaagccaagaaaaatcccaacaaccaaactacatggacacataccctaattacacaatgatctaagaactagacaaaacaaaaaaaatgtctgactttccatagcattgtcagaattcctggcaactctactgagcaatacctgacttctatatactcactcacttgcatatgtcctccatacactttatctcatttccttctacaattaatcttcaacattcacctttatgagtaagttcaccacaaaaatgtatttatttgtactacttaaaaacaagatagatacagtatgtgtgtcccgtcctctccactggtttaatccctggcaatatctgttttgtaatctataaaaattgacctactatttgtgcatcccatagggctgctgtagagattacatataagataggagaatgcctggtatgtaataaatattcaataaatgggagcatataatagctctaatgtttaggatcttagaaaacaaatgccctcaagtgaaaaaatgtgtattttattagtaagtactggcatatatcaagcatatatgtagtaggcactacactgaatgctctacacagatcayccagctctcacaaccacaggtagatatttctaagtacgttcttattacaaataagaaaagtgaggtttaataaaatgactaaataacttgcccaagatcacacacctaaattagaaatgaagtcagttatgtgatcgcaagtagtatgactccacagctctaagacttctctattaacatcaaagataaagactactttactgaatcttaaaattaattaaatattgtttatcatgttaagccaagaataattcaattagattagtttacaactaacaatatatgaacatgc

SEQ ID NO: 683940 - DNA, 3765 bp, Homo sapiens
ttgccctgtactaacagcttccttctcacattgtcactgtctctctctctgtcttcttttctttttaacacaatgttatttgaattcatgcagtgtgagtcagttttatagattaggacacatcaggaatacaaagttgtggaggtagaatgtgtgtggccaatgagatttactttttgggaactagatgacataaaccaatgtatttggtaatcatttggttctgattatgtatatctgtagataaatgtgaaattaggaatgcctcataaagacatattgcatatgttgcacaaaggtatctgctagtaccatttaatagttgtaataataacaacagttgacatttgtgagtgctcactatgtgcaaggcacatagaagctaaacttatgttattcaattattacaccatctctatgagacagctatgattatactcattttacaggtaaagaaatggagatttgaagacattaagtaatgcaaagacacacagccactaagtggcagaggtgggactggaagccagttctgtgacttggaagtctgtgccctcaggcaccacattatttgtttgccttattatgatagaaggagagtgtaaggcgaggccctccaaacccgtgaggtgttcattttcaccttccaggctcactggcagaaccagacatggaatccagattttcgagtctcagtcctttacaagctaattggctgactttgcttctttggaattaatttgctttttcacttttttcggaaaacagaatttgaagtaaaacatatgccaatagaaattgttgtttcaaactaaaaacaaaatgaaaactgtgcatttgattactttgtagtccactctgatgaacagaaatgcagacggtccaaatctagggccatgctttcttctgacccttcttttcctaatatcaacaccatattgttacaaagagggcagttcagagccaagaagcctccttatggatagttattaattttatcactaagataaatcttagtgggaatgcagaccatgtccagttgtgggacacacccactcatcttcctaattcttcccttgtcagtcaggtcaggctgcctctcgtggctgctctaggcttgttcctcacatgctactgcttgcaaaggcagctgacgttagcatgygttacaataaatgaaatttggttaaatcatgctactgcctcgtcagctctttcaaattgcactaagaaactctggttgagagacattagctatatatatagtcatcatacttgttaaaaatgattcctcatgcctgaggaaaataaatcatgacttccttaaggtctaccagaattgttggttggcatttctgactgaattccctcagtttttactacaaggttttataaagatgatattgcatccattcctgggactattacaaggcatttaaagctttccaacattcaactgagaatccttaagatcaattctaaaattggatttatttgctgtaaaagataggtctaatttgggcgttacatgcatttgatagggttctaaaacttttcttttgcctcacaaaactgagtggctttgtattaaatgaacaaacatttctattatacaatgactttcctgtactctaatagtgtgcgaataaccaaaaaacttcatgccattagaagctcaatataacccttactctataataaatatggatttctactttagagcaaatatggactttttggatccatctctacatcctagtgaaagaaagtgaaaaattgaatcaaagatattttttcttagaaaattacatatggcatggaatttggaaaaaacgaagtccttattggagatgagtacatttttatttgggacattttattagtttcttattgctgttgtaagaaattactcctttcataacagcttaacaattatccatgtattttctctcagttttgtatgttgtaagtctggtaggctcagcttagcatcttacaatgctgaggtatgggcagggctgcgtttcttactggagggtctttggggagaatccattccaggctgattcaggaggttgactgcattcagttccttgtggttgtagaaagtaggcccctattttctcgctggctgtccacagaacattgttctcagcctctagaccctgcccacattccctatatcatggctcaattcctctatcttcaaagccaacaaaggctggctaaatatttatctcactctcctctctctgacccccttcactcccagcctcatctttctccccttctgcagctgtgtctctctgactgcagatagagaaatatctctgacttatgggctcaaatgattagatttggcacattcagataatccaggataatatccctattttaagacctagatccttaatgatatctgcaaaattcatagcagtacctagattcctgtttggttgaataatcttagagtgacatctttagaattctattttcctctgaaatgaatacagcagaggctatccattagggactctttggctagaggtgggtggactgcaaggtttgattcagaatccatatcattgctgcctctaatatttttaattagtgagaagaaaaccattatattatcaataaactacttggccagcacatagaaacatattttaacatgtaaccaacagttatacatttactgacatgaagaatcacttttgtgtttgcatcatcattaagtacgtgagttatgggagaactcaaagagaatctttccctgtttagcaatgttgcgctacatgccagtaccccagaggtctcagcagaggatcagtattgccttaactctcaaagtactgacttcagctgacatagtccactggggatagaatcaaaaatgaagacggctttaccaagggcctcacctggggcaacgacattgagaaagtgatgatccagacctgagatctcctggaaagttgaagtttagtctcaaggaaggtgaagaaataggactggggagaaaaactccaaggactgggaatgagagagtttctctaggtttatcagagaataacagaaagggggaccttgaggagttggaagtttctctgatgtttccttgaagtcctgaaccaactttttggacaaattccagtaatttttccatttgcccatctctatgttcatagctcttgtcattgaatccatagtacaaattcacagttattcaatatatcaagctttaggaagattaaaagggctaacacagtagaaaatagcccgtttttcaagtgaacttgaccatagctattctggacaaaaaaatatttacatgttacttactcagttgaccactttcatggattctggtttatgtaggataaaatatggaaataaaaatttaggacattctttcaatccatagacaaaaacaatatactctctgtcatacagtaaatcccatttaaattgtacttctcttcttcactggaagtttacaatgtggtgattgatatgtctgatagtaacctcgggatacaacccagacttctgaattctcaaacaaagatgaaaatatgtccagtttgagtgtcaggaattatatacagattctttgaaaactgacattttatgttccatatatacatagacgcctctgatttaactagaatacttgatttacagactgctccattcactaaatagtgtgtaaactctagattgctattaggtttttagaattccctctttgttttatttgca

SEQ ID NO: 683941 - DNA, 604 bp, Homo sapiens
tcactctcttttttctttyggttcatgcaataattaatatgtttacctaatttctatagaaagttcttatggtgtaaaagatggtggcacaatgtttctaactcatggaaaagaggcaactccactggtagaagcaaaagtacatgtagcaggggcagtgcaatggctacagatatgaagtgttgctgtgagcatttgtaagtatattttacaggaggaaaaaagtgtgcctgatattgggttaatggattaaatggagatcaattaaaccagccttactatactatgattattactgtagagcacacaccctcagcaaaaattaaagaaagtgttatatacaataaaataacatggtagtataaaaatcatttacacacaaaaatgtacattcacatacaatacggttaataaaaagtataaagtcaaaatattacaaagaagaaaagggaattcagattttttaaacagctattttcttagttgtagaaatctcatttgaaaacatattacatgagccatctcattctaaggccacactgatacgaaagagaaaaatcctactgatgtgcttcataaaaaattccctaaagctgcctgctga

SEQ ID NO: 683942 - DNA, 628 bp, Homo sapiens
aaattattgyatataattcataaaagctagattttaaaaatataaccaatatttaaattattgaagtccatgtatgatttcccaaatattttagaaaacatttgaaattatattcataataaacacgtgcattaaaattgatatttagactttagaaccaaaataatgaacattttgagtctaagagttttgataatagatgcacgcatttccaacatttagcttacgtttttactaataagggcaactattataaaatagaagaattcctttttaaaatctaaagagaaaaatatataaagtacatcagagagagaggctctttggggaacaatttttagatgaccgtgtatcacccagtccgtatattttcttcaatgtcctcaagtctaatatgtgtcagcctttgtctcatgtcaattttctgacttcctagatgtttttcttaaaacataggtcagcttgatgacaaagtaatattttttaatacttgagattttgataaaagaagaaacattacacaaataaaatttatagacatagtacttcaaaactgggcatatctaggaattttaatagtaatcttattataaactatgtgtaatcctaatagtttctgttattaatt

SEQ ID NO: 683943 - DNA, 641 bp, Homo sapiens
ttatgttcacacaaaatctttacaaaatatttatagcagctttattcataattgccaaaaattggaagtaaccaagacattcattaatagatgaatggataaactatggtacatccacatagtggaatattattcagcaaaaaaaaaagaaaaaaaaagaaacgacctgtcaagacacaaaaagacatgaagaaaatatggtttccttattattctttttagatacagggtcttacgctattgtccasgctagagcacaggagtgcgatcatagttcactacagcctctgacttcaagggatctgcccacctcagcctcctgagcagctggtactacaggcatatgtgagcatgctcagctaacgatttaatgttttgtctacacgggatcttcttatgttgcccaggatggtctcaaactcctcgcctcaggtgatccaaggagaaaatttaaacacatattactaagtgaaagaaggcagtctgtaggatgccaaatatctgacattctggaaaaggcaaaactacggaaggtgaactcaaattatattttacatcacaagtaaacatgagcttagattcctcagtatatataaagttgatttcttttaaaccacatctgatcattataatatttctca

SEQ ID NO: 683944 - DNA, 641 bp, Homo sapiens
ttatgttcacacaaaatctttacaaaatatttatagcagctttattcataattgccaaaaattggaagtaaccaagacattcattaatagatgaatggataaactatggtacatccacatagtggaatattattcagcaaaaaaaaaagaaaaaaaaagaaacgacctgtcaagacacaaaaagacatgaagaaaatatggtttccttattattctttttagatacagggtcttacgctattgtccacgctagagcacaggagtgcgatcatagttcactacagcctctgacttcaagggatctgcccacctcagcctcctgagcagctggtactacaggcatatgtgagcaygctcagctaacgatttaatgttttgtctacacgggatcttcttatgttgcccaggatggtctcaaactcctcgcctcaggtgatccaaggagaaaatttaaacacatattactaagtgaaagaaggcagtctgtaggatgccaaatatctgacattctggaaaaggcaaaactacggaaggtgaactcaaattatattttacatcacaagtaaacatgagcttagattcctcagtatatataaagttgatttcttttaaaccacatctgatcattataatatttctca

SEQ ID NO: 683945 - DNA, 641 bp, Homo sapiens
ttatgttcacacaaaatctttacaaaatatttatagcagctttattcataattgccaaaaattggaagtaaccaagacattcattaatagatgaatggataaactatggtacatccacatagtggaatattattcagcaaaaaaaaaagaaaaaaaaagaaacgacctgtcaagacacaaaaagacatgaagaaaatatggtttccttattattctttttagatacagggtcttacgctattgtccacgctagagcacaggagtgcgatcatagttcactacagcctctgacttcaagggatctgcccacctcagcctcctgagcagctggtactacaggcatatgtgagcatgctcagctaacgatttaatgttttgtctacacgggatcttcttatgttgcccaggatggtctcaaactcctcgcctcaggtgatccaaggagaaaatttaaacacatattactaagtgaaagaaggcagtctgtaggatgccaaatatctgacattctggaaaaggcaaaactacggaaggtgaactcaaattatattttacatcacaagtaaacatgagcttagattcctcagtatatataaagttgatttcttttaaaccacatctgatmattataatatttctca

SEQ ID NO: 683946 - DNA, 2248 bp, Homo sapiens
tgaataacattatctctttgatatttatcagtatgatagtaaaatgcttttcatattaaaaagtgatatttttctttatgtttaggcttttcagtaactattaataatttttagaacagattgttgacaaagtctggtcatatttgtatttcctcaaaattaacaactgaattgaatgtcagatttattcatcttgcatagatgaattcatcatccccattgcatagaatagtgcctggcacaaggtccttagtacatgttgttgagtaaatgatatatgagtgatgtgtctaagaatgttatttgcacctgtctttataataaaatccctgaataaataaatataattaattggcatcatattaattatcaaaacaggcacaacagaatatgctagtcagtacaattttagtagtactgttataaattgggtggaatattagatagaggaacttattaataaaacttttgcctagtacgcaaatctcctccatagcccctgctataggcagtgagctttgaattacttctcatggcaggaaatcattacttaactagtaggtcattacgctttacatctagtgattttgaagctttctcacactgtgtcaaaattatcctccgaaaatacatatcttaaatgtattttagcccatattaatatgtattttagtaacataaattaatatcattaataattacacttgaatcatttgaatactgcttcttaactttattattataaaataaacatttccctaaaatgtttgtatcttgttttagttcatcttttgctcacaaataccatttatttttatgttcactatagaaagttatagtcatacatctagaaaatatcttaaaagttttcaagtactctaaagagataaacactaataaaatcacatatataatatacataacatattaataggtctatataataagatatgaaatttgaatctttttaattctgcttcttaactttaatattgtaaaataaacatttttctgttatgttaacatacacactgtaataatggaaaatacttataatatgaatgtacacttttcatgttatttaatgtttattttcttgttttctattatgagctgtactgcaaaactctgtataaatttttcctacattaatgattacttttcttttaaatgtttgtaaaatatttctagcctgcaaaaaattggacagaataaggtttgaatgtttgtgttcctccaaaatttatgtagaaatgtaatttccattgtgggaggtattaagaagtgaggtcttttgggaaataattaagttatgagggatctgcttttgtgagtgggattaatgaccttaaaaaagagtctttagagagctgtctgaggcttctgtcccttcaactatgagaggctatagtgcttttgccctctgaaggacacagcaacaaggctctaccttggaagcaaggaacaagactttaccagatactacatttgctggcaccttgaccttggatttctcagcctccagaactatgagcaataagcgttcattatttattaattatccagttgaaggtattttgttttagtagcaggaatggactaaggcaatatataataaacacttatgttcccaactcacagattttttttaacatttgatatgtattagtgatcatttgtttgaggagctatgacatggactcagtttgaatccttcctaacataatcaatgaatagtgtttttgatatttttaagtgtcacatatataatatactatattttacaatttttcttaacatttatttataaaaataaaaatatatcagttcattctcattttaactgaaatatatgatgtatgtaattacttcaagtccaagaattgacaactgtttccatgaaaccactttactgtatggtttggttacagttagccaacagatgtatgtgagtgagaagaaatcactcctctcagtatattgtagtagtcagacaygatgacagacaaatatggaagtgcccagaagtattcaacatccagcttttttcttcccaattactattcccaccaaccaatagcatttttgagtcaaccctcaagcatttcactgcaattttcatagtgatgacagctgccacatatctccctatgagctctctgttgattttggcagtcagactgaaaataaacaaaccaacaaaagtctggaattttcctgtaagttccaaccaaccaacttacacaaa

SEQ ID NO: 683947 - DNA, 634 bp, Homo sapiens
caaaagtgtttataaacaataaactatattatttctgtgatgtaagtttaatgtattattgaagacaagtgacagccccacatacccctccaccaaaagggtcagctttcctgttttctgtgcagatcgataggtttggtgtgtacaaaaagtgaccaggttatgctgacagacagccatgaggatttataacttgcttttargatgagtgccggtctctctcccatgagcagtgagtcctgatagcagggtcactgtggtctggtgatgttaaggcattccaggtttctttcatctacactcattcttaaactgctgcagaaagagatgtcaagatatcactgggtggggacattagaaaaggattcaggaatctataaacaagaaaagcttaccttccaccaccctctgtgctttgggtgtgttctgcccctgactcagtgcaggatcagaatagggcgatcttgataacaatcatgtgtaggcaaaagcctttgtaccttagcaggatggaatagtaaatatctgggtaggtgattccccatgtgtttccaacagacactcatccgtgcagagttcagtgtggcaggcttttctgtagcacagtccctgtaacctgaacggaagactacct

SEQ ID NO: 683948 - DNA, 527 bp, Homo sapiens
acatgtatacctatgtatcaaaccatgtaccctagaacttaaagtctgagaaagaaagaaagaaagaaagaaagaaagaaagaaagaaagaaaggaaagaagaaagaaagaaagaaagaaagaaagaaagaaagaaagaaagaaagaaaaragaaagaaagaaagaaaaagaaagaaagaaagaaagaaagaaagaaagaaagaaagaaaagaaagaaagaaagaaagaaagaaagaaagaaagaaagaaggaaggaaggaaggaaggaaggaaggaaggaaggaaggaaagaaagaaagagagagaagaggaaggaaggaaggaaggaaatagatatgcattcattactcagattagtaaactttgactcctaatatgacaacattccctgggtttacctaatgtttacacctagttaaaataggaacctgctgaaaaagattactgaggaatcggtgggagctggggttagaaagagtgtgatgggctaaactgtgtcctccctaaccccaccaaaatttataca

SEQ ID NO: 683949 - DNA, 527 bp, Homo sapiens
acatgtatacctatgtatcaaaccatgtaccctagaacttaaagtctgagaaagaaagaaagaaagaaagaaagaaagaaagaaagaaagaaaggaaagaagaaagaaagaaagaaagaaagaaagaaagaaagaaagaaagaaagaaaagagaaagaaagaaagaraaagaaagaaagaaagaaagaaagaaagaaagaaagaaagaaaagaaagaaagaaagaaagaaagaaagaaagaaagaaagaaggaaggaaggaaggaaggaaggaaggaaggaaggaaggaaagaaagaaagagagagaagaggaaggaaggaaggaaggaaatagatatgcattcattactcagattagtaaactttgactcctaatatgacaacattccctgggtttacctaatgtttacacctagttaaaataggaacctgctgaaaaagattactgaggaatcggtgggagctggggttagaaagagtgtgatgggctaaactgtgtcctccctaaccccaccaaaatttataca

SEQ ID NO: 683950 - DNA, 527 bp, Homo sapiens
acatgtatacctatgtatcaaaccatgtaccctagaacttaaagtctgagaaagaaagaaagaaagaaagaaagaaagaaagaaagaaagaaaggaaagaagaaagaaagaaagaaagaaagaaagaaagaaagaaagaaagaaagaaaagagaaagaaagaaagaaaaagaaagaaagaaagaaagaaagaaagaaagaaagaaagaaaagaaagaaagaaagaaagaaagaaagaaagaaagaaagaargaaggaaggaaggaaggaaggaaggaaggaaggaaggaaagaaagaaagagagagaagaggaaggaaggaaggaaggaaatagatatgcattcattactcagattagtaaactttgactcctaatatgacaacattccctgggtttacctaatgtttacacctagttaaaataggaacctgctgaaaaagattactgaggaatcggtgggagctggggttagaaagagtgtgatgggctaaactgtgtcctccctaaccccaccaaaatttataca

SEQ ID NO: 683951 - DNA, 680 bp, Homo sapiens
tctggctttaaaagtatttttggctttaaaagtaatctcctacctttctgctgaacttattagttttggccgttgtaatcttattatttcggtctaagaaactctgccactttctgctggaagatattgtgatatgtttcccagacatgtggctgaatttctctttcaggagagagttaagggaagaacacactgctatcatttttcggagatacgcattcagtgacctgttccccaaaggatggagaaaaaaaatgaagtkagctttggggatctcacacaccaccttgattccactgcaaactcataggctgcagctaagatagtcaaatttacttgacgtctgaacacacaaaccacttgtttgcctccaaaagagaaggcatcagagtatcgtaggactccttacagatgtatgatgactcggtgatgtctgagaagagaggaatttcctgtgctgttgtgtagcccatgaattctgtcatacagaaccactccctttaaatgtcaccttttccttcgcctcctcctctgaaatcctctttactacatagacacacttcctgtgttctcaaagcccacattgcctctattggatttgagatttactcagttcgaagcgtcccgatgaagcaatcggaagtggagacagagagacttttctgccgtgcctgttctgc

SEQ ID NO: 683952 - DNA, 680 bp, Homo sapiens
tctggctttaaaagtatttttggctttaaaagtaatctcctacctttctgctgaacttattagttttggccgttgtaatcttattatttcggtctaagaaactctgccactttctgctggaagatattgtgatatgtttcccagacatgtggctgaatttctctttcaggagagagttaagggaagaacacactgctatcatttttcggagatacgcattcagtgacctgttccccaaaggatggagaaaaaaaatgaagttagctttggggatctcacacaccaccttgattccactgcaaactcataggctgcagctaagatagtcaaatttacttgacgtctgaacacacaaaccacttgtttgcctccaaaagagaaggcatcagagtatcgtaggacyccttacagatgtatgatgactcggtgatgtctgagaagagaggaatttcctgtgctgttgtgtagcccatgaattctgtcatacagaaccactccctttaaatgtcaccttttccttcgcctcctcctctgaaatcctctttactacatagacacacttcctgtgttctcaaagcccacattgcctctattggatttgagatttactcagttcgaagcgtcccgatgaagcaatcggaagtggagacagagagacttttctgccgtgcctgttctgc

SEQ ID NO: 683953 - DNA, 633 bp, Homo sapiens
ttaggctcttccaggtcagaaactcgaagttagttttttttttttttttttatctcatttacgcctcaatatattttacaagctcaaatttattcaataaattcatgtttaattgatttcttaaatttggaaataaaaaactatgcaaagttttaaatacataaagagtctttaaggtattctgcaacctcagcccttccacttgatattttgaataaaaagcatgcagcagtggtctttttctttagagaccacactgttgacattgtacagcattttattcacaaactgcatggaataagatgatttgggcctataagtaaaagccaagattctacaattcgagcattattttgttttgttatttttcaacacttttatgaggcaggggaaaaacattgatgctggacacttttgtggggttcttcttgcagggagaatcagcttcatgcaatgaaaaggatatgacatggggctcagctatacctggaaagaaatctcagcccttccaacacttatttgcaatcctgggcaagtaatctcactgaatttctgttttcttatttagaaagtacgaataataagmcctcatttaaccacagtattttgtaaaataaactagagtaggctgat

SEQ ID NO: 683954 - DNA, 590 bp, Homo sapiens
aaaaaaggaaaactaacataaagaaactaaattaatctaccttttcgaataagatgaaccaattgttgctgaatgcaagctaaaaaaatttttttttgaaaaaaagtatatctgttggaattttgtaggtcartgtcagagaatgccacccaaactggaggaatctcaaagtgaaatgtttagcacacgatgctaatgaaggaaattgaacttcttcgtcagaaaatacttgaactattggcttgcacaatggtaccagatcctggcctctctctccatgtcttaactagccttctgtgttgggcccatttttaagtgagctcaacccttacgttggtaacattgctgcttaaggtcctgcttcagatttcctcacgttagtttctagccaaaaagagacaaaacatttttccagtggctcttatacaactttaggggattggattgtttgttactccttgagcgctgtggtgagaaaattaggttcacttttcaagatcacaaaccttatagaccaagggatggggtcccacccacaacacataaactttcagggagtcaaagggctgaattggaaagaaaattggaaa

SEQ ID NO: 683955 - DNA, 590 bp, Homo sapiens
aaaaaaggaaaactaacataaagaaactaaattaatctaccttttcgaataagatgaaccaattgttgctgaatgcaagctaaaaaaatttttttttgaaaaaaagtatatctgttggaattttgtaggtcagtgtcagagaatgccacccaaactggaggaatctcaaagtgaaatgtttagcacacgatgctaatgaaggaaattgaacttcttcgtcagaaaatacttgaactattggcttgcacaatggtaccagatcctggcctctctctccatgtcttaactagccttctgtgttgggcccatttttaagtgagctcaacccttaygttggtaacattgctgcttaaggtcctgcttcagatttcctcacgttagtttctagccaaaaagagacaaaacatttttccagtggctcttatacaactttaggggattggattgtttgttactccttgagcgctgtggtgagaaaattaggttcacttttcaagatcacaaaccttatagaccaagggatggggtcccacccacaacacataaactttcagggagtcaaagggctgaattggaaagaaaattggaaa

SEQ ID NO: 683956 - DNA, 1180 bp, Homo sapiens
tgcctactactcattgaataatatatgtttattcagctagtgttttgtgttgtgaagaataagaaaacttaatttgaaatttggtatttaaaaacattttttcccgtgctagctaaacttaaacatactataatatgcttcaaattttcattctagttttgttgttgtttcaagttttgttttgctattctgtggtattcttaaccatttcatcttccatcagaggggtgtgaacatcattttcacaagcaaatgaaagatatataagaggcctagtgcaaactgtaacttccatagatgtcagctaattgtaaaagttaattattaagttttgtttactagaaaagcatgacatgctgcttgccaaagtttttatatgttaaaatagtaataaggagttatagataaatgtgtttcctgaactaaggataattaaatttatcaattttttttatttcatatatttacacaaattttctccctctttattttaccttaaaaatgtgatcattttaccccactcatgtttcccatccatataactaagcaaagttatttggcattaaatccttccttctctgaacagaagtgattcattgttccagataatatctaacaccttcataattatcattaatctttgaattaatacaaatttagatatttayatattttaacaccacacaaaattcgttgtaaaaacctttagcttctttagtatacctaaaataatgttttcaaaggttttttccttactgtaagtttaaaaccaattcactgtggaaaactaaactgtcatcagctaattgtctcaactacaaacatttatttgaagtgtgtatacatgtcagaatgtgtgtgtgtatagcttgtgagaacaagtgatttagactataaaatgctgaaaagagtgaaggctattcttgctatatggtagaaagtgaattcataacaagtatatttttgagatgttggtcctgtgcaagcttaacatcattcagcagcggaaaggaatctggtgccctatttgtacttccatctcacctcctattcactttctttgtaaccttttttcttcttatgaacttggcattctattgaacatcaggttcccaaagagtaatagcaaataaggaagctttatgggctgccttagcatcgggtgcaccagaagacgaca

SEQ ID NO: 683957 - DNA, 2639 bp, Homo sapiens
tcaacccttcagctttggagccatctaggaaggtttagggaccagcatggctttgggaggagcaattcattccaagccaatttaatttcctctcatgatgaagtgacctggcatgcggataagggagcaataagtgtatctcctcgcctctggagggcttttaattcaataccacatgccactctcatcaacatgcagggaggcagggtctgggcagtggttcattgatttggccctaggagaatacacgtaggagctcatccaggacttgagggaggggaaggaatatggatatttctgtgatctgaatgtgtcccccaaaattcatgtgttggaaacttgatccttaatgcaatagtgttgggaggtggaacctttggggaggtgtttagatcaggagggctctgccttcatgaatggatcaatgctatcacaaaagggcctgatggaggcagtttggttctttttttgcctttccttctgccttctgcgtgggagggcacagcattcaagacaccatcttagaagcagagacygggccctcaccagacacaaaacctgccagttccttgatgttggacttatcagaatccagaactgtgagaaataaattgataaattacccaatttgtggtattttgttatagcagcacaaacagactaagatagatactaatactaatacaataccaacatcaaaactgctagcaggctgggcatggggttcacacctgtaatcccagcactttgggaggtcaaggcaggcagatctcttgaggccaggagtttgagaccagcctggccaacatggtgaaacactgtctctactgaaaatatagccaggcatggtggtgtgtgcctgtaaccctgagtaatcttgggagtctgaggcacaagaatcgcttgaacccaggaggcagaggttgtagtgagccgagatcctgccactgccctccagcctgggtgatagagcaagattctgcctttaaaaaaaaaaaaaatgctgctagcaatgcacttcactaatactcattttacactgctaatacttgtcacccagaaaacctccctcctggagagccccaggttcttcagaactcagtaatcactctttaacaaacaaagaaaatggtttcagccccactgcagcactctgacacatcttcaaaaactccacagatttccagaaagacataccttctcctggtcagtgggggttacgccctcggtcaccactgtcatctggtccttagccatcatcctctgttcctgaagctgccattctctctccccatctctgttacccctggaccacctcacatctgccatgcctcatagcatcatgaacacaaagctggttcccaaaagtgtttgtggataacggaaggggtattgcagtcctgcatatctggtcaattacaggaacacagcatcctggttcttggctgggtgcagcggctcacatctgtaatcccagcactttgggaggcaggtggatcactttaggttaggagtttgagaccagcctggccaacacggtgaaaccctgtctctactaaaaatacaaaaaattagccgggtgtggtggtgcacacctataatcccaggcacttgggaggctaaggcaggaggatcacttgaacctgggaggtggaggttgcagtgagccaggatggcactgctgcactccagccagggtgacagagcgaggctctatctcaaaatattttaaaaagtaaaaaataaataaaaataaaaaaagcaatatagcatcctggttcttgagttttctggactgtccctacaccgggggcttctcttgctctagagatgtccttgctaatcattgctctcctgagctgcctctgtttttctctggaccctctcctctcaatcccttcctgcttcccatctctgtggccttggcttcttcttaacaagcttgccacccccaacttcaaattcctgtcaatttgttgtaaacaagctacctctgtttgtgtcttgccttttcccaccagggaggtatagacatggttaaagacacggcctctggcactggaaggcctccttttcactcccagctaggcattcttcaaatccttcctatccctattttacagctgacaaaactgacttccgggggatttggttttgctcaaggacccagggtccttcaggggtaggtaggaaagatctgggacaactcccaggcctcttccaggcagaaggagaagtaggttggagaatgctagttgagggcacctgcaaaagctaaatcaagactgcctgaagcttaggaggaaggaaatgtgtgtagatttagttcctagagggcttataaataggaccattgctcatttgtcctgaaaagtcgctgggcaaccttcccgaggtgaggggtgggggcggggccacatgccctcctgaggtcatttctagcttgatgattcacacggcaaaatcccagcgtgggttcagcgcccctccccgcacccgccccgtgtactttcattttgcattatgatttttcactcaagctgatgcgaacccaaattgatgtcatttccctcccaataagctcttgaccagaaaacatctaattctccatctagctgggattttttttttttcactca

SEQ ID NO: 683958 - DNA, 2639 bp, Homo sapiens
tcaacccttcagctttggagccatctaggaaggtttagggaccagcatggctttgggaggagcaattcattccaagccaatttaatttcctctcatgatgaagtgacctggcatgcggataagggagcaataagtgtatctcctcgcctctggagggcttttaattcaataccacatgccactctcatcaacatgcagggaggcagggtctgggcagtggttcattgatttggccctaggagaatacacgtaggagctcatccaggacttgagggaggggaaggaatatggatatttctgtgatctgaatgtgtcccccaaaattcatgtgttggaaacttgatccttaatgcaatagtgttgggaggtggaacctttggggaggtgtttagatcaggagggctctgccttcatgaatggatcaatgctatcacaaaagggcctgatggaggcagtttggttctttttttgcctttccttctgccttctgcgtgggagggcacagcattcaagacaccatcttagaagcagagactgggccctcaccagacacaaaacctgccagttccttgatgttggacttatcagaatccagaactgtgagaaataaattgataaattacccaatttgtggtattttgttatagcagcacaaacagactaagayagatactaatactaatacaataccaacatcaaaactgctagcaggctgggcatggggttcacacctgtaatcccagcactttgggaggtcaaggcaggcagatctcttgaggccaggagtttgagaccagcctggccaacatggtgaaacactgtctctactgaaaatatagccaggcatggtggtgtgtgcctgtaaccctgagtaatcttgggagtctgaggcacaagaatcgcttgaacccaggaggcagaggttgtagtgagccgagatcctgccactgccctccagcctgggtgatagagcaagattctgcctttaaaaaaaaaaaaaatgctgctagcaatgcacttcactaatactcattttacactgctaatacttgtcacccagaaaacctccctcctggagagccccaggttcttcagaactcagtaatcactctttaacaaacaaagaaaatggtttcagccccactgcagcactctgacacatcttcaaaaactccacagatttccagaaagacataccttctcctggtcagtgggggttacgccctcggtcaccactgtcatctggtccttagccatcatcctctgttcctgaagctgccattctctctccccatctctgttacccctggaccacctcacatctgccatgcctcatagcatcatgaacacaaagctggttcccaaaagtgtttgtggataacggaaggggtattgcagtcctgcatatctggtcaattacaggaacacagcatcctggttcttggctgggtgcagcggctcacatctgtaatcccagcactttgggaggcaggtggatcactttaggttaggagtttgagaccagcctggccaacacggtgaaaccctgtctctactaaaaatacaaaaaattagccgggtgtggtggtgcacacctataatcccaggcacttgggaggctaaggcaggaggatcacttgaacctgggaggtggaggttgcagtgagccaggatggcactgctgcactccagccagggtgacagagcgaggctctatctcaaaatattttaaaaagtaaaaaataaataaaaataaaaaaagcaatatagcatcctggttcttgagttttctggactgtccctacaccgggggcttctcttgctctagagatgtccttgctaatcattgctctcctgagctgcctctgtttttctctggaccctctcctctcaatcccttcctgcttcccatctctgtggccttggcttcttcttaacaagcttgccacccccaacttcaaattcctgtcaatttgttgtaaacaagctacctctgtttgtgtcttgccttttcccaccagggaggtatagacatggttaaagacacggcctctggcactggaaggcctccttttcactcccagctaggcattcttcaaatccttcctatccctattttacagctgacaaaactgacttccgggggatttggttttgctcaaggacccagggtccttcaggggtaggtaggaaagatctgggacaactcccaggcctcttccaggcagaaggagaagtaggttggagaatgctagttgagggcacctgcaaaagctaaatcaagactgcctgaagcttaggaggaaggaaatgtgtgtagatttagttcctagagggcttataaataggaccattgctcatttgtcctgaaaagtcgctgggcaaccttcccgaggtgaggggtgggggcggggccacatgccctcctgaggtcatttctagcttgatgattcacacggcaaaatcccagcgtgggttcagcgcccctccccgcacccgccccgtgtactttcattttgcattatgatttttcactcaagctgatgcgaacccaaattgatgtcatttccctcccaataagctcttgaccagaaaacatctaattctccatctagctgggattttttttttttcactca

SEQ ID NO: 683959 - DNA, 2639 bp, Homo sapiens
tcaacccttcagctttggagccatctaggaaggtttagggaccagcatggctttgggaggagcaattcattccaagccaatttaatttcctctcatgatgaagtgacctggcatgcggataagggagcaataagtgtatctcctcgcctctggagggcttttaattcaataccacatgccactctcatcaacatgcagggaggcagggtctgggcagtggttcattgatttggccctaggagaatacacgtaggagctcatccaggacttgagggaggggaaggaatatggatatttctgtgatctgaatgtgtcccccaaaattcatgtgttggaaacttgatccttaatgcaatagtgttgggaggtggaacctttggggaggtgtttagatcaggagggctctgccttcatgaatggatcaatgctatcacaaaagggcctgatggaggcagtttggttctttttttgcctttccttctgccttctgcgtgggagggcacagcattcaagacaccatcttagaagcagagactgggccctcaccagacacaaaacctgccagttccttgatgttggacttatcagaatccagaactgtgagaaataaattgataaattacccaatttgtggtattttgttatagcagcacaaacagactaagatagatactaatactaatacaataccaacatcaaaactgctagcaggctgggcatggggttcacacctgtaatcccagcactttgggaggtcaaggcaggcagatctcttgaggccaggagtttgagaccagcctggccaacatggtgaaacactgtctctactgaaaatatagccaggcatggtggtgtgtgcctgtaaccctgagtaatcttgggagtctgaggcacaagaatcgcttgaacccaggaggcagaggttgtagtgagccgagatcctgccactgccctccrgcctgggtgatagagcaagattctgcctttaaaaaaaaaaaaaatgctgctagcaatgcacttcactaatactcattttacactgctaatacttgtcacccagaaaacctccctcctggagagccccaggttcttcagaactcagtaatcactctttaacaaacaaagaaaatggtttcagccccactgcagcactctgacacatcttcaaaaactccacagatttccagaaagacataccttctcctggtcagtgggggttacgccctcggtcaccactgtcatctggtccttagccatcatcctctgttcctgaagctgccattctctctccccatctctgttacccctggaccacctcacatctgccatgcctcatagcatcatgaacacaaagctggttcccaaaagtgtttgtggataacggaaggggtattgcagtcctgcatatctggtcaattacaggaacacagcatcctggttcttggctgggtgcagcggctcacatctgtaatcccagcactttgggaggcaggtggatcactttaggttaggagtttgagaccagcctggccaacacggtgaaaccctgtctctactaaaaatacaaaaaattagccgggtgtggtggtgcacacctataatcccaggcacttgggaggctaaggcaggaggatcacttgaacctgggaggtggaggttgcagtgagccaggatggcactgctgcactccagccagggtgacagagcgaggctctatctcaaaatattttaaaaagtaaaaaataaataaaaataaaaaaagcaatatagcatcctggttcttgagttttctggactgtccctacaccgggggcttctcttgctctagagatgtccttgctaatcattgctctcctgagctgcctctgtttttctctggaccctctcctctcaatcccttcctgcttcccatctctgtggccttggcttcttcttaacaagcttgccacccccaacttcaaattcctgtcaatttgttgtaaacaagctacctctgtttgtgtcttgccttttcccaccagggaggtatagacatggttaaagacacggcctctggcactggaaggcctccttttcactcccagctaggcattcttcaaatccttcctatccctattttacagctgacaaaactgacttccgggggatttggttttgctcaaggacccagggtccttcaggggtaggtaggaaagatctgggacaactcccaggcctcttccaggcagaaggagaagtaggttggagaatgctagttgagggcacctgcaaaagctaaatcaagactgcctgaagcttaggaggaaggaaatgtgtgtagatttagttcctagagggcttataaataggaccattgctcatttgtcctgaaaagtcgctgggcaaccttcccgaggtgaggggtgggggcggggccacatgccctcctgaggtcatttctagcttgatgattcacacggcaaaatcccagcgtgggttcagcgcccctccccgcacccgccccgtgtactttcattttgcattatgatttttcactcaagctgatgcgaacccaaattgatgtcatttccctcccaataagctcttgaccagaaaacatctaattctccatctagctgggattttttttttttcactca

SEQ ID NO: 683960 - DNA, 2639 bp, Homo sapiens
tcaacccttcagctttggagccatctaggaaggtttagggaccagcatggctttgggaggagcaattcattccaagccaatttaatttcctctcatgatgaagtgacctggcatgcggataagggagcaataagtgtatctcctcgcctctggagggcttttaattcaataccacatgccactctcatcaacatgcagggaggcagggtctgggcagtggttcattgatttggccctaggagaatacacgtaggagctcatccaggacttgagggaggggaaggaatatggatatttctgtgatctgaatgtgtcccccaaaattcatgtgttggaaacttgatccttaatgcaatagtgttgggaggtggaacctttggggaggtgtttagatcaggagggctctgccttcatgaatggatcaatgctatcacaaaagggcctgatggaggcagtttggttctttttttgcctttccttctgccttctgcgtgggagggcacagcattcaagacaccatcttagaagcagagactgggccctcaccagacacaaaacctgccagttccttgatgttggacttatcagaatccagaactgtgagaaataaattgataaattacccaatttgtggtattttgttatagcagcacaaacagactaagatagatactaatactaatacaataccaacatcaaaactgctagcaggctgggcatggggttcacacctgtaatcccagcactttgggaggtcaaggcaggcagatctcttgaggccaggagtttgagaccagcctggccaacatggtgaaacactgtctctactgaaaatatagccaggcatggtggtgtgtgcctgtaaccctgagtaatcttgggagtctgaggcacaagaatcgcttgaacccaggaggcagaggttgtagtgagccgagatcctgccactgccctccagcctgggtgatagagcaagattctgcctttaaaaaaaaaaaaaatgctgctagcaatgcacttcactaatactcattttacactgctaatacttgtcacccagaaaacctccctcctggagagccccaggttcttcagaactcagtaatcactctttaacaaacaaagaaaatggtttcagccccactgcagcactctgacacatcttcaaaaactccacagatttccagaaagacataccttctcctggtcagtgggggttacgccctcggtcaccactgtcatctggtccttagccatcatcctctgttcctgaagctgccattctctctccccatctctgttacccctggaccacctcacatctgccatgcctcatagcatcatgaacacaaagctggttcccaaaagtgtttgtggataacggaaggggtattgcagtcctgcatatctggtcaattacaggaacacagcatcctggttcttggctgggtgcagcggctcacatctgtaatcccagcactttgggaggcaggtggatcactttaggttaggagtttgagaccagcctggccaacacggtgaaaccctgtctctactaaaaatacaaaaaattagccgggtgtggtggtgcacacctataatcccaggcacttgggaggctaaggcaggaggatcacttgaacctgggaggtggaggttgcagtgagccaggatggcrctgctgcactccagccagggtgacagagcgaggctctatctcaaaatattttaaaaagtaaaaaataaataaaaataaaaaaagcaatatagcatcctggttcttgagttttctggactgtccctacaccgggggcttctcttgctctagagatgtccttgctaatcattgctctcctgagctgcctctgtttttctctggaccctctcctctcaatcccttcctgcttcccatctctgtggccttggcttcttcttaacaagcttgccacccccaacttcaaattcctgtcaatttgttgtaaacaagctacctctgtttgtgtcttgccttttcccaccagggaggtatagacatggttaaagacacggcctctggcactggaaggcctccttttcactcccagctaggcattcttcaaatccttcctatccctattttacagctgacaaaactgacttccgggggatttggttttgctcaaggacccagggtccttcaggggtaggtaggaaagatctgggacaactcccaggcctcttccaggcagaaggagaagtaggttggagaatgctagttgagggcacctgcaaaagctaaatcaagactgcctgaagcttaggaggaaggaaatgtgtgtagatttagttcctagagggcttataaataggaccattgctcatttgtcctgaaaagtcgctgggcaaccttcccgaggtgaggggtgggggcggggccacatgccctcctgaggtcatttctagcttgatgattcacacggcaaaatcccagcgtgggttcagcgcccctccccgcacccgccccgtgtactttcattttgcattatgatttttcactcaagctgatgcgaacccaaattgatgtcatttccctcccaataagctcttgaccagaaaacatctaattctccatctagctgggattttttttttttcactca

SEQ ID NO: 683961 - DNA, 2639 bp, Homo sapiens
tcaacccttcagctttggagccatctaggaaggtttagggaccagcatggctttgggaggagcaattcattccaagccaatttaatttcctctcatgatgaagtgacctggcatgcggataagggagcaataagtgtatctcctcgcctctggagggcttttaattcaataccacatgccactctcatcaacatgcagggaggcagggtctgggcagtggttcattgatttggccctaggagaatacacgtaggagctcatccaggacttgagggaggggaaggaatatggatatttctgtgatctgaatgtgtcccccaaaattcatgtgttggaaacttgatccttaatgcaatagtgttgggaggtggaacctttggggaggtgtttagatcaggagggctctgccttcatgaatggatcaatgctatcacaaaagggcctgatggaggcagtttggttctttttttgcctttccttctgccttctgcgtgggagggcacagcattcaagacaccatcttagaagcagagactgggccctcaccagacacaaaacctgccagttccttgatgttggacttatcagaatccagaactgtgagaaataaattgataaattacccaatttgtggtattttgttatagcagcacaaacagactaagatagatactaatactaatacaataccaacatcaaaactgctagcaggctgggcatggggttcacacctgtaatcccagcactttgggaggtcaaggcaggcagatctcttgaggccaggagtttgagaccagcctggccaacatggtgaaacactgtctctactgaaaatatagccaggcatggtggtgtgtgcctgtaaccctgagtaatcttgggagtctgaggcacaagaatcgcttgaacccaggaggcagaggttgtagtgagccgagatcctgccactgccctccagcctgggtgatagagcaagattctgcctttaaaaaaaaaaaaaatgctgctagcaatgcacttcactaatactcattttacactgctaatacttgtcacccagaaaacctccctcctggagagccccaggttcttcagaactcagtaatcactctttaacaaacaaagaaaatggtttcagccccactgcagcactctgacacatcttcaaaaactccacagatttccagaaagacataccttctcctggtcagtgggggttacgccctcggtcaccactgtcatctggtccttagccatcatcctctgttcctgaagctgccattctctctccccatctctgttacccctggaccacctcacatctgccatgcctcatagcatcatgaacacaaagctggttcccaaaagtgtttgtggataacggaaggggtattgcagtcctgcatatctggtcaattacaggaacacagcatcctggttcttggctgggtgcagcggctcacatctgtaatcccagcactttgggaggcaggtggatcactttaggttaggagtttgagaccagcctggccaacacggtgaaaccctgtctctactaaaaatacaaaaaattagccgggtgtggtggtgcacacctataatcccaggcacttgggaggctaaggcaggaggatcacttgaacctgggaggtggaggttgcagtgagccaggatggcactgctgcactccagccagggtgacagagcgaggctctatctcaaaatattttaaaaagtaaaaaataaataaaaataaaaaaagcaatatarcatcctggttcttgagttttctggactgtccctacaccgggggcttctcttgctctagagatgtccttgctaatcattgctctcctgagctgcctctgtttttctctggaccctctcctctcaatcccttcctgcttcccatctctgtggccttggcttcttcttaacaagcttgccacccccaacttcaaattcctgtcaatttgttgtaaacaagctacctctgtttgtgtcttgccttttcccaccagggaggtatagacatggttaaagacacggcctctggcactggaaggcctccttttcactcccagctaggcattcttcaaatccttcctatccctattttacagctgacaaaactgacttccgggggatttggttttgctcaaggacccagggtccttcaggggtaggtaggaaagatctgggacaactcccaggcctcttccaggcagaaggagaagtaggttggagaatgctagttgagggcacctgcaaaagctaaatcaagactgcctgaagcttaggaggaaggaaatgtgtgtagatttagttcctagagggcttataaataggaccattgctcatttgtcctgaaaagtcgctgggcaaccttcccgaggtgaggggtgggggcggggccacatgccctcctgaggtcatttctagcttgatgattcacacggcaaaatcccagcgtgggttcagcgcccctccccgcacccgccccgtgtactttcattttgcattatgatttttcactcaagctgatgcgaacccaaattgatgtcatttccctcccaataagctcttgaccagaaaacatctaattctccatctagctgggattttttttttttcactca

SEQ ID NO: 683962 - DNA, 2639 bp, Homo sapiens
tcaacccttcagctttggagccatctaggaaggtttagggaccagcatggctttgggaggagcaattcattccaagccaatttaatttcctctcatgatgaagtgacctggcatgcggataagggagcaataagtgtatctcctcgcctctggagggcttttaattcaataccacatgccactctcatcaacatgcagggaggcagggtctgggcagtggttcattgatttggccctaggagaatacacgtaggagctcatccaggacttgagggaggggaaggaatatggatatttctgtgatctgaatgtgtcccccaaaattcatgtgttggaaacttgatccttaatgcaatagtgttgggaggtggaacctttggggaggtgtttagatcaggagggctctgccttcatgaatggatcaatgctatcacaaaagggcctgatggaggcagtttggttctttttttgcctttccttctgccttctgcgtgggagggcacagcattcaagacaccatcttagaagcagagactgggccctcaccagacacaaaacctgccagttccttgatgttggacttatcagaatccagaactgtgagaaataaattgataaattacccaatttgtggtattttgttatagcagcacaaacagactaagatagatactaatactaatacaataccaacatcaaaactgctagcaggctgggcatggggttcacacctgtaatcccagcactttgggaggtcaaggcaggcagatctcttgaggccaggagtttgagaccagcctggccaacatggtgaaacactgtctctactgaaaatatagccaggcatggtggtgtgtgcctgtaaccctgagtaatcttgggagtctgaggcacaagaatcgcttgaacccaggaggcagaggttgtagtgagccgagatcctgccactgccctccagcctgggtgatagagcaagattctgcctttaaaaaaaaaaaaaatgctgctagcaatgcacttcactaatactcattttacactgctaatacttgtcacccagaaaacctccctcctggagagccccaggttcttcagaactcagtaatcactctttaacaaacaaagaaaatggtttcagccccactgcagcactctgacacatcttcaaaaactccacagatttccagaaagacataccttctcctggtcagtgggggttacgccctcggtcaccactgtcatctggtccttagccatcatcctctgttcctgaagctgccattctctctccccatctctgttacccctggaccacctcacatctgccatgcctcatagcatcatgaacacaaagctggttcccaaaagtgtttgtggataacggaaggggtattgcagtcctgcatatctggtcaattacaggaacacagcatcctggttcttggctgggtgcagcggctcacatctgtaatcccagcactttgggaggcaggtggatcactttaggttaggagtttgagaccagcctggccaacacggtgaaaccctgtctctactaaaaatacaaaaaattagccgggtgtggtggtgcacacctataatcccaggcacttgggaggctaaggcaggaggatcacttgaacctgggaggtggaggttgcagtgagccaggatggcactgctgcactccagccagggtgacagagcgaggctctatctcaaaatattttaaaaagtaaaaaataaataaaaataaaaaaagcaatatagcatcctggttcttgagttttctggactgtccctacaccgggggcttctcttgctctagagatgtccttgctaatcaytgctctcctgagctgcctctgtttttctctggaccctctcctctcaatcccttcctgcttcccatctctgtggccttggcttcttcttaacaagcttgccacccccaacttcaaattcctgtcaatttgttgtaaacaagctacctctgtttgtgtcttgccttttcccaccagggaggtatagacatggttaaagacacggcctctggcactggaaggcctccttttcactcccagctaggcattcttcaaatccttcctatccctattttacagctgacaaaactgacttccgggggatttggttttgctcaaggacccagggtccttcaggggtaggtaggaaagatctgggacaactcccaggcctcttccaggcagaaggagaagtaggttggagaatgctagttgagggcacctgcaaaagctaaatcaagactgcctgaagcttaggaggaaggaaatgtgtgtagatttagttcctagagggcttataaataggaccattgctcatttgtcctgaaaagtcgctgggcaaccttcccgaggtgaggggtgggggcggggccacatgccctcctgaggtcatttctagcttgatgattcacacggcaaaatcccagcgtgggttcagcgcccctccccgcacccgccccgtgtactttcattttgcattatgatttttcactcaagctgatgcgaacccaaattgatgtcatttccctcccaataagctcttgaccagaaaacatctaattctccatctagctgggattttttttttttcactca

SEQ ID NO: 683963 - DNA, 2639 bp, Homo sapiens
tcaacccttcagctttggagccatctaggaaggtttagggaccagcatggctttgggaggagcaattcattccaagccaatttaatttcctctcatgatgaagtgacctggcatgcggataagggagcaataagtgtatctcctcgcctctggagggcttttaattcaataccacatgccactctcatcaacatgcagggaggcagggtctgggcagtggttcattgatttggccctaggagaatacacgtaggagctcatccaggacttgagggaggggaaggaatatggatatttctgtgatctgaatgtgtcccccaaaattcatgtgttggaaacttgatccttaatgcaatagtgttgggaggtggaacctttggggaggtgtttagatcaggagggctctgccttcatgaatggatcaatgctatcacaaaagggcctgatggaggcagtttggttctttttttgcctttccttctgccttctgcgtgggagggcacagcattcaagacaccatcttagaagcagagactgggccctcaccagacacaaaacctgccagttccttgatgttggacttatcagaatccagaactgtgagaaataaattgataaattacccaatttgtggtattttgttatagcagcacaaacagactaagatagatactaatactaatacaataccaacatcaaaactgctagcaggctgggcatggggttcacacctgtaatcccagcactttgggaggtcaaggcaggcagatctcttgaggccaggagtttgagaccagcctggccaacatggtgaaacactgtctctactgaaaatatagccaggcatggtggtgtgtgcctgtaaccctgagtaatcttgggagtctgaggcacaagaatcgcttgaacccaggaggcagaggttgtagtgagccgagatcctgccactgccctccagcctgggtgatagagcaagattctgcctttaaaaaaaaaaaaaatgctgctagcaatgcacttcactaatactcattttacactgctaatacttgtcacccagaaaacctccctcctggagagccccaggttcttcagaactcagtaatcactctttaacaaacaaagaaaatggtttcagccccactgcagcactctgacacatcttcaaaaactccacagatttccagaaagacataccttctcctggtcagtgggggttacgccctcggtcaccactgtcatctggtccttagccatcatcctctgttcctgaagctgccattctctctccccatctctgttacccctggaccacctcacatctgccatgcctcatagcatcatgaacacaaagctggttcccaaaagtgtttgtggataacggaaggggtattgcagtcctgcatatctggtcaattacaggaacacagcatcctggttcttggctgggtgcagcggctcacatctgtaatcccagcactttgggaggcaggtggatcactttaggttaggagtttgagaccagcctggccaacacggtgaaaccctgtctctactaaaaatacaaaaaattagccgggtgtggtggtgcacacctataatcccaggcacttgggaggctaaggcaggaggatcacttgaacctgggaggtggaggttgcagtgagccaggatggcactgctgcactccagccagggtgacagagcgaggctctatctcaaaatattttaaaaagtaaaaaataaataaaaataaaaaaagcaatatagcatcctggttcttgagttttctggactgtccctacaccgggggcttctcttgctctagagatgtccttgctaatcattgctctcctgagctgcctctgtttttctctggaccctctcctctcaatcccttcctgcttcccatctctgtggccttggcttcttcttaacaagcttgccacccscaacttcaaattcctgtcaatttgttgtaaacaagctacctctgtttgtgtcttgccttttcccaccagggaggtatagacatggttaaagacacggcctctggcactggaaggcctccttttcactcccagctaggcattcttcaaatccttcctatccctattttacagctgacaaaactgacttccgggggatttggttttgctcaaggacccagggtccttcaggggtaggtaggaaagatctgggacaactcccaggcctcttccaggcagaaggagaagtaggttggagaatgctagttgagggcacctgcaaaagctaaatcaagactgcctgaagcttaggaggaaggaaatgtgtgtagatttagttcctagagggcttataaataggaccattgctcatttgtcctgaaaagtcgctgggcaaccttcccgaggtgaggggtgggggcggggccacatgccctcctgaggtcatttctagcttgatgattcacacggcaaaatcccagcgtgggttcagcgcccctccccgcacccgccccgtgtactttcattttgcattatgatttttcactcaagctgatgcgaacccaaattgatgtcatttccctcccaataagctcttgaccagaaaacatctaattctccatctagctgggattttttttttttcactca

SEQ ID NO: 683964 - DNA, 654 bp, Homo sapiens
tgtggagattgatgtaacatatgaagcacctgcttcatgcagacattaacttaacacaatgtttttccagcatagttgatgcacagaagtgctaatatggaaaataaggacggtgttttaataagcatgttataatcttttaaacatacattatcttggagcttgcctgaaatggattttgagtgttttcaagtcttctctggtgatgataggtactrctgagttaaccacagtcttttggttaggctacagttagttagcaaagagctacatgtagctatgtaggtagtctgattttgtcctcttatcaagcatagcctaataaactgaatggattgcccaagctgatttggatgttttccctcagttacaaatcaggaagcatgttttgcaggctgttgaagaaatgtggataacaggtgactggacttgatttccttctttaattcttccccaagcataacaagttttgccctcattagctgcattttcactgtgtggtttaattaggttttccttacaagattcagcactaattatgctttttgcttttctgtttttgaagagtattctttgacacttttgtttattagtgtctttgggagtggggagggagggcatttggggaaggaatgctgatatgactgggagact

SEQ ID NO: 683965 - DNA, 1131 bp, Homo sapiens
  misc_feature 355, 356, 357, 358, 359, 360, 361, 362, 363, 364, 365, 366,367, 368, 369, 370, 371, 372, 373, 374, 375, 376, 377, 378,379, 380, 381, 382, 383, 384, 385, 386, 387, 388, 389, 390,391, 392, 393, 394, 395, 396, 397, 398, 399, 400, 401: n = A,T,C or G
  misc_feature 402, 403, 404, 405, 406, 407, 408, 409, 410, 411, 412, 413,414, 415, 416, 417, 418, 419, 420, 421, 422, 423, 424, 425,426, 427, 428, 429, 430, 431, 432, 433, 434, 435, 436, 437,438, 439, 440, 441, 442, 443, 444, 445, 446, 447, 448: n = A,T,C or G
  misc_feature 449, 450, 451, 452, 453, 454: n = A,T,C or G
aaaaaaaactctattcaagaaaaggcagcaagcctgcatcagattagagcataatattacacagccattctttgcaagactgttgcctcttgcccagaactgcaccatttcttacagcaaaaatatcagtatgagatgatattgatacctgagatacctgatactcttttcaacctgatcacctggcaatccttctctctctctctctctctctctctctctctctcacatatatccatatttcactttaataatgagtttctacatttagggcttcctaaaaaatgaaagaggtttacttttgaaatggaaattttttcatagtgaaaatatatatttaggtacaatctggatnnnnnnnnnnnnnnnnnnnnnnnnnnnnnnnnnnnnnnnnnnnnnnnnnnnnnnnnnnnnnnnnnnnnnnnnnnnnnnnnnnnnnnnnnnnnnnnnnnnnatattttctgtattataaatgtgtttataaaactataaatatgtatatgtgtataaatatatacatgtacacatttgtgtgtgtatgttccctttctagatatctgtgatatttactttgttataaattacattttctatgtgggtaaacatagatgcaatggatcaaagataatagattcagattcagttgtctaagttcttatgccatttacaaatggctttgtgattcattttaatatctgttaaaactaataatagccaacattattgagtgctaagtgccaagcatgttgctaagtactttaatccatacatttcaaagtagttgctattataggccccattacacacatgaggaagctgaggcttagtagtcaagtaccttggccgagtcctacaatwacacatgacagagccaaggctcaaactcagatcagtctgatggcaaagccacattattattcactccgccatactgccaccttcacacccttaatctctgtgctacttccctctcttctcttttctagaatatcattgataaaccccctgaagtgttctttcctattaaatttagaattaagaaataatgttcttaagcatcttatttggattttgattggagttgcatttaacctataaaaatatttgggaagtaattgattttttaataaa

SEQ ID NO: 683966 - DNA, 1131 bp, Homo sapiens
  misc_feature 355, 356, 357, 358, 359, 360, 361, 362, 363, 364, 365, 366,367, 368, 369, 370, 371, 372, 373, 374, 375, 376, 377, 378,379, 380, 381, 382, 383, 384, 385, 386, 387, 388, 389, 390,391, 392, 393, 394, 395, 396, 397, 398, 399, 400, 401: n = A,T,C or G
  misc_feature 402, 403, 404, 405, 406, 407, 408, 409, 410, 411, 412, 413,414, 415, 416, 417, 418, 419, 420, 421, 422, 423, 424, 425,426, 427, 428, 429, 430, 431, 432, 433, 434, 435, 436, 437,438, 439, 440, 441, 442, 443, 444, 445, 446, 447, 448: n = A,T,C or G
  misc_feature 449, 450, 451, 452, 453, 454: n = A,T,C or G
aaaaaaaactctattcaagaaaaggcagcaagcctgcatcagattagagcataatattacacagccattctttgcaagactgttgcctcttgcccagaactgcaccatttcttacagcaaaaatatcagtatgagatgatattgatacctgagatacctgatactcttttcaacctgatcacctggcaatccttctctctctctctctctctctctctctctctctcacatatatccatatttcactttaataatgagtttctacatttagggcttcctaaaaaatgaaagaggtttacttttgaaatggaaattttttcatagtgaaaatatatatttaggtacaatctggatnnnnnnnnnnnnnnnnnnnnnnnnnnnnnnnnnnnnnnnnnnnnnnnnnnnnnnnnnnnnnnnnnnnnnnnnnnnnnnnnnnnnnnnnnnnnnnnnnnnnatattttctgtattataaatgtgtttataaaactataaatatgtatatgtgtataaatatatacatgtacacatttgtgtgtgtatgttccctttctagatatctgtgatatttactttgttataaattacattttctatgtgggtaaacatagatgcaatggatcaaagataatagattcagattcagttgtctaagttcttatgccatttacaaatggctttgtgattcattttaatatctgttaaaactaataatagccaacattattgagtgctaagtgccaagcatgttgctaagtactttaatccatacatttcaaagtagttgctattataggccccattacacacatgaggaagctgaggcttagtagtcaagtaccttggccgagtcctacaattacacatgacagagccaaggctcaaactcagatcagtctgatggcaaagccacattattattcactccgccatactgccaccttcacacccttaatctctgtgctacttccctctcttctcttttctagaatatcattgataaaccccctgaagtgttctttcctattaaatttagaattaagaaataatgttcttaagcatcttatttggattttgattggagttrcatttaacctataaaaatatttgggaagtaattgattttttaataaa

SEQ ID NO: 683967 - DNA, 1504 bp, Homo sapiens
cacacacacatatacatacacacaccaataatgcaacactcaaaagttatcaggttataagaaaaaagattaatagaaaatggagataattctgatccagctttctttttaaaaaagaagctatattttttatataaaacattctcttcagtcaaaagtcttttcaggaaacaaaagttttacaaaattattttctgtgactacatgtaccaagcgttttgtcaattctaatcatttcatttaaaaaatcagaaaaaaagttaatttttccccaaattcacacaaaaagacaactattagtttaccaaaaatttcacttctggctaatgaagtgttgtgtacgctcagcctagaaaagctgagagcaaagcaagtgttaaagcagtggaatctgaccactatgaaaagatacgcaatattaaagctggatattcagttaaggagaattcatgagggaaaraaacagaccaatccacttgcaagatatgagatggcatatctagaatagatggttaagtatttggatgtggattacagctaatctaaaaatacataggtgggtatatatttaagctaagtacatttaggtaaatgcaaaaacgtcagatgcatttattatatctttgctaatgtgtaaaatgtgtaatttatactagtgttttgcttgagttaatgctttcaaagagaagtaagcaaattagaaggctcatacaaatgtagcagagaaaactgaaacagaaaaaaatagtttttctaataagacataagaaataactagggatataaaatgaaagctggctaaaaaaataagtaccgattgctttaaaaatctgtcctaatagaataaatgaagaaaagtaaaatcaacagaaacagtaataagcaaagttgaagataaaaacttggtgagttgagtatttctaagcaattggaatgagggaaatgcatgtgaatcacaaaaggcataaaaactaggagccagcatatgcttggcaatcttgtctgtgtagctttactgaactgatcaaaacactgccaatttattttgttttgctttctgccattgtaatggatagttactgagcaattgattgtatcgttgtgcacttggttggatttagtcattaagatggatgaaatgattggagcaagtgtttcatggtctggcgatcttagtcaccttaacgacccaattgaattgaccataaagaagcctgactgccatgcattctctccatcttcaatggatatattcttatgatccataaaggacagttttcatgttgcctctatttcttaaaaaggccctgaaaactaagttgacactaaagaaagtctaaaatgaacataaactaataacacaactatattaagacataaatctgtaagcatattgtagataaagaatttaaaaatagcacctacaactgatatgctttaaaaaagaaaaaggtacaagataaaacttccactatggaatcatatggaatcattaaattgagat

SEQ ID NO: 683968 - DNA, 2490 bp, Homo sapiens
tgaagacttagaagttatttttttgttttccaccttttgactcttactcatcttatttttcaattaggctttatcatcaagaccaattttagacacaatatctcctctaatattatattacaatcctttattcattcaaaaaacatttattaataatctaccatgagccaagaactatgctgggtactggaaatacagaatttttttttttttttaaagaaacactctttaccctaaattagctcatagtatagtgtggtagacatatgtgtgtcgatttaaaagtctgtattctagaatgtgctcttaaataattttacttaatctcaggtagtattttcctaattgttcaagaatatttcccagtataggcttacactaatgtttcttcttgtatagatgtgactatcaacaagccttggaggtttgggggataaattttgtaaataacagaacatccatagatctaaagacttaagtaccacaactccaaaagatttttaagaattaaatgttaatatttataactatgcctgccacatagtaagcacttaacattagttattacttgttattgttgatgctgttgttgataatgatattttatctacattaagtgagtcatatacctaaatagctttttgtggtgattcttaaaggactagtttctggattttaggggtatatgtgtgtgtttgtgtgaatgtatgcatacacatctgaagttcaatgaaaatacaattgattaactgagaaatgagttatgaatgccactgacttaagctttgcatgtcctatgctctcaacactctttaatgctaatatacattgtttcttgcagtcttggaactcagaggtgtaattagccttatcttacagatgtggctaataaaggttgaataaaaatttcaggctgcctctacttagaaaccagagaggctcatcatttgcaaggagctgaaatgtagacatctcaatacctagactcagtcactttttatcttcaaggaatgacgtaaagatgcaatggcaattacaaattatcctcagtgatggtggtatccacggtctgtggctatggtatctacagacccatgctctaatcagttggtggttttgccttgactgtgtttcctgggtccactttcacttggttgctgcctaatttttgagcctgtttctctagccttgccattaatactgtgagctctctgatattatcctaatccatttcaggttctattgcttgcactgaaaaatcttactgatgtaaccctgtagtcagaaatcaggagcaagctgctaatatttttcacctggattattgcaatagcctgggagatttgcactcactgttctgtctgcctaaaatactttgttgcaacatattcacgagtagcttccttacctcttcaggattctactcaaactcacctgtttacatcttatcaaggagttctctcattaccctatgtaaaatggcaccccaccctaacactccttatctgtccccttttgttctctttcattttattttctccagcccttgtatctactcaagatacttattacaatctgctggcaccagtggtacgtaaactccatgagggctccgttactcttttggtgacttatatttcctggaacctagtacagtgcctggtacatatgaggtactcaacaaatatttattgaatgaatatatgaatgcacttaaattatattcagaagtaataataagctaaacacgtgctacagctaatgcatccatttccacctgcctccacttccttcctgattgcttttccttaatctgaaccagcagtaacccatatatttctttcaacctagctgtcagtctaaggtatgtgatgcagcggatttcccaagagtgatgaaagaagaatttggtcctgctcaccactacaaaatgcctatttatttctccttttatattttaattgtttaaatatttggggaggattgtcctgctgtggtaaatttatactcattaaattgtcaagtgtaactgtattatttatttatttattgcaggcactgtaggggaaatgcttgctttgccactggcaccatgtggctttgagtgattattgtattttacctgatagtttttggacaggactatcagggtgatgaatgggtgagagtgggaggagttcaaacactggttgataaaaggataacaaacctgtagcaataagtcagtcaccgtgaagcattctaagcactgaataagacagagcatccattccacaccctatttccattcccagttaatcttcaaagagtcaacatggcaaaaacattccaagataaaaatagcaagatcttctrgaaaagatttaagtttcaaggcaaaaagaaaaatcctttatggttactgagtatgctgtgaatccacatagttgtggttgtagctaaaatgctgcatatttcttttctcagcatcagtgatttataaatagagaa

SEQ ID NO: 683969 - DNA, 1450 bp, Homo sapiens
aagtactttgaaatcaattacatggctttaaagaagcaaagatcaattttttgaaagtatagtaagttttattgagtctaaagcacattattaatgataaatagtagctaatccatgagacactaccgtgtgcagacactattgcaagtgttttacttgtgttaattcatttaattctcaaaacaactattatgaggtagtaccacttttattcccattgtagaggtgaaagagttaatgaagagagatgttaagtaacttcagcaaggacacacagctcctatgaggcagagacgatgtttcaacttgaggagcctggttcaaagtccatgttttctatcactattaccatcattaggatttgggccgtatgtaccacttatttgaaaaaaaattgagctcatttatcttaaagcttgccaaggcattcatttccatataacaaagatttatttagttcatagtatatgcaaggcactgtcctacgtgctttacacaaagctttacacaaatcagctctgatattctgatagacacctgacctgatactctgatggacatctgacttgtcagagagctgaagacttacaaaagtaccagttgccatatactgatataaatatttctaagtaaataattggataactcattccatcaaaaattagcgtgcttgtcctgttactaattatttgaaaccaattctcctagccttcatctgcttctttttatcctcctgtgctcatggaaaaacgttccaaagagtcttaatttttttttttgtcctttctgggccaactgctactaacatatagatggcaagatgctgttaaagaataaatcagaaaagcttcttaacaacacaacatgcttcctgaagctagtgcttgagttataacactgtgttaacagcaagttcagatacatttaaaaacttttaaaatgtcaactgttgaggttagwgatagtgctctgtattattagatataagcccagttcaagtcataatgcaaatcccatgcttctccattcttgcacactgaaggtccacttatcagttctagaatgttgaagccctgagtcttcagggaagactgttctttttcactagaagaatctcacatgctccaggtattatatgaggtaagattttggcattactggcagctcttcatatcctgtggaaaatgatgttcctgtcttcaattgagggaaaccacttatttatcttattaggaagtatcacaagcagtttcccttgtgagtaaggaataggtgctgtctgtcatttgctgtgtcttcttccctcatggtagagagggtttggtcctacgtatgtaaaggccacctcaggatattagatttgtctgggtctgaagggcttcttgacatctagcaaaagcactaatccaaagtaaatgaatttaaacaatacaaaatacgcaggagtatc

SEQ ID NO: 683970 - DNA, 1358 bp, Homo sapiens
ctgatataatatgtattttacatcctttgtttatactaatgcttctgtttcagaggctatatgttttcttgtctattgtctttcttctgaagaagttgtaccatttggagtttatttattttagactatgatttcatgtttctccaggagcatcagctgctttatcaggcagcatgggctatggaagggtcaaagggcaggtgtttacttgtgtcagtcaaagtgaatttaaggaacagattggggatgaatcctagggtagagagtcccagagcccacaaaacctattattgatcattctcactcattgactttctatcagttgacttttccagtgggaatttcactgacaaattcttaagagtgaagcagcactagaaggaagaaggttcttttaattttaatgcaacagccctggagatgtggagggtaaggtgagaagacagtacctgaaagcagctaattagtgctaccttttccagaaacttctctcctcagcaggctttttctcctgtcctttcaaaattggtggtctgaattgctaagactaatttctggtatgataagaaggtaaacattgtctcaaagcaatgtagggcaaaacatggtgttgggagatgtaagagaaaaacttaaaaagcctttctcttaactatcctctcattctactctagacttcagccacctacctccctacacactctatctagttcaagttagctccagtctcctagttctggcctagaatccaggtttacttctttcatctgtagtgtgtctagggttgatttggagaaaggaacaagtgtcctatgctagtacaccatttttatagacatgaaagcctatgtgtgtgtgcatatgtatgtacttaccaaatgatcttatttttgaaatgaaaagtgtataaatcatttgttagtgaagatatatatttatttatttaataagtccttcattagtgaatagatatatttattcatgtttgtataaatgtaaataatgtaaacggatatatagaagtttaaactttgatttgcttaggagaaaatcagggagagattgttagaattttctttgttgggaaatagctcacataactttgtagcttgaattacagttgacccttggacaacatgggggttagggttgatgrccccacatagtcaaaaattcatgtataactcgcgactctctcaaaacttaactatgcatagcctactgttgaatggaagcctttttgataagacaaagagttgactgacatatatattttatgttatgtgtattatatactgtattctcacaatacaataagagaaaagaaaatgttattaaaatcttaaggaagaaacaat

SEQ ID NO: 683971 - DNA, 1358 bp, Homo sapiens
ctgatataatatgtattttacatcctttgtttatactaatgcttctgtttcagaggctatatgttttcttgtctattgtctttcttctgaagaagttgtaccatttggagtttatttattttagactatgatttcatgtttctccaggagcatcagctgctttatcaggcagcatgggctatggaagggtcaaagggcaggtgtttacttgtgtcagtcaaagtgaatttaaggaacagattggggatgaatcctagggtagagagtcccagagcccacaaaacctattattgatcattctcactcattgactttctatcagttgacttttccagtgggaatttcactgacaaattcttaagagtgaagcagcactagaaggaagaaggttcttttaattttaatgcaacagccctggagatgtggagggtaaggtgagaagacagtacctgaaagcagctaattagtgctaccttttccagaaacttctctcctcagcaggctttttctcctgtcctttcaaaattggtggtctgaattgctaagactaatttctggtatgataagaaggtaaacattgtctcaaagcaatgtagggcaaaacatggtgttgggagatgtaagagaaaaacttaaaaagcctttctcttaactatcctctcattctactctagacttcagccacctacctccctacacactctatctagttcaagttagctccagtctcctagttctggcctagaatccaggtttacttctttcatctgtagtgtgtctagggttgatttggagaaaggaacaagtgtcctatgctagtacaccatttttatagacatgaaagcctatgtgtgtgtgcatatgtatgtacttaccaaatgatcttatttttgaaatgaaaagtgtataaatcatttgttagtgaagatatatatttatttatttaataagtccttcattagtgaatagatatatttattcatgtttgtataaatgtaaataatgtaaacggatatatagaagtttaaactttgatttgcttaggagaaaatcagggagagattgttagaattttctttgttgggaaatagctcacataactttgtagcttgaattacagttgacccttggacaacatgggggttagggttgatggccccacatagtcaaaaattcatgtataactcgygactctctcaaaacttaactatgcatagcctactgttgaatggaagcctttttgataagacaaagagttgactgacatatatattttatgttatgtgtattatatactgtattctcacaatacaataagagaaaagaaaatgttattaaaatcttaaggaagaaacaat

SEQ ID NO: 683972 - DNA, 1358 bp, Homo sapiens
ctgatataatatgtattttacatcctttgtttatactaatgcttctgtttcagaggctatatgttttcttgtctattgtctttcttctgaagaagttgtaccatttggagtttatttattttagactatgatttcatgtttctccaggagcatcagctgctttatcaggcagcatgggctatggaagggtcaaagggcaggtgtttacttgtgtcagtcaaagtgaatttaaggaacagattggggatgaatcctagggtagagagtcccagagcccacaaaacctattattgatcattctcactcattgactttctatcagttgacttttccagtgggaatttcactgacaaattcttaagagtgaagcagcactagaaggaagaaggttcttttaattttaatgcaacagccctggagatgtggagggtaaggtgagaagacagtacctgaaagcagctaattagtgctaccttttccagaaacttctctcctcagcaggctttttctcctgtcctttcaaaattggtggtctgaattgctaagactaatttctggtatgataagaaggtaaacattgtctcaaagcaatgtagggcaaaacatggtgttgggagatgtaagagaaaaacttaaaaagcctttctcttaactatcctctcattctactctagacttcagccacctacctccctacacactctatctagttcaagttagctccagtctcctagttctggcctagaatccaggtttacttctttcatctgtagtgtgtctagggttgatttggagaaaggaacaagtgtcctatgctagtacaccatttttatagacatgaaagcctatgtgtgtgtgcatatgtatgtacttaccaaatgatcttatttttgaaatgaaaagtgtataaatcatttgttagtgaagatatatatttatttatttaataagtccttcattagtgaatagatatatttattcatgtttgtataaatgtaaataatgtaaacggatatatagaagtttaaactttgatttgcttaggagaaaatcagggagagattgttagaattttctttgttgggaaatagctcacataactttgtagcttgaattacagttgacccttggacaacatgggggttagggttgatggccccacatagtcaaaaattcatgtataactcgcgactctctcaaaacttaactatgcatagcctactgttgaatggaagcctttttgataagacaaagagttgaytgacatatatattttatgttatgtgtattatatactgtattctcacaatacaataagagaaaagaaaatgttattaaaatcttaaggaagaaacaat

SEQ ID NO: 683973 - DNA, 950 bp, Homo sapiens
cttatgatctctacctcaacttcccgtagcatattgggaaagggacctgaaagaaagaaaaaataaatagatgaagaacttctacattgctgccatgatagttaattgtgtcttacaaagaatggaccagtgataaaacctaagtcttgaagttgtaagattctggactgaatgacagtgctcagaatcaagttacatttattgggtggcttctatttactaggtaccatrtttggtttgtttacttctgctaccttatttaatccttgcagcagccaccaaagaaagacataaatattctctttttcagttgaggaaactaaagcttacctggttaggagtcttatcatgatcacacagttaaggaataatgttagaagctttttaacttgatgtgatctttgtaaaaccagaatatttcttaccacctgggagaatatgctacagcttaccttaaccttacttggaaatcttcattactttacaaaggacacagctattttgggaaccgtgaatcctgaggaaaagcagcatagaacactactgtactaccagatttaactttaatacagatgcaatgctatcacttcataggaaaaaccacgcttactctgataatagcttcacttgctatccaaaacaaataccagagtaagtaacacataaaggtagcttatattttattaactaaccacacacttattgattgcatgtaacattgttttaactattatattcttctcatttctttaaaataggagcaacttctattttaaagactgtactaatctttcatataaagacggatgctttgtttacaacagggtcaaagaattgagaggataagggagggcagtagtactgatttgagcgatgaattagcgtaattatgtgcttaagggccttgaatttagaaggagcagatataagtttgaacactatttgcacaa

SEQ ID NO: 683974 - DNA, 950 bp, Homo sapiens
cttatgatctctacctcaacttcccgtagcatattgggaaagggacctgaaagaaagaaaaaataaatagatgaagaacttctacattgctgccatgatagttaattgtgtcttacaaagaatggaccagtgataaaacctaagtcttgaagttgtaagattctggactgaatgacagtgctcagaatcaagttacatttattgggtggcttctatttactaggtaccatatttggtttgtttacttctgctaccttatttaatccttgcagcagccaccaaagaaagayataaatattctctttttcagttgaggaaactaaagcttacctggttaggagtcttatcatgatcacacagttaaggaataatgttagaagctttttaacttgatgtgatctttgtaaaaccagaatatttcttaccacctgggagaatatgctacagcttaccttaaccttacttggaaatcttcattactttacaaaggacacagctattttgggaaccgtgaatcctgaggaaaagcagcatagaacactactgtactaccagatttaactttaatacagatgcaatgctatcacttcataggaaaaaccacgcttactctgataatagcttcacttgctatccaaaacaaataccagagtaagtaacacataaaggtagcttatattttattaactaaccacacacttattgattgcatgtaacattgttttaactattatattcttctcatttctttaaaataggagcaacttctattttaaagactgtactaatctttcatataaagacggatgctttgtttacaacagggtcaaagaattgagaggataagggagggcagtagtactgatttgagcgatgaattagcgtaattatgtgcttaagggccttgaatttagaaggagcagatataagtttgaacactatttgcacaa

SEQ ID NO: 683975 - DNA, 1837 bp, Homo sapiens
ttattttagattcagggataaactagtgtttcagggtttgttgtataggttatttcatcccccaaatattaaggctggtacccaatagttgttttttctgctcctctccctcctcccaccctccaccctcaattaggccccagtgtctgttgttctcttttttgtggtaacaagatttctaattagatatgattggctaaatcttgggaggtaggagaagagaaccttagtaggtccttgtctccatttcaaagtgcaggaaaataaaaaaatacaatcaaatatctattaatttactttgatgccttacaaacccacaatgttattgtgaaatgtattcaacttatgagagtagacagctcattgcacagtattctgcacactattgggctttgaatgattcatgatgaagtagcaaatcactcccaagctctgggagtaggaggtgttaagtttagttaagattatagaggtaagcgtaatggtgctactcaagtagtagatgttttccttttctacttttatcaggaagtggctttaagtcttaaaggatttaattcccctttatactcatcaccatttcctatagaacaatgcagatccctcagagatgaggaaaatttgattatataatctgagattataacgatagtgyatccacctagactcaacatcagaattttagagtgtatattggagggaagccgacttctataaaaattaactgattagactcatatgacttcataataagagcttgaaacaaaaattagaaatttgagggcagattaaactctcatatgtaaaaagtcaaccaatagacataaaaatgggaaagtcatatcaggatctaaacatctatgtttgtagtttattgtcaaatttataaagtttcaggttgaagaacagctccatagatacacggatcagagggatcccatttaatatttagggccaggtaaagaataatcattcagtttattcatttaaggctctttctgtttagttgcatgatgcattgcaaaagcttatcattactagtgcttgcaaattatacactttatgaatcaagcagccatagcagaaactacacatatgaaagaaagcatttgaaagaaaaaatgatgtaaaaatatgctttaataaatttggaaaataaagctctaaccagtttccaaaatagtccatataaagacaataaatataggtaccgtgtaatagtaatggtgctaaagtttttgaaattcaccacatctgtttcttatttgtttgtttttgccatatttataatgggacatctgatttcatctcttatttattttgattttgtattttatttcatatctctgttcaaatgaaggataggtttatattttttgctttgttgttttactgagatactcaccatctaatttaagtgctccccatccagtgacaaacactttactcttaggcaaggcttcaaaagtagcttctggaagacagactctgtgcacctcattggaaaatatgatgggggtgaagagcttcactacagcgatatcatcctcgtgtttatgggcagcatagttctcatgaataataattgactccccctttcttctcattagtgagggattcgggttattccaaaactagccatccagagtttgggtttttcttcactgatcacagagtaaaaggaatacagttggttcatttctaatttaaatttgcccaggactgtggatgggcaggggacataaatgtgggagaagggcaaattttttaaggtaataattgattgggaccatcccaccttcttatctgaggcttctctcctaagactgctttgctt

SEQ ID NO: 683976 - DNA, 1360 bp, Homo sapiens
tggggaaagagaaatgctaaatgtgttgagttttgttctttgatttgtaaacatcttagtgatattcttgaacttacagctgttcagaatgtgttctgcttgtgctgcattcatatctgaaaaaaaacccaggagatactcagtgatgaaattattataacttaaaatactattcttacatgatatgacctttttctggctgagaggaactgcataagtcagaaatttttaattcaaaggcaaaagaataaaatcctacataaaggagaagcctggatgtaaattgaactcttctgactgtatgtggactccaggaaaatcctggtttctggttataagaycattggcttagagaaggatacagtttgccataaaggaaggagtcttctagttaatcaatgccaaaacaatattttaaactgtaagttaaaacagaagagtccaagactagtcttacatgtgcactactatatgtcaggaaaccatttccttctgtccccattaatgcatcttagaagcctggcaatctacacttggtccatgtatgctccctgtggaatcaaaattcaccaatgtgctaacaaaacctatcttgttagtctttttttttcaaaatgtgaaataaagaaaaccataatcagtggctgtttccccaaattatttgaattgctctgtatcctaattagtataatgagcaatctagacccacattttgttaagatgaaagccaatgtggagttttggtgagcctgaaaactgatgagtctttaatttaggtaagactctaaagcggtacattgagttcatctgcaggaaactatacttaaggattttatcagaataaatcccttagaattaaattttgccactaatggcttccgtggcttctagaataaaccaaactttctacctggacctacatgatatggtccttatttatgtctctgatggcaagttgccctgctactgctcttagcatgactcaatggccaccttggccttcctgtttcttaactgtgcaaaggtattcctgcctgcaatctgtgttctagctgtgccttttgccaggaatgcttatttcccttggcctttttatggttggtttccccttgtcactcagatctcagctttaaaataccctcctcagagaggacttccattacaaccaaatctaaggtagctttttactctctctgttctctgcatggagtttcaaattatctgatattaccttgtttattttttatctagttattattttccttgccacaattagaatattagttctatgaagcagagactttaatttttggcacaaatagtttctccataaatacttgctgagtgaataaataaatgg

SEQ ID NO: 683977 - DNA, 1360 bp, Homo sapiens
tggggaaagagaaatgctaaatgtgttgagttttgttctttgatttgtaaacatcttagtgatattcttgaacttacagctgttcagaatgtgttctgcttgtgctgcattcatatctgaaaaaaaacccaggagatactcagtgatgaaattattataacttaaaatactattcttacatgatatgacctttttctggctgagaggaactgcataagtcagaaatttttaattcaaaggcaaaagaataaaatcctacataaaggagaagcctggatgtaaattgaactcttctgactgtatgtggactccaggaaaatcctggtttctggttataagaccattggcttagagaaggatacagtttgccataaaggaaggagtcttctagttaatcaatgccaaaacaatattttaaactgtaagttaaaacagaagagtccaagactagtcttacatgtgcactactatatgtcaggaaaccatttccttctgtccccattaatgcatcttagaagcctggcaatctacacttggtccatgtatgctccctgtggaatcaaaattcaccaatgtgctaacaaaacctatcttgttagtctttttttttcaaaatgtgaaataaagaaaaccataatcagtggctgtttccccaaattatttgaattgctctgtatcctaattagtataatgagcaatctagacccacattttgttaagatgaaagccaatgtggagttttggtgagcctgaaaactgatgagtctttaatttaggtaagactctaaagcggtacattgagttcatctgcaggaaactatacttaaggattttatcagaataaatcccttagaattaaattttgccactaatggcttccgtggcttctagaataaaccaaactttctacctggacctacatgatatggtccttatttatgtctctgatggcaagttgccctgctactgctcttagcatgactcaatggccaccttggccttcctgtttcttaactgtgcaaaggtattcctgcctgcaatctgtgttctagctgtgccttttgccaggaatgcttatttcccttggcctttttatggttgktttccccttgtcactcagatctcagctttaaaataccctcctcagagaggacttccattacaaccaaatctaaggtagctttttactctctctgttctctgcatggagtttcaaattatctgatattaccttgtttattttttatctagttattattttccttgccacaattagaatattagttctatgaagcagagactttaatttttggcacaaatagtttctccataaatacttgctgagtgaataaataaatgg

SEQ ID NO: 683978 - DNA, 3059 bp, Homo sapiens
  misc_feature 266, 317, 318, 319, 320, 321, 322, 323, 324, 325, 326, 327,328, 329, 330, 331, 332, 333, 334, 335, 336, 337, 338, 339,340, 341, 342, 343, 344, 345, 346, 347, 348, 349, 350, 351,352, 353, 354, 355, 356, 357, 358, 359, 360, 361, 362: n = A,T,C or G
  misc_feature 363, 364, 365, 366, 367, 368, 369, 370, 371, 372, 373, 374,375, 376, 377, 378, 379, 380, 381, 382, 383, 384, 385, 386,387, 388, 389, 390, 391, 392, 393, 394, 395, 396, 397, 398,399, 400, 401, 402, 403, 404, 405, 406, 407, 408, 409: n = A,T,C or G
  misc_feature 410, 411, 412, 413, 414, 415, 416: n = A,T,C or G
tgcacacacactggacgccggatcacagaccctgaaatcatgctcagtcttcctcacatgaaggacaagtrgctgcatcttgagatccgtccctgtgatggacacatggggtgagcacaggggatatacacagaacactatagcctgaggtccgaccctgtgatgaacatatgacaagggtacagaaatctggagctcgagatccttccctgtgataggcacatgaggtgtgtgcagaaggaagggggtgccgcaccccctctgtnagcaggagccaagccccctggttgctgggactagcaaggggacttggggtnnnnnnnnnnnnnnnnnnnnnnnnnnnnnnnnnnnnnnnnnnnnnnnnnnnnnnnnnnnnnnnnnnnnnnnnnnnnnnnnnnnnnnnnnnnnnnnnnnnncacacaccacacacaccacacacgcacaccatacacacaccatacaaacacacaccaccacacacaccatacaaacacacacaccccccaccccacacatgcaccacacacaccacacaagcacaccgcacacaccatacaaacacacacacccccacacacaccacacacaccatacaaacacacacaccccacaccatacacacaccccacacacacacccacacaccacacacatcacacactcacaccacacacaccacacacgcacaccacatacacaccatacaaacacacacaccccacacacaccccacacaccatacaaacacacacacacccacaccccacacacaccacccacaccataaaaacacacacacacaaatcacacatgaatcacacacaccacacacaccagtcacacaccacacaccacacataccatacacaccacacacacagacacaccacacacatcacaccacacacacacaccacataccacacacacactacaaacacacaccacacaccacgcacacccgacacacacacactctttcctctcttctctgtaggttagacacctgttcaaagctgaaacaaacgcagttcagcaacttgaaatgtgaagtgtggacttaaaggcttagtcctttttcttcatatttgaggggccctcacctgccaatgctccccagaatttcatttaatgaggtgcccccaggtctgccacatcccttcttcttttgagaaggtcctgaggtcgctctgtccctctaagaacaggagtcagggaaactcccgggacacaccgctcctgcatgaaggcgtgcagtgggatccacgtgtgggtgcagctttgagaaacgtgacagacaggagtgtccatgtggaaattatgagatcatcgtgaacacacgggaaagaacggacgtaaagttcacagctttaataattaaatcatttccctccaccaatgccggtgctgcatctataccgaaaagaggctgagcctgtctggctggaaaatcagtgcccagctgcggtttggaagctgagcccacagcccagccgcttacatgccacgattacgtttagactcacttcctcgggacctggaaacttaaagccgacctccagacaacctagcataacaacaaatggaaaaatcaaagtgcatttggcagagtgcgcttgaagtattttctatgcacacgtttattcgttgagttgtttaagcactggggcttcagagtgatttttaatgaagaatctgcgtgttcgtgtcaggaggccaaggggtgtctccagaacgggtgctgttcccggtgtgtttgcggtctgcggctcatctcattctctttagagacccctccttgttcactcagggaggggttagtttatttaagcagcactcgcatgccctggctccataagggaggatttgcaggtattaatccgagctggggggtgactcctgcccagttgagcaaatgaggtgagtggggtgcgggctggcagggcttccacgaggcctcctccctcgcaggggctgacccgagtcccactgttggagcgtggatttctgacagcgaggaaaagttaacccagctccctaccccgtctgaataaagttattacggcagatcaaagtaattaacagtagcttagcgccattgattctgtggacccgccttgaggttaggaggcctttcctgagcaactcacagcagtgctctgcccggctcgggaattctctcccttgcacgtttagacaacgcacacgtgtgtgacaagaaaacgctcgcgtgctctgatgcgctgtttaagtggacactcgtaccttttctctttttcatattttgctcctgtccgtattcccactttacaacttttctccagatacagattcagcgatccatacaccacactgcttagctcttgactgaattccatctggatccaagtcatcttgtatacattatccattacactaaatttacccctttatatggagcccatttgttttctaagtggaatgctctcccagctgcagtgagtttctgaagcaaagggccccatctgatatcatcattttatgtttcaggggcattcagatatgaaagcagtttgccgcatattaacctcaatcagcgttttcagacacatgtacttcctagactggcttagtgtctcagagatgactatgatatgaatagcaaaggaattaccacaaagcttttctgttgcaataatatatacatatttataatttcattaaaccatagatttaggaaagcctttaaaaactcattcaactcacttctccacttgtaagctgatgtttgaaaacacagagtaatagcttccatttattgagtaagtggtaggaaggaaacgtgggattcagcactttaggcatggtttcttatacttagaatggccctaccaggtggctatgaagaccccactttacagacgagaaaactgaggccacggagaaagtgctgggcccacagccacaggccagtagggcagacccagcatttagactccgccttcaggccagtgtccacacatttaaagcaaaatgtcttagcctgtgaccttcctgtcacgcgcacatatgagtagaca

SEQ ID NO: 683979 - DNA, 3059 bp, Homo sapiens
  misc_feature 266, 317, 318, 319, 320, 321, 322, 323, 324, 325, 326, 327,328, 329, 330, 331, 332, 333, 334, 335, 336, 337, 338, 339,340, 341, 342, 343, 344, 345, 346, 347, 348, 349, 350, 351,352, 353, 354, 355, 356, 357, 358, 359, 360, 361, 362: n = A,T,C or G
  misc_feature 363, 364, 365, 366, 367, 368, 369, 370, 371, 372, 373, 374,375, 376, 377, 378, 379, 380, 381, 382, 383, 384, 385, 386,387, 388, 389, 390, 391, 392, 393, 394, 395, 396, 397, 398,399, 400, 401, 402, 403, 404, 405, 406, 407, 408, 409: n = A,T,C or G
  misc_feature 410, 411, 412, 413, 414, 415, 416: n = A,T,C or G
tgcacacacactggacgccggatcacagaccctgaaatcatgctcagtcttcctcacatgaaggacaagtagctgcatcttgagatccgtccctgtgatggacacatggggtgagcacaggggatatacacagaacactatagcctgaggtccsaccctgtgatgaacatatgacaagggtacagaaatctggagctcgagatccttccctgtgataggcacatgaggtgtgtgcagaaggaagggggtgccgcaccccctctgtnagcaggagccaagccccctggttgctgggactagcaaggggacttggggtnnnnnnnnnnnnnnnnnnnnnnnnnnnnnnnnnnnnnnnnnnnnnnnnnnnnnnnnnnnnnnnnnnnnnnnnnnnnnnnnnnnnnnnnnnnnnnnnnnnncacacaccacacacaccacacacgcacaccatacacacaccatacaaacacacaccaccacacacaccatacaaacacacacaccccccaccccacacatgcaccacacacaccacacaagcacaccgcacacaccatacaaacacacacacccccacacacaccacacacaccatacaaacacacacaccccacaccatacacacaccccacacacacacccacacaccacacacatcacacactcacaccacacacaccacacacgcacaccacatacacaccatacaaacacacacaccccacacacaccccacacaccatacaaacacacacacacccacaccccacacacaccacccacaccataaaaacacacacacacaaatcacacatgaatcacacacaccacacacaccagtcacacaccacacaccacacataccatacacaccacacacacagacacaccacacacatcacaccacacacacacaccacataccacacacacactacaaacacacaccacacaccacgcacacccgacacacacacactctttcctctcttctctgtaggttagacacctgttcaaagctgaaacaaacgcagttcagcaacttgaaatgtgaagtgtggacttaaaggcttagtcctttttcttcatatttgaggggccctcacctgccaatgctccccagaatttcatttaatgaggtgcccccaggtctgccacatcccttcttcttttgagaaggtcctgaggtcgctctgtccctctaagaacaggagtcagggaaactcccgggacacaccgctcctgcatgaaggcgtgcagtgggatccacgtgtgggtgcagctttgagaaacgtgacagacaggagtgtccatgtggaaattatgagatcatcgtgaacacacgggaaagaacggacgtaaagttcacagctttaataattaaatcatttccctccaccaatgccggtgctgcatctataccgaaaagaggctgagcctgtctggctggaaaatcagtgcccagctgcggtttggaagctgagcccacagcccagccgcttacatgccacgattacgtttagactcacttcctcgggacctggaaacttaaagccgacctccagacaacctagcataacaacaaatggaaaaatcaaagtgcatttggcagagtgcgcttgaagtattttctatgcacacgtttattcgttgagttgtttaagcactggggcttcagagtgatttttaatgaagaatctgcgtgttcgtgtcaggaggccaaggggtgtctccagaacgggtgctgttcccggtgtgtttgcggtctgcggctcatctcattctctttagagacccctccttgttcactcagggaggggttagtttatttaagcagcactcgcatgccctggctccataagggaggatttgcaggtattaatccgagctggggggtgactcctgcccagttgagcaaatgaggtgagtggggtgcgggctggcagggcttccacgaggcctcctccctcgcaggggctgacccgagtcccactgttggagcgtggatttctgacagcgaggaaaagttaacccagctccctaccccgtctgaataaagttattacggcagatcaaagtaattaacagtagcttagcgccattgattctgtggacccgccttgaggttaggaggcctttcctgagcaactcacagcagtgctctgcccggctcgggaattctctcccttgcacgtttagacaacgcacacgtgtgtgacaagaaaacgctcgcgtgctctgatgcgctgtttaagtggacactcgtaccttttctctttttcatattttgctcctgtccgtattcccactttacaacttttctccagatacagattcagcgatccatacaccacactgcttagctcttgactgaattccatctggatccaagtcatcttgtatacattatccattacactaaatttacccctttatatggagcccatttgttttctaagtggaatgctctcccagctgcagtgagtttctgaagcaaagggccccatctgatatcatcattttatgtttcaggggcattcagatatgaaagcagtttgccgcatattaacctcaatcagcgttttcagacacatgtacttcctagactggcttagtgtctcagagatgactatgatatgaatagcaaaggaattaccacaaagcttttctgttgcaataatatatacatatttataatttcattaaaccatagatttaggaaagcctttaaaaactcattcaactcacttctccacttgtaagctgatgtttgaaaacacagagtaatagcttccatttattgagtaagtggtaggaaggaaacgtgggattcagcactttaggcatggtttcttatacttagaatggccctaccaggtggctatgaagaccccactttacagacgagaaaactgaggccacggagaaagtgctgggcccacagccacaggccagtagggcagacccagcatttagactccgccttcaggccagtgtccacacatttaaagcaaaatgtcttagcctgtgaccttcctgtcacgcgcacatatgagtagaca

SEQ ID NO: 683980 - DNA, 934 bp, Homo sapiens
gcttctgttggaatttgtccatttctaggcgccaagcactcaagagagaaagcaaaataaaaattgaggaaagaaagcatggtccattcacttgggaaaagtgctgccttttcccacacacacacacacacaraatccagtttaagccgatcctacaacctcaccctacgttaatggaaccaaaaacaactttaatgacatctattgtttgatgtttataaaccaatctctcttaaacataataaagtgtataaaagagcattctcttttctcctttctaggacagatgattttacagaataataataacatgtttcacttcaaacattctgatcagtctgtgcaggaatttccacccgggaaaagcaggcttcatttttaaccatcatatcttgattttctggtcttattttttattgtgttgtctacttccatacagatgcattggttcacccatcactcggtcatatttactaagtacacatgctgaccaatccccagcacttgcattaaatatctcttgaataaatgagtgaacacgtgaatgaatactcaaaacatggaggcccccaggagtattttaggagattaaaagaaagagcttaagttggagccttctagttcctgtgtccaccataccagaggccgactgagcccacgggcccgtggctgcccagtgattcctgcacagtgggtaaagcttccctctggtggacactaagatgatacatacctgggcccctgcaccgagctggccccagggaccaagtgtgggctgtaggaactcagggagggaatgggggaggcttgggggggtgtgcccacaatcatggagcttcctcacttcctctggtcctgttcaagcataatccagatgtgccgccccatctcgagatggacagtgggggcctgtcctggtgggctcatgatgggc

SEQ ID NO: 683981 - DNA, 934 bp, Homo sapiens
gcttctgttggaatttgtccatttctaggcgccaagcactcaagagagaaagcaaaataaaaattgaggaaagaaagcatggtccattcacttgggaaaagtgctgccttttcccacacacacacacacacagaatccagtttaagccgatcctacaacctcaccctacgttaatggaaccaaaaacaactttaatgacatctattgtttgatgtttataaaccaatctctcttaaacataataaagtgtataaaagagcattctcttttctcctttctaggacagatgattttacagaataataataacatgtttcacttcaaacattctgatcagtctgtgcaggaatttccacccgggaaaagcaggcttcatttttaaccatcatatcttgattttctggtcttattttttattgtgttgtctacttccatacagatgcattggktcacccatcactcggtcatatttactaagtacacatgctgaccaatccccagcacttgcattaaatatctcttgaataaatgagtgaacacgtgaatgaatactcaaaacatggaggcccccaggagtattttaggagattaaaagaaagagcttaagttggagccttctagttcctgtgtccaccataccagaggccgactgagcccacgggcccgtggctgcccagtgattcctgcacagtgggtaaagcttccctctggtggacactaagatgatacatacctgggcccctgcaccgagctggccccagggaccaagtgtgggctgtaggaactcagggagggaatgggggaggcttgggggggtgtgcccacaatcatggagcttcctcacttcctctggtcctgttcaagcataatccagatgtgccgccccatctcgagatggacagtgggggcctgtcctggtgggctcatgatgggc

SEQ ID NO: 683982 - DNA, 650 bp, Homo sapiens
ggtcacacagtgctttaggctgacraaaactctcacaccacccaagagcagccttgctactgcccggctgccacctccaccccacggtgcatgcagaagctcgtccactccaggcagagtgtaccctggcctccaggacaaaccagttatttactcaggccctgcttggagggacggggtctggagggtcagctcggggtgagcacaggccagtcgtgtggggcctctaccagccacaggcacagagacccctccctacctcacctgctgagaaaggccatcccctagggaggagcagtaacaagcggaaaggaaggaggctgctcccttttcctgcaccccagggacaactgggcagggaagaaggatcccaaccttgcacaaaaccgcagaggctcagagaggagcccctggccagggtctggactcaaactcaggtctcccagcccttaatatctctgttcggtcagccacagcctgtggcgcctgccaggccctaacggaaccgactcccattccccggttcctacagggcagctgatttccaccagcgtcctctcattccaggcattggccaagcctaaagtttctgttttataagatctgttgagatcacatctcaaggggtatggttgaacgtgtcagtcaaa

SEQ ID NO: 683983 - DNA, 1905 bp, Homo sapiens
ccttttacctggcatcatgagtttgtgaggcgttggtgtggctgacttcttgcctacctccagtagggagcacagaacccggcctgcactgagatgtcatggccatcagctcagggatgggcagtggccccgtctaagctagcaggagtcagctggcctctgttaaaactgttggggcacaggctgttaaactgataaaatttcagcttccatgggatgggagactctgcctgaggaggtagacagtgcaaagaaggcagagatcagctctgcagagtgacgtcattgccacagctccgtcctctgatccaatggtgcctgtcctttcagtagaatggatggaaattcttgtagcgcccagctatagtttgtgactgctcatgtagagtgatagtgtgcagatatatgtttatctgtggcttcatggtatggtcttattgaagctcaaatcggtgttgctttcccaatacccggcccacaaatcagaagtgatgttgaccatccttacaggtcctggaactggcctggctcaggttcccaccagcgagctcaagctgacatctctgttttctcattttcacctcctgcacacccagtttatgttaacacagattgggcgggaacccttgtgtgtctgcatccaagtctgcagtgcctatttatcacttcggtggcaaatgacagcaacattagcatcttcattaactaatattcacacagtttgggactttgggctctgattgcccgaaagacgaatgcttttcttaacttcasatgtccacaaacacgaggtgaggcccaaacacaagctattctgttctaactaaactttacagcaagagcaacagacatgcattgctgcactcccaccataaggggaatttttactgagctagaacagctttggtgaaaatgataacttaaataattccttataacaaccacagatgtgtaaccctttggattatcctcctagtctttcctccttaatgctttcttatttatttattttcatgttggcttgttacttttattacctgaccacgctgtgtggcctgttgtataaagcagttgaaagactctaattttaaaatgaatggctaggagaatgggttctgtgttcccttacttttaagtaaggtctgattattcagactgactgcaccaccaacatccttgtgaatggagctcttttgtataacttttatgatacctcctgccagggaaggtcaggttttagtgtaatgcgataccctatgttaaaaggcccaaattaacaaattcctgaaagcaaagcaaggaatacattttaaaatggtttttttgggcacgaagaggcggtacataagtcagcaaaggataggcgtgtgtgttccaaacctcactgcaaatttaccaccaatgtcttcagaaatgctgggcagtgaaggcaaaacctactgcagatattttataggtatcgacgactctctgcacattcatgttcagtgaacgctgcaggagggtgtttgccgaaagctgtcttcacattgaagagtgagctttgttccccacaatcaaccttcagatgactcttcatgagagcctcatagattcttttggaatctttctgacagaacattgctacccggagaaaatccctcagtattagattttgctcatattaaagagaaatggtggtgtgtgtggctctggtgggtgcacagggatgtgactgccagccttgtgaggcgtccctcattctccagcttgctctgccttgcatctgacaagcgtggggcttggcaggcagtggtgacaggtgacaacacatgacacccagtgcctgggaccactctttactccctcagagaagctccctgaaaaatcccccaagtacagggcaaagtcttccccgaaattctt

SEQ ID NO: 683984 - DNA, 1905 bp, Homo sapiens
ccttttacctggcatcatgagtttgtgaggcgttggtgtggctgacttcttgcctacctccagtagggagcacagaacccggcctgcactgagatgtcatggccatcagctcagggatgggcagtggccccgtctaagctagcaggagtcagctggcctctgttaaaactgttggggcacaggctgttaaactgataaaatttcagcttccatgggatgggagactctgcctgaggaggtagacagtgcaaagaaggcagagatcagctctgcagagtgacgtcattgccacagctccgtcctctgatccaatggtgcctgtcctttcagtagaatggatggaaattcttgtagcgcccagctatagtttgtgactgctcatgtagagtgatagtgtgcagatatatgtttatctgtggcttcatggtatggtcttattgaagctcaaatcggtgttgctttcccaatacccggcccacaaatcagaagtgatgttgaccatccttacaggtcctggaactggcctggctcaggttcccaccagcgagctcaagctgacatctctgttttctcattttcacctcctgcacacccagtttatgttaacacagattgggcgggaacccttgtgtgtctgcatccaagtctgcagtgcctatttatcacttcggtggcaaatgacagcaacattagcatcttcattaactaatattcacacagtttgggactttgggctctgattgcccgaaagacgaatgcttttcttaacttcagatgtccacaaacacgaggtgaggcccaaacacaagctattctgttctaactaaactttacagcaagagcaacagacatgcattgctgcactcccaccataargggaatttttactgagctagaacagctttggtgaaaatgataacttaaataattccttataacaaccacagatgtgtaaccctttggattatcctcctagtctttcctccttaatgctttcttatttatttattttcatgttggcttgttacttttattacctgaccacgctgtgtggcctgttgtataaagcagttgaaagactctaattttaaaatgaatggctaggagaatgggttctgtgttcccttacttttaagtaaggtctgattattcagactgactgcaccaccaacatccttgtgaatggagctcttttgtataacttttatgatacctcctgccagggaaggtcaggttttagtgtaatgcgataccctatgttaaaaggcccaaattaacaaattcctgaaagcaaagcaaggaatacattttaaaatggtttttttgggcacgaagaggcggtacataagtcagcaaaggataggcgtgtgtgttccaaacctcactgcaaatttaccaccaatgtcttcagaaatgctgggcagtgaaggcaaaacctactgcagatattttataggtatcgacgactctctgcacattcatgttcagtgaacgctgcaggagggtgtttgccgaaagctgtcttcacattgaagagtgagctttgttccccacaatcaaccttcagatgactcttcatgagagcctcatagattcttttggaatctttctgacagaacattgctacccggagaaaatccctcagtattagattttgctcatattaaagagaaatggtggtgtgtgtggctctggtgggtgcacagggatgtgactgccagccttgtgaggcgtccctcattctccagcttgctctgccttgcatctgacaagcgtggggcttggcaggcagtggtgacaggtgacaacacatgacacccagtgcctgggaccactctttactccctcagagaagctccctgaaaaatcccccaagtacagggcaaagtcttccccgaaattctt

SEQ ID NO: 683985 - DNA, 1905 bp, Homo sapiens
ccttttacctggcatcatgagtttgtgaggcgttggtgtggctgacttcttgcctacctccagtagggagcacagaacccggcctgcactgagatgtcatggccatcagctcagggatgggcagtggccccgtctaagctagcaggagtcagctggcctctgttaaaactgttggggcacaggctgttaaactgataaaatttcagcttccatgggatgggagactctgcctgaggaggtagacagtgcaaagaaggcagagatcagctctgcagagtgacgtcattgccacagctccgtcctctgatccaatggtgcctgtcctttcagtagaatggatggaaattcttgtagcgcccagctatagtttgtgactgctcatgtagagtgatagtgtgcagatatatgtttatctgtggcttcatggtatggtcttattgaagctcaaatcggtgttgctttcccaatacccggcccacaaatcagaagtgatgttgaccatccttacaggtcctggaactggcctggctcaggttcccaccagcgagctcaagctgacatctctgttttctcattttcacctcctgcacacccagtttatgttaacacagattgggcgggaacccttgtgtgtctgcatccaagtctgcagtgcctatttatcacttcggtggcaaatgacagcaacattagcatcttcattaactaatattcacacagtttgggactttgggctctgattgcccgaaagacgaatgcttttcttaacttcagatgtccacaaacacgaggtgaggcccaaacacaagctattctgttctaactaaactttacagcaagagcaacagacatgcattgctgcactcccaccataaggggaatttttactgagctagaacagctttggtgaaaatgataacttaaataattccttataacaaccacagatgtgtaaccctttggattatcctcctagtctttcctccttaatgctttcttatttatttattttcatgttggcttgttacttttattacctgaccacgctgtgtggcctgttgtataaagcagttgaaagactctaattttaaaatgaatggctaggagaatgggttctgtgttcccttacttttaagtaaggtctgattattcagactgactgcaccaccaacatccttgygaatggagctcttttgtataacttttatgatacctcctgccagggaaggtcaggttttagtgtaatgcgataccctatgttaaaaggcccaaattaacaaattcctgaaagcaaagcaaggaatacattttaaaatggtttttttgggcacgaagaggcggtacataagtcagcaaaggataggcgtgtgtgttccaaacctcactgcaaatttaccaccaatgtcttcagaaatgctgggcagtgaaggcaaaacctactgcagatattttataggtatcgacgactctctgcacattcatgttcagtgaacgctgcaggagggtgtttgccgaaagctgtcttcacattgaagagtgagctttgttccccacaatcaaccttcagatgactcttcatgagagcctcatagattcttttggaatctttctgacagaacattgctacccggagaaaatccctcagtattagattttgctcatattaaagagaaatggtggtgtgtgtggctctggtgggtgcacagggatgtgactgccagccttgtgaggcgtccctcattctccagcttgctctgccttgcatctgacaagcgtggggcttggcaggcagtggtgacaggtgacaacacatgacacccagtgcctgggaccactctttactccctcagagaagctccctgaaaaatcccccaagtacagggcaaagtcttccccgaaattctt

SEQ ID NO: 683986 - DNA, 692 bp, Homo sapiens
tgtgcataaaactatacacacacagtcacataaacaaatatatccatccatatatacatacatacatatacacttctctcaacacatgtccacaaaaaaacccatgcacacaatggaaacaaaaaacaaggagacagatggaaatttgtggaatttactctcaggagcctgcatggtcatacggagtgtttttaacagggtttccaattcttctcattgtagcatttgtaggtaaatttgattccttttttgatgaagttgtataaagaggagcaagtcataggagagttacttcttcctgttagtttttgtcacccttagttcttagtaaggagttttttaaggaactcagatttctggagtttgagacctttactagagtggcccaggggaggaaaggaggacatggaggagatagcagctgacaaggagcagtgacgccctgggcagaaaataatgaacctaatggcatgtggatttgtaccttatcctccagagtcctgttgacatgtgaggttggtgcccataytcagactgatacaaaggtgtataggcaatgggtaaatactctcattccaaaagggagaaataggccaaaaaaaaaaggggggtgacagtccttacacatgtctgaaacccaacaaggtggtaattaaatcttaaagctccaaaataatctcctttgactttat

SEQ ID NO: 683987 - DNA, 692 bp, Homo sapiens
tgtgcataaaactatacacacacagtcacataaacaaatatatccatccatatatacatacatacatatacacttctctcaacacatgtccacaaaaaaacccatgcacacaatggaaacaaaaaacaaggagacagatggaaatttgtggaatttactctcaggagcctgcatggtcatacggagtgtttttaacagggtttccaattcttctcattgtagcatttgtaggtaaatttgattccttttttgatgaagttgtataaagaggagcaagtcataggagagttacttcttcctgttagtttttgtcacccttagttcttagtaaggagttttttaaggaactcagatttctggagtttgagacctttactagagtggcccaggggaggaaaggaggacatggaggagatagcagctgacaaggagcagtgacgccctgggcagaaaataatgaacctaatggcatgtggatttgtaccttatcctccagagtcctgttgacatgtgaggttggtgcccatactcagactgatacaaaggtgtataggcaatgggtaaatactctcattccaaaagggagaaataggccaaaaaaaaaaggggggtgacagtccttacacatgtctgaaacccaacaaggyggtaattaaatcttaaagctccaaaataatctcctttgactttat

SEQ ID NO: 683988 - DNA, 1384 bp, Homo sapiens
ttgtcttgtactttcacttaacataacacatcatatttagaataccagagactgaagtaaattatatttacccctagaaatgcacctgctcaatttgttgytgttttttgtttgtttattttgctgttaacatgaatgtttgattctttttcatcaggagctgagctgggtttgggtcttgttgctatgtttacctccagtgcataacagcttgcattttcctatgctgtatatcaggtagtggctgaggcaccagaggggtttttttctcaatgttctagattcattcttcattactggcattaaccctctgatcttgacaaagagatattctctctctacactcagcccatccccagtgctcttctgttattgcttttgcttaattttatctaagatgtttgaggatcaataattgttttgtattcttctgcttcaatattaggcgtaagtgggccttgtttgcttggttctctaaggtgtgcccttttaagtaccttttccgttatccccagttatagctaagaatctcagcatcttagttaggggatagagttctttcagtcttatttagtggtagatcttttctgatagtatctagaaaattaggttggtgcaaaagtaattgcagtttagaatcttggatttagaatattgttctccctttccctgtatggcagaaattttattattgtttcctttactcccagacagattttgacctgtctcatggatggaaagtttttctgtatctcctccagtagcttagtttttgtttatcatctccctgatgctgaacattctcatgaaaagctgggaatgagtgcaaattccatttgtgtctgcaaatctcagggtttctatatatacatgctagctatactcaccttttagcaatttttcatataaaatttagccagattctcagagtttattacctacttgcgtggtgtccatgtctcttccttctctgcactgccacaggtgtgccagtgcttacatcctctctcctcttgagttaacatatattattttagatatcaagctgcttgtttgaatctatctccgatagattcaagaaaagttatgatttatgaaaaagagttatgaatgtcacttagcaaaagaaaggttctggagttaagcaggccttttccttcttagataccagtttgatatcccttggtaatattcattttattcatatatctatataaaatgaaattattcaccaaattctaagagatatctttctaattaacattctacttttagtttatctttcctagtaatgttttaatgaatctgtaaattgaagtctagattaccaaccctatgttaaactttataatccttgctaactcaaaacaaattatcattttgg

SEQ ID NO: 683989 - DNA, 620 bp, Homo sapiens
acaataggtgatgagctaaaaaataaaatcgcaaaaaaatttcaaaatattttgagaaagtttagaaattcatgttgagatgcattcaaagccgtcctgggccacatgcagcccgtgggctgcaggttggacaaacttgatgagaggtggtggagacttagaagtctggttgctaaaggaactttactgatcagaatgagatggtcatcggaaggagaagttgtacgtgaacactgtttggagagtactttatttggtttagctactgcaggataaagtggattgtttgattttggctgccatgatgggaaattttagtttctggagctaaaatcgtatgcggaacaactgagttctggcatttattgcctgtacggcatcaggggagttgcaggtctttgttattttttactttgtgtgattttttaaccctgaaaagtggtaaatgaagccacatttaacaggtgagkgcagcgaggctaagttagggtaatttgttcaaagtcagttaatttaattataaattctcagaggttggtgaattgaagctcaggattgcctgattgtaaaatctgtgttttttccatttacctctttttattgcctcttaagatacttta

SEQ ID NO: 683990 - DNA, 637 bp, Homo sapiens
tgttaaatttacatgaatggcaaattattcgatgttttctttagcaacatgtttttccatttcaatagaacagaaaagcaatttttaaaattatttttaagaaattcatgtagatatatgtggatatgatttattcatcttaactactccataaaaattccatcacatgggtgcatcccaattttttagcaatttccctaatgatataaaaaaatttaggttgtttcaaaacatagaattatttatactagtatattcacaattttctaatatttaccaccatctggaatacattctactgaggatatatgtayctatatctctctatatatacacatacacacaataatatatattcatatgtaatatgtattatatatatttatcaagtaatatatgtgtgtgcatgtatatacacatacatatgtatttatattttaaatattgtattagttcattctcacatttctataaagaaagacatgaaactgggtaatttgtaaggaaaaggggtttaattggctcaccgttccacaagctatacgggaaacatagcagcatgtgcttctggggaggcctcaggaaacctacaatcacggcagaaggcaaagagggagaaaggcatctcacatggctg

SEQ ID NO: 683991 - DNA, 686 bp, Homo sapiens
cagtaagggatttaatcatttcccaagtgaagcgagggaagatctgttcctttgtctctagaatttatgattcacaagacgtcaaacaaccctacacactgcaaatggaagcaatcgtgttgcctgacagaaatccctctgtctgcatttgtttgcttagagatgatgcttgttagaaccatcaatcctgggaatcaaaactctggttctcagctgtcatcttgccacatattgcctttagctagatcttgaagatatatctacctttctgtggtcactgaggtaaagtgagattcttttgaattccgtcagtattttttttttcctctggagtgttaaaaatgagtactacattttctggcttcaagtcaatcatagtcttgtctttttgaagatgatcagaggcagtgtaacccagtgagtatggtgaccttatgtgcatggtctctgtcaaagactgctaactgrtttgaacatgaagttgtggtaaactgtatctttcacttatgacttaggttcctctgaactgttggatggctgcagatcccaataaatttttccaaacagtcatagccatgtaagaatataagacttcacatgtcgtagaaagttcccaggaggatggtaactattttttgtgcttataattataagagcggatcagtataactttcactgatattata

SEQ ID NO: 683992 - DNA, 587 bp, Homo sapiens
gaacaagacaaatagggtctcccccacagtggcacttacattctcaaggaagaacaaattttggacaaccgaattcataagttaattatttagttgcagggatgctaaactactacaaggaagtgctaagttttacagagtgtattacaagggcattcacccagcatgtggttcaggaaaggctttcctgaggttgtgttttggggtttaagctgatatctgcaggagcttactagcaaagatggtgctcctgtcagaggaaaaagcaacggcaaggccccaaggaagaggatagagcattaccwcgagaaagaaaaacagcaaatctagaacccagtgagcagagagccttcctccattgggctgaggctggcaggccatcttaaggatttccacatcccatggagaaaaagaattgcaaaagcttccagatagggaaaggagtatttcgagctctccttcttagattttgctctttagcttctgatttaatatctctagctgatgaatttcaaatttttaaggcaaactaaggaaaatcaaacaaatatttaagctttgtgtaaaattagattctttttgttttt

SEQ ID NO: 683993 - DNA, 587 bp, Homo sapiens
gaacaagacaaatagggtctcccccacagtggcacttacattctcaaggaagaacaaattttggacaaccgaattcataagttaattatttagttgcagggatgctaaactactacaaggaagtgctaagttttacagagtgtattacaagggcattcacccagcatgtggttcaggaaaggctttcctgaggttgtgttttggggtttaagctgatatctgcaggagcttactagcaaagatggtgctcctgtcagaggaaaaagcaacggcaaggccccaaggaagaggatagagcattaccacgagaaagaaaaacagcaaatctagaacccagtgagcagagagccttcctccattgggctgaggctggcaggccatcttaaggatttccacatcccatggagaaaaagaattgcaaaagcttccagatagggaaaggagtatttcgagctctccttcttagattttgctctttagcttctgatttaayatctctagctgatgaatttcaaatttttaaggcaaactaaggaaaatcaaacaaatatttaagctttgtgtaaaattagattctttttgttttt

SEQ ID NO: 683994 - DNA, 1141 bp, Homo sapiens
  misc_feature 75, 77, 78: n = A,T,C or G
ttgaacctgcagtaaacaccaggttcctcctcccaaccccttccccagtaataaaatggacaagtgcctgactgntnnagtccaaagtctagaatctctggagatctgagttacatggaacagtctccttgacttatagatatctgaaaactractataaaatatgctcttttaaaaccaaagtatgttctacatcacaaatttgttttttaataatattatcattattatctaacccttactatttgccaggtactatactaagtgcttttcattaatcatctcatttaacccttaccacaactctatgaggtaaattgtatctgtatccttatttacaaataaggaaactaaggtcaagggggaaaggcacagaagaacactaccagtcacttatgcctaatgtcacacaaccaatgtcacactaccagtcacttttgcctaatgtcacacaacctttgaccagctgaaggtcaaaaatgcccaaatctcagactgtctgttccaaggccttgctcctagtccgtgtgccctgtggcctcccttttgcttcttatttccttagaggattcacactaaatatatctaagggactaggtctaaatatttccatttcatagatggagaagttggggctgaaagagaagctgacaccacacaagtacctttgccagaggtcagaactgagggcctttcccttccccatatctctgcaggtgccaatcaatacaagtatggcaagaaccgagccgaggaggatgcccggaggtacttggtagaaaaagagaagctggagaaagagaaagagacgattcggacagagctgatagcactgagacaggagaagagggaactgaaggaagccattcggagcagcccaggtacctatgtgggtgtggtcctgagcacctatgggtggccagctcatccttgggtacagtaaagggaggtctcttgcacaagtcacctggtttcttacccaagagaagtgggcttctcctcccctcctccttctcctcctcctcctcttcttctcctcttcatcattatcatcatcattcctcccaattaaagaaagtgccatcaatttaataacttgttttggaggatgaaaaagcatcacaataatgtatacacttaa

SEQ ID NO: 683995 - DNA, 1379 bp, Homo sapiens
ttaactatgtcttaatgcatagttgtgttggatggcctagtttgtaatgttagaatatgcatgttagtgaattaataaatacagcagtaaagaatagagttgtggttgggaatggtgtctcacgcctgtaatcccagcacaatggcatgccgaggcgggtcaatcacctgtagtcsggaggtggagatcaccctgaccaacatggagaaatcccgactctactaaaaatacaaatcagcctgtcatagaggcacatgcctttaatcccagctactcgggaggctgaggcaggagaatcacttgaacctaggaggcagaggttgcggtgagccgagatcgcgccattgcactccagcctgggcaacaaaagctaaattctatatcaaaaaattaaaaaaaaaaaaaaagaaggctgtttgttgaccatttgagtggccagtcttggtgcttcctggtgggcgaggagagccctgccccattcctacccattccagtagtcatggcataagagtgattctcactttctgctatagcctccttatccattggctgaaatgattgttttttaatgtgtcttataaatgcgtccatagcaaaaaaaattgaattgacttttgtagggactctttcggggattgttacccatcattccataatttgtttgtactcctagaaaagggaagtatgccgagcacagtggatatttcgtctcaaataataaataaataaccaaatagaaaagaaagaaaaggaagtaaagggaaatatacaaatatacaaggtgttaggagagagttgctaatcgtgattcccccttaattgtccaaacagaccacctctggggatctattcgtaaaagactcgttagaagtgcagactcatgcatttgagaatcactcagggaaatctgaagatgacctgtggtgggggtgtaaatggatacttaaatgtgtcttgtgattgtgtgagagtgtgactgtgtgtttgtgtgtgtgctgtcatctgtggagtgggggatcctcttttgccttgagaaagctcatctctgtccacttactctgggctctaccatctgtgccttgtatccagtagaaataaaacagtttgcggcagaaatggagttttattttattttactttactttttattaggattatttgtagaccgggtctcactctgtcactcaggctggagtgcaatggcacgatctcagatcactgcaacctgtgcctcctgcactgaagccatcctcccacctcagcctctggagtggggagatcccacacctgtgtaatttttgcattttttctagagatggggtttcctcatgctgcccgggctggtttccaacgcccgggctcaagtgatccacccgcct

SEQ ID NO: 683996 - DNA, 579 bp, Homo sapiens
ttttctctccacctgttttgtatctgaatcacagaaggtgaagacatcccccaggtggttagtagaacccagatctttgtgttagagtcttcatgaaaaccagtgtgagaaactgggctgaggcaagggaggtagtcttccatccttgctatatctctgggacactgggcatcttttctgggctccaccctaggggttgggaatctaataactttgattttttttctctacccccaattaccaaccctctaattcttcaacactaggcacatgggaattgygttttgttttcaaacctgggcaacaaagtgagaccatgttcctacagaaaatttaaaaatagctgagcataatggcatacaagtgtagtcccagctacttgggaagctgaggcatgatgattgcctgagcccaacagttcaaggctgcagtgaactatgatcccatcaatgcactccagcttgggtgacagtcagaccatgcctctaaaaaaattgcttttttgttggttggatgaatggatggacccatggatgaatatatagatgaatgaatggatttgtagaagagtgactgaca

SEQ ID NO: 683997 - DNA, 579 bp, Homo sapiens
ttttctctccacctgttttgtatctgaatcacagaaggtgaagacatcccccaggtggttagtagaacccagatctttgtgttagagtcttcatgaaaaccagtgtgagaaactgggctgaggcaagggaggtagtcttccatccttgctatatctctgggacactgggcatcttttctgggctccaccctaggggttgggaatctaataactttgattttttttctctacccccaattaccaaccctctaattcttcaacactaggcacatgggaattgtrttttgttttcaaacctgggcaacaaagtgagaccatgttcctacagaaaatttaaaaatagctgagcataatggcatacaagtgtagtcccagctacttgggaagctgaggcatgatgattgcctgagcccaacagttcaaggctgcagtgaactatgatcccatcaatgcactccagcttgggtgacagtcagaccatgcctctaaaaaaattgcttttttgttggttggatgaatggatggacccatggatgaatatatagatgaatgaatggatttgtagaagagtgactgaca

SEQ ID NO: 683998 - DNA, 1002 bp, Homo sapiens
agacgagcgctccccaaccaaggacaacggcctcccaggcgctcatcgtccacccgcaggagggtgcccgcagagcttcaagaaggtggttgtcacgcctgtcgccctctgccctcatcgagaaatgtagccacagctcgacgcagggacggagaaggaagccggcaaggggatggggcaagcatgtctgtctctcaaaggctggccttcctggccgagtcacccgtttgacactcctccccggatgccggtggtggtggcatggcccccccgtatcctgcctgggctctggcctctgctctgacctccctcttgctgtgtctgccccgtctctgagaagcctggcggcttcttagtgtggctcagtgtcttccacaaagaagacttccccgtccatcagggagaaacctcgtggcggtccgcgtcatgattgtttccctctccacacctctttctggatgattgggcagctgtggtgatcctggagctctgggcttccatacctgtgtgggacagggaagctctctcggtctccatggcccaagtgatggctgcacgctcggtccaggaagaggcggaggcaagcccaccgctcctgacattggccttctaggaaaggcggtgttgcatcccacctgcacttcctctctgattcttgagggccaaccgcttcctccgctcctggggaaagtgccttctagcaccgaatcttttggctgccacggatgtcagggagccaacgggactgggttttggctgggtgcaggggaggttgcgtcaggggtacctagccggcggcgggctgggggtggggtgtactttgtccaaacctctcggctcctctggcggrcctccctgaacgtggcgtggactcgcgcacaggccctgtctcgcaggttttcaggtgcgcttggcttttcctccgctttgtggggcaggtctccagtggccccccgggcgcacgcctggacatcactgtccgtctcgtcgtcgccccctacg

SEQ ID NO: 683999 - DNA, 743 bp, Homo sapiens
ctgtccgtctgtgtgtgcgtgcgcctcgggacacatgtgccctgtgcgccggagggtgggtttcttgcacgtcggcctttcttctggtcagcctctccccgcgtctctgcctgggtcgtgtggccggttggcagtcgtcgtcccggcggttccagtttgggggtctgtgaaggcctgggcaacgtgggcatcggcgtcggacccgcaggggttttcatcccctccccatccggagcagcctctttgctaggctggatccagasgagcgctccccaaccaaggacaacggcctcccaggcgctcatcgtccacccgcaggagggtgcccgcagagcttcaagaaggtggttgtcacgcctgtcgccctctgccctcatcgagaaatgtagccacagctcgacgcagggacggagaaggaagccggcaaggggatggggcaagcatgtctgtctctcaaaggctggccttcctggccgagtcacccgtttgacactcctccccggatgccggtggtggtggcatggcccccccgtatcctgcctgggctctggcctctgctctgacctccctcttgctgtgtctgccccgtctctgagaagcctggcggcttcttagtgtggctcagtgtcttccacaaagaagacttccccgtccatcagggagaaacctcgtggcggtccgcgtcatgcttgtttccctctccacacctctttctggatgattgggcagctgtggtgatcctg

SEQ ID NO: 684000 - DNA, 743 bp, Homo sapiens
ctgtccgtctgtgtgtgcgtgcgcctcgggacacatgtgccctgtgcgccggagggtgggtttcttgcacgtcggcctttcttctggtcagcctctccccgcgtctctgcctgggtcgtgtggccggttggcagtcgtcgtcccggcggttccagtttgggggtctgtgaaggcctgggcaacgtgggcatcggcgtcggacccgcaggggttttcatcccctccccatccggagcagcctctttgctaggctggatccagacgagcgctcccyaaccaaggacaacggcctcccaggcgctcatcgtccacccgcaggagggtgcccgcagagcttcaagaaggtggttgtcacgcctgtcgccctctgccctcatcgagaaatgtagccacagctcgacgcagggacggagaaggaagccggcaaggggatggggcaagcatgtctgtctctcaaaggctggccttcctggccgagtcacccgtttgacactcctccccggatgccggtggtggtggcatggcccccccgtatcctgcctgggctctggcctctgctctgacctccctcttgctgtgtctgccccgtctctgagaagcctggcggcttcttagtgtggctcagtgtcttccacaaagaagacttccccgtccatcagggagaaacctcgtggcggtccgcgtcatgcttgtttccctctccacacctctttctggatgattgggcagctgtggtgatcctg

SEQ ID NO: 684001 - DNA, 743 bp, Homo sapiens
ctgtccgtctgtgtgtgcgtgcgcctcgggacacatgtgccctgtgcgccggagggtgggtttcttgcacgtcggcctttcttctggtcagcctctccccgcgtctctgcctgggtcgtgtggccggttggcagtcgtcgtcccggcggttccagtttgggggtctgtgaaggcctgggcaacgtgggcatcggcgtcggacccgcaggggttttcatcccctccccatccggagcagcctctttgctaggctggatccagacgagcgctccccaaccaagkacaacggcctcccaggcgctcatcgtccacccgcaggagggtgcccgcagagcttcaagaaggtggttgtcacgcctgtcgccctctgccctcatcgagaaatgtagccacagctcgacgcagggacggagaaggaagccggcaaggggatggggcaagcatgtctgtctctcaaaggctggccttcctggccgagtcacccgtttgacactcctccccggatgccggtggtggtggcatggcccccccgtatcctgcctgggctctggcctctgctctgacctccctcttgctgtgtctgccccgtctctgagaagcctggcggcttcttagtgtggctcagtgtcttccacaaagaagacttccccgtccatcagggagaaacctcgtggcggtccgcgtcatgcttgtttccctctccacacctctttctggatgattgggcagctgtggtgatcctg

SEQ ID NO: 684002 - DNA, 743 bp, Homo sapiens
ctgtccgtctgtgtgtgcgtgcgcctcgggacacatgtgccctgtgcgccggagggtgggtttcttgcacgtcggcctttcttctggtcagcctctccccgcgtctctgcctgggtcgtgtggccggttggcagtcgtcgtcccggcggttccagtttgggggtctgtgaaggcctgggcaacgtgggcatcggcgtcggacccgcaggggttttcatcccctccccatccggagcagcctctttgctaggctggatccagacgagcgctccccaaccaaggacaayggcctcccaggcgctcatcgtccacccgcaggagggtgcccgcagagcttcaagaaggtggttgtcacgcctgtcgccctctgccctcatcgagaaatgtagccacagctcgacgcagggacggagaaggaagccggcaaggggatggggcaagcatgtctgtctctcaaaggctggccttcctggccgagtcacccgtttgacactcctccccggatgccggtggtggtggcatggcccccccgtatcctgcctgggctctggcctctgctctgacctccctcttgctgtgtctgccccgtctctgagaagcctggcggcttcttagtgtggctcagtgtcttccacaaagaagacttccccgtccatcagggagaaacctcgtggcggtccgcgtcatgcttgtttccctctccacacctctttctggatgattgggcagctgtggtgatcctg

SEQ ID NO: 684003 - DNA, 879 bp, Homo sapiens
caaaaagataataattttgattttcagaatcccaaaatgctctggagtctagagagagccaggtcaaagcagccaccctgaatcatcatatacctgtcacasccctggagaaaacaatccatttgtcccttttcacatgatgctgctcagcacgctctggaaggttttagctcaggacactacactttaggagaaacattgagaaattgaccatacctagggatactgtactcaacttggggctcacaacactctcttgtgttaccattggttgtgatgtgggcttttaaaaattcttaaataaataaatgaaaaagatcaaatcaaattcaatatttcccccaatggtaaaaagcaatcttgctccatcctaatctgcttctaattcatacgctgatttttttccctctagtattacatgataaatattttcccagaaattagtaagcatgcagtctcatgtgtcttgaggtaacggttggttttctaatcaaagatgctctctttgggccaggcacagtggtttaggcttgtaatcccagtgctttgggaggccaaagtgggaggatcacctgacccaggagtttaagatcagcctgagaaacttagcaagaccccaagactccaaaaacttcaaaaaattagccgggcatgatggtgcctgcctgcagtcccagcgactcaggaagccaaggcaggaggattgcttgagcttaggaatttgagaccaggctgagtaacataacaagatcctatctctacaaaaaaacaaaacaattagccaagtgtggtggcacacacctgcagtctcagctactcgaaaaggtgaggtaggaggatcacttgagtcctggaggtcaagacttcagtgaggcgtgg

SEQ ID NO: 684004 - DNA, 921 bp, Homo sapiens
ctctccctgtggagatgagctacggaaactggaagagctcaacattaaagagctagaacatatgggaagcccagaggttaacttctctgtggatgatgaagtagctggactaatctactttccaaaagttaagaagtgatcacagagattcttccagagatgagaaaatgggaccactctctgaatcaatactgagatgtgatgtgtcatgaatgcaggtaaaaccatggctatccaaataggatggagctttgygaccgtaagagaccagctcttgcattcgttctccccatctttgttctgctttccctgctcacttccaaaatgaaggaaagccaggacctgtgtaatatctttcttgagctattttcagttgtattttttatctattcctgggttggaaaattgaggccttcggctgtttttcctgttttctgtggtcaggcttcagtatttttctacctctttttaaatcctcttgatgaacttatacttaaaaaacaaaagttgcatgttgcaggaatattccagttggtttcagagagggagcaagacaagttggatatcacgtgcccatatctctcatgtatgtgctaactggatttctacattccctcaaattacttcatgttttgcaaaattgttgtgttagaatcagcaaacaattagaaaatgtactttatttcagtgtggcaattttatattctcttctctattactgaaacaaattatttcccacatattttgataacattatagtggtgctagtcacattgttgtaaggtggcgtcagcgttcccatgataaactttgtcaagctcttgtaacttggctacaaaactctacctcgagtttgagacttgctttaatcccagagccatctaggaaagaaaataaatttatcttaaattggacaaaatg

SEQ ID NO: 684005 - DNA, 921 bp, Homo sapiens
ctctccctgtggagatgagctacggaaactggaagagctcaacattaaagagctagaacatatgggaagcccagaggttaacttctctgtggatgatgaagtagctggactaatctactttccaaaagttaagaagtgatcacagagattcttccagagatgagaaaatgggaccactctctgaatcaatactgagatgtgatgtgtcatgaatgcaggtaaaaccatggctatccaaataggatggagctttgcgaccgtaagagaccagctcttgcattcgttctccccatctttgttctgctttccctgctcacttccaaaatgaaggaaagcsaggacctgtgtaatatctttcttgagctattttcagttgtattttttatctattcctgggttggaaaattgaggccttcggctgtttttcctgttttctgtggtcaggcttcagtatttttctacctctttttaaatcctcttgatgaacttatacttaaaaaacaaaagttgcatgttgcaggaatattccagttggtttcagagagggagcaagacaagttggatatcacgtgcccatatctctcatgtatgtgctaactggatttctacattccctcaaattacttcatgttttgcaaaattgttgtgttagaatcagcaaacaattagaaaatgtactttatttcagtgtggcaattttatattctcttctctattactgaaacaaattatttcccacatattttgataacattatagtggtgctagtcacattgttgtaaggtggcgtcagcgttcccatgataaactttgtcaagctcttgtaacttggctacaaaactctacctcgagtttgagacttgctttaatcccagagccatctaggaaagaaaataaatttatcttaaattggacaaaatg

SEQ ID NO: 684006 - DNA, 1030 bp, Homo sapiens
cacgcagtgcagcgctgaaaaggtacaaggtccttagtaagaccttcactgatacaccctatcagcaggcaatatagggagaaacatttttatggctatctctttatgatcctctcatttctgaacactgaactcgacctgcctcttaagtttctcttctctccaagtaactgtctttcccaaattaagagtctttctttactagtccatttttgtaggttttgcaaaaatgtattgatatgaaattagcattaatcatttgggaaaatatccttggatcccaaatatgtctgagggagctgaagtttccgttgatttatggttgaaagtagtctttgtaaaggatgaaattgggggccaggtgcagtggctcacacttgtaatcccagcattttggaaggctgagaccagagcatcaactgaggccaggaatgtgagaccagcctgggcaacagagcactaccctgtctctacaaaagatttaaaaaattagccaaggatggtggtgcacacctatagtccaagctacttgggaggctgaggtgggaggattgcttgagcccaggagttcaaggctgcagtgatccaagtttgccccattgcactccagcctgggtaacagagtgagaccctgtctcttaaaaaaataaataatacaaaatgaattgggaaatgtcaatcaaaacagcgaagactgcaatccataaaggctggcagttcaacttaaaaacaaaaaaaactaagggcttctatgccaaatgcctttactctctacactaaatttcacccttaataaaaaattacacccaaatgttaccttcttttcttctaagaaaagaagcttacatgaaaggtagctatggtgcggaaaaattcagacttgcttgtgttcacaaayagataatgccagaggtggtggtctcagtttccagttctttgagaacacttacctggtacctctcctaaaagaggcattaactctagtcaacatctctgactgtctgaattctgagatatctggccctttgta

SEQ ID NO: 684007 - DNA, 921 bp, Homo sapiens
cagaattactgctgtttcatttgtcactatatctcagctaaaaatgttaatattttacttgaatatcagttgatgtaatttcactgcagatgtggtaaaattttagaaaaaaatgaacacatttttatctttatataattttaaaacattaaagtaattttaaataaaaggcaaaaagatattatcaatatatttcattttagaatttaaaactttgaattataatactactcttacttgtatctattactattagaagaaaattatttggagaattataaggttattgtccattaatttactaatataaaaaatattagtctggttattgcatcaaagaagagtaaaaacacttcccaggtaataayaattgtaagcaaaattgatggcagtattggacaatatataaatgaacacagagtctttactttgattttgctgagaaatatacattttcaaaagctgatttagttataatattaattattttaaatatggtattgcatattttatcaaagtacttcgtaaagtagattggatgattgattctgatttttgagtatttttttcttacttttccaactaaattatactgatattttatatattaaggattttgatcatgaactcttccatttatctatgagcccttgggaaaatcgtgaacctttatttctttaattgtaaattcagaaaaaatacagtcactgctttatctaataaagcatgggcttattagataactaaaacataccaagattgcttataaaagtaccttaaatgtggaagaaatatattaattattattactagcaaatcaactactcactttcttgcctctaacacaccttctcatgaagctaaaacagaacaaattttacttcagttcagaattttgttttcataaacttacagttacca

SEQ ID NO: 684008 - DNA, 688 bp, Homo sapiens
  misc_feature 269, 271, 279, 283, 284, 285, 315, 316, 329, 330, 331, 339,340, 348, 349, 355, 357, 358, 369, 375, 376, 390: n = A,T,C or G
gatatgtttccatggacacaatgaaactgctgtgagatacaattcaatcaggttttcgtttatcatctgaacctcatatatcttattctaacaaggaatctatgatagcatttcgaatttttaggtattattatcttttgactctacatgcacaatgactttttttttaaatttcctgcaatgtacagttactttgataaatggctatagaaccttttggaaaataatttaaagaatagatgttgtatattcttttcgcgtgacattgnanttgaacanggannnctattctggacagggtgacttacgtctacnnatttccgtctctnnntttccagnntttactgnngactantnnaggcctgcagnacgctnnggttcaagtttganaaactcatatctgcattgcagtggttttccattataatggctgaaatcttcttttagctgtttgctgttgattttgttgttgttgttgttgttgttatctatagcaagtaataaccatattcrttggccatccattttgcttctaaggactctatgatctattagccatccacaaaatgtgagggccccttgttagctttctgaactttctgtctctcacggcaatcatgtccattttgtttctggcagttagctccaccaccaacttcagttcttctggaattctgctcctttatca

SEQ ID NO: 684009 - DNA, 688 bp, Homo sapiens
  misc_feature 269, 271, 279, 283, 284, 285, 315, 316, 329, 330, 331, 339,340, 348, 349, 355, 357, 358, 369, 375, 376, 390: n = A,T,C or G
gatatgtttccatggacacaatgaaactgctgtgagatacaattcaatcaggttttcgtttatcatctgaacctcatatatcttattctaacaaggaatctatgatagcatttcgaatttttaggtattattatcttttgactctacatgcacaatgactttttttttaaatttcctgcaatgtacagttactttgataaatggctatagaaccttttggaaaataatttaaagaatagatgttgtatattcttttcgcgtgacattgnanttgaacanggannnctattctggacagggtgacttacgtctacnnatttccgtctctnnntttccagnntttactgnngactantnnaggcctgcagnacgctnnggttcaagtttganaaactcatatctgcattgcagtggttttccattataatggctgaaatcttcttttagctgtttgctgttgattttgttgttgttgttgttgttgttatctatagcaagtaataaccatattcattgsccatccattttgcttctaaggactctatgatctattagccatccacaaaatgtgagggccccttgttagctttctgaactttctgtctctcacggcaatcatgtccattttgtttctggcagttagctccaccaccaacttcagttcttctggaattctgctcctttatca

SEQ ID NO: 684010 - DNA, 2294 bp, Homo sapiens
tctagtgacttccaatatatacattaaattaaaaaataaaaaagatcattccatttgtcactgattaacaaaacgtgtggttaattttcctagcacttcaatcaagtagaaaattcatgtccaaaagaaaaaacaaaaagtaaaaagtacagatatagaagtggcaaacattcataagcacgacacacaatatgaaactttcaaatcccaaagatccttttgaaaatacaaatgaaaaaatatatgttgatgaagataatgcagaactaaatgtgtaagaaacaaactgaaaaagtatcctgaagcaaaacaggcaaacattagttaagaaccactgaaacaatagattaggtcatgcttaccttcctacacattgtaaaaagaatttctaaatgttttgcatttgatagtaaggtatctgtatctattgtcacataattatgcaggagaggcatcatgtctgaaaaaaaatcaaaatcccaatgagacttgagtgacagaaatagaaataaattattcccactgaaaccatatttctgtagcacccacacattagtatcttcccatgcaaccacaaaaggctagaaatgaaagtaataagtctgatgtgtatttatagatggggaaaatgtggagcagaaagactaagatgctcatcatttatgaagtaattgtgctgaattttttccctttctccactgcacactcatccctatctgacatactttatattttcttgctcatttgtctgcgtgattccctaccctcccatcatccccattagaatgtaagcttcaaaagggcaaagcctgtttattttgctcactgctggattgctgagattagaatagggcttggaatatagttggtgtccataaaatacttattaaattaatatatggatatatgctctggtcataaactaacttaagactcaataagaaatacagcctacctcctctgcctatatacctagggctgaaaaacactgctacaatagccccagcttttatgtgaccgggaaataaaaacattttctgatcaatattggaatcatatgtgtttttatttcaggtgtcaacaggaagaagtatctagacacagaaaagcaaaaattttatatggtcaaagccatacctgtaaagtattcaaagcaatcctgctgaaacacttcatatagtatacctagaagctgccacatttgaggggaaatactgtggcaggttaaactgtatgccagggaaagaatttcttcatagaattctagaagaaagaaaatctctagttagaatgctaggaaatagcaaaagttaaaacaaagaccacacagaggagggtttagactacctacgcacacagagtcctcctctatccaatgtactcataagcctccctttctcagtatttgtatcttcggctatgtatctgcctccttccatttcttaccaagatctgcccctctgttcaataaggcaaggcaaaaatttgttttcactaaactttcttatactattgaaaaaataaagtttttttctattttataatctatatttataaaactgtattagaaatagatacaagaaggaatagattatcattcctcatttatgtcgaggatttaaaatgtacaaataattaataatattctttggagagcttaattatatcagactaaagtatctacctatctcaaatttatacttttactaacaactatatactgggcagtattttgtcaatttacaaaacttgtaaaacgtacagtattcttcaagttaatcaagacaataagacccactataaagtagaagagttcaaaggaaatgttcttatactcacaaatatcattatcctcagtcaaaagtaaattatatctacacgtacagccaggaaacacaaatctcaacaaaaatttcaaatagttcctaccataccactgagcaaagaagtctaacttgaaaggtttttcctcttataaaaactagtggtcaccctggaaacttgattaaggtttctctaacattacttaaaacttaatatattcaaaagctagcaaaataaaatggaaattacaaatattgatraataatttatgtaagaaaataatttgaaaaataaattatctaaatatggaatttctaaaagttctagcatggcactgggataaaaacagacacacagaccaatggaaccgattacaaagcccaaaagtaaatctacccatttagggtcaattaattttcaacaaagatgctaaaaacacacaatggagaaaggacagtctcttcaataaa

SEQ ID NO: 684011 - DNA, 1463 bp, Homo sapiens
tgttatattgaactaaacggtgtctcattgtaacttccaggcaaagtctaaatttctattccactgctagctcttcaaagtaagttaaaactcctgtttaaaaaattacaataacaggagccgggcacggtggctcaagcctgtaatcccagcactttgggaggccgaggcgggcggatcacgaggtcaggagaacgagagcatcctggctaacacggtgaaaccccgtctctactgaaaacacaaaaaaattagccgggcgtggtggcgggtgcctgtagtcccagctactggggaggctgaggcaggagaatggcrtgaaccccggaggcggagcttgcagtgagccgagatcgcgccactgcactccagccctgggtgatagagcgagactctgcctcaaaaaaaaaaaaaaaaaaaaaaaaaatttccaataacagatctgactaaagaaacattaaaaacttccatacaacaagagacagcacaaagatgtttctttatttcataaagacttcttcaaattagaagagaaaagttgttcaaaaaatagtattggcataactgattagccccctgaaaaaatttaaattaactccctcaacttcacaccaaaataaacttcagatggggaactattttaacactgacaaaaaatgatagcacaggattccttaaagaaaacatgggagaattttcttttataatctcagattataaaagaaggtatttgtaaacacaacacaactgagaagttattttttaaaaactgattttttaaaaactgatttaaaaaattatttataaggaaaaagccatgccaaagcacctctgaactggctcaaggacctttaggcaactttcttcactacagtaagttgccttccaattcctggtctccagagctcttcaccatatcaagcttataagtgagttgctgaataaataaaaagcattctttcaaaataggtacagaaattataaattcagaatatggattttattcaagtttcctaaaactcaggtttaccaaatttgtcggaagtcctgtcatcatgtagaaaccccttctgtgatgcaagctagaaatggatgatactgaacatgattctttctaatacagatgtggctcatacaaagtaggggtgatgggagatgggaaatgggagattctctccctacacaacagtgggggagagaagagtccctgataagaaaaccatttttaagtatcaggaatatatccttaaataaccatggtaccaagagtttataacacggatataatggcatttttatatgtgtatacatgtatacacacacatacatgtttatgacactgaaaaaacaattgactcaccacacttcaagtgggaattaactttaagatactttaaggagtttaacattagtggacagcactgggaggggcagaagacagatgaccagcttcctgattgtcc

SEQ ID NO: 684012 - DNA, 1463 bp, Homo sapiens
tgttatattgaactaaacggtgtctcattgtaacttccaggcaaagtctaaatttctattccactgctagctcttcaaagtaagttaaaactcctgtttaaaaaattacaataacaggagccgggcacggtggctcaagcctgtaatcccagcactttgggaggccgaggcgggcggatcacgaggtcaggagaacgagagcatcctggctaacacggtgaaaccccgtctctactgaaaacacaaaaaaattagccgggcgtggtggcgggtgcctgtagtcccagctactggggaggctgaggcaggagaatggcatgaaccccggaggcggagcttgcagtgagccgagatcgcgccactgcactccagccctgggtgatagagcgagactctgcctcaaaaaaaaaaaaaaaaaaaaaaaaaatttccaataacagatctgactaaagaaacattaaaaacttccatacaacaagagacagcacaaagatgtttctttatttcataaagacttcttcaaattagaagagaaaagttgttcaaaaaatagtattggcataactgattagccccctgaaaaaatttaaattaactccctcaacttcacaccaaaataaacttcagatggggaactattttaacactgacaaaaaatgatagcacaggattccttaaagaaaacatgggagaattttcttttataatctcagattataaaagaaggtatttgtaaacacaacacaactgagaagttattttttaaaaactgattttttaaaaactgatttaaaaaattatttataaggaaaaagccatgccaaagcacctctgaactggctcaaggacctttaggcaactttcttcactacagtaagttgccttccaattcctggtctccagagctcttcaccatatcaagcttataagtgagttgctgaataaataaaaagcattctttcaaaataggtacagaaattataaattcagaatatggattttattcaagtttcctaaaactcaggtttaccaaatttgtcggaagtcctgtcatcatgtagaaaccccttctgtgatgcaagctagaaatggatgatactgaacatgattctttctaatacagatgtggctcatacaaagtaggggtgatgggagatgggaaatgggagattctctccctacacaacagtgggggagagaagagtccctgataagaaaaccatttttaagtatcaggaatatatccttaaataaccatggtaccaagagtttataacacggatataatggcatttttatatgtgtatacatgtatacacacacatacatgtttatgacactgaaaaaamaattgactcaccacacttcaagtgggaattaactttaagatactttaaggagtttaacattagtggacagcactgggaggggcagaagacagatgaccagcttcctgattgtcc

SEQ ID NO: 684013 - DNA, 593 bp, Homo sapiens
cacttgaacctggagggtggaggttgcagtaagctgagattgygccactgcactccagcctggtgacagagtgagactctgtctcaaaacaaacagaaaaacacacaataaaaaccacataatataaataaagctatgaaaatactctattttcatatatgattaaaaatttccagaatcaaaagttccaagatttaaactcaatactagagtttccagtctattatttaatatactacttctaaaaataatttgtattttaattattagacatttatctagaattttggacaagatattcatgctaaaaatcaagaaaataactagaagatttatgttatttcttttatgaagcattccttgacaccataagtagggttgattgttcttcctccatgctcccaaggtattttgcacataacattggtagagcacttaacatattgaattgtaatctgaaaatcaattgcatttccacatagtagcaatgaataattaaaaacagaaattttaaaaacttacaacagcaacaaaattatgaaatgcttacggataaatctgacaaaatggggaagaattatacaatgaaaacc

SEQ ID NO: 684014 - DNA, 1027 bp, Homo sapiens
tgtcaattatacctcaataaatctgtcttaagaaatggaatctgactccctcactagactctcagctcctcaagggcagggattataaattataggcggggtgtgttggctcatgcckgtaagcccagcactttgagaggccgaggcaggaggactgcctgagcccaggagtttgagaccagcctgggcaacagaatgagaccttgtctccactgaaaattaaaaaaaaaagttaggtgggtgcagtggtgtgagcctgcagttcctgctactcaggagtttgaggtgggaggatcccttgagctcaggaatttgaggtaacagtgagctatgattgtgccactgtaccctagcctgggtgacagagatcctgtgtctaaaaaaagaaaaaataaataatatttttatctacattagcatcttgtaatgcaagaatataaaagcagttgagtaagaacttgccgaataaacataataattaatgagccaaagaaatttaactgatgattaaaacaatgagtccagaaataatccgaaggcactacataactgacgcatactaaaaattcacatctacaataaatgcatggtatggtaaaaagagcactgcactgagattaggaaacgtgagaaactcaaagtggatcttcactagctaggtgaccttagataaccaaacctcactggacatcattccatcatctgaaattcagggttcttaataattcttattttgtttacatcatagaattccttgggaaactaaataagacaagtaaaaaattcattcaaacccacaaagccatcagtattggtgtcattagaaataatttttttaagggggtagagaaaccacagatgcgtgattctatttactcgagggtgaaaagcaacctggtctacttgcctgataggaaccaagacagcaaggactactccttcttttgttttctgcctagcggtagacaagcctcgtttttcctgttcataaaaagacaaactgcctattctgatctgttaactcgga

SEQ ID NO: 684015 - DNA, 1027 bp, Homo sapiens
tgtcaattatacctcaataaatctgtcttaagaaatggaatctgactccctcactagactctcagctcctcaagggcagggattataaattataggcggggtgtgttggctcatgccggtaagcccagcactttgagaggccgaggcaggaggactgcctgagcccaggagtttgagaccagcctgggcaacagaatgagaccttgtctccactgaaaattaaaaaaaaaagttaggtgggtgcagtggtgtgagcctgcagttcctgctactcaggagtttgaggtgggaggatcccttgagctcaggaatttgrggtaacagtgagctatgattgtgccactgtaccctagcctgggtgacagagatcctgtgtctaaaaaaagaaaaaataaataatatttttatctacattagcatcttgtaatgcaagaatataaaagcagttgagtaagaacttgccgaataaacataataattaatgagccaaagaaatttaactgatgattaaaacaatgagtccagaaataatccgaaggcactacataactgacgcatactaaaaattcacatctacaataaatgcatggtatggtaaaaagagcactgcactgagattaggaaacgtgagaaactcaaagtggatcttcactagctaggtgaccttagataaccaaacctcactggacatcattccatcatctgaaattcagggttcttaataattcttattttgtttacatcatagaattccttgggaaactaaataagacaagtaaaaaattcattcaaacccacaaagccatcagtattggtgtcattagaaataatttttttaagggggtagagaaaccacagatgcgtgattctatttactcgagggtgaaaagcaacctggtctacttgcctgataggaaccaagacagcaaggactactccttcttttgttttctgcctagcggtagacaagcctcgtttttcctgttcataaaaagacaaactgcctattctgatctgttaactcgga

SEQ ID NO: 684016 - DNA, 1027 bp, Homo sapiens
tgtcaattatacctcaataaatctgtcttaagaaatggaatctgactccctcactagactctcagctcctcaagggcagggattataaattataggcggggtgtgttggctcatgccggtaagcccagcactttgagaggccgaggcaggaggactgcctgagcccaggagtttgagaccagcctgggcaacagaatgagaccttgtctccactgaaaattaaaaaaaaaagttaggtgggtgcagtggtgtgagcctgcagttcctgctactcaggagtttgaggtgggaggatcccttgagctcaggaatttgaggtaacrgtgagctatgattgtgccactgtaccctagcctgggtgacagagatcctgtgtctaaaaaaagaaaaaataaataatatttttatctacattagcatcttgtaatgcaagaatataaaagcagttgagtaagaacttgccgaataaacataataattaatgagccaaagaaatttaactgatgattaaaacaatgagtccagaaataatccgaaggcactacataactgacgcatactaaaaattcacatctacaataaatgcatggtatggtaaaaagagcactgcactgagattaggaaacgtgagaaactcaaagtggatcttcactagctaggtgaccttagataaccaaacctcactggacatcattccatcatctgaaattcagggttcttaataattcttattttgtttacatcatagaattccttgggaaactaaataagacaagtaaaaaattcattcaaacccacaaagccatcagtattggtgtcattagaaataatttttttaagggggtagagaaaccacagatgcgtgattctatttactcgagggtgaaaagcaacctggtctacttgcctgataggaaccaagacagcaaggactactccttcttttgttttctgcctagcggtagacaagcctcgtttttcctgttcataaaaagacaaactgcctattctgatctgttaactcgga

SEQ ID NO: 684017 - DNA, 1027 bp, Homo sapiens
tgtcaattatacctcaataaatctgtcttaagaaatggaatctgactccctcactagactctcagctcctcaagggcagggattataaattataggcggggtgtgttggctcatgccggtaagcccagcactttgagaggccgaggcaggaggactgcctgagcccaggagtttgagaccagcctgggcaacagaatgagaccttgtctccactgaaaattaaaaaaaaaagttaggtgggtgcagtggtgtgagcctgcagttcctgctactcaggagtttgaggtgggaggatcccttgagctcaggaatttgaggtaacagtgagctakgattgtgccactgtaccctagcctgggtgacagagatcctgtgtctaaaaaaagaaaaaataaataatatttttatctacattagcatcttgtaatgcaagaatataaaagcagttgagtaagaacttgccgaataaacataataattaatgagccaaagaaatttaactgatgattaaaacaatgagtccagaaataatccgaaggcactacataactgacgcatactaaaaattcacatctacaataaatgcatggtatggtaaaaagagcactgcactgagattaggaaacgtgagaaactcaaagtggatcttcactagctaggtgaccttagataaccaaacctcactggacatcattccatcatctgaaattcagggttcttaataattcttattttgtttacatcatagaattccttgggaaactaaataagacaagtaaaaaattcattcaaacccacaaagccatcagtattggtgtcattagaaataatttttttaagggggtagagaaaccacagatgcgtgattctatttactcgagggtgaaaagcaacctggtctacttgcctgataggaaccaagacagcaaggactactccttcttttgttttctgcctagcggtagacaagcctcgtttttcctgttcataaaaagacaaactgcctattctgatctgttaactcgga

SEQ ID NO: 684018 - DNA, 1027 bp, Homo sapiens
tgtcaattatacctcaataaatctgtcttaagaaatggaatctgactccctcactagactctcagctcctcaagggcagggattataaattataggcggggtgtgttggctcatgccggtaagcccagcactttgagaggccgaggcaggaggactgcctgagcccaggagtttgagaccagcctgggcaacagaatgagaccttgtctccactgaaaattaaaaaaaaaagttaggtgggtgcagtggtgtgagcctgcagttcctgctactcaggagtttgaggtgggaggatcccttgagctcaggaatttgaggtaacagtgagctatgattgtgccactgtaccctagcctgggtgacagagatcctgtgtctaaaaaaagaaaaaataaataatatttttatctacattagcatcttgtaatgcaagaatataaaagcagttgagtaagaacttgccgaataaacataataattaatgagccaaagaaatttaactgatgattaaaacaatgagtccagaaataatccgaaggcactacataactgacgcatactaaaaattcacatctacaataaatgcatggtatggtaaaaagagcactgcactgagattaggaaacgtgagaaactcaaagtggatcttcactagctaggtgaccttagataaccaaacctcactggacatcattccatcatctgaaattcagggttcttaataattcttattttgtttacatcatagaattccttgggaaactaaataagacaagtaaaaaattcattcaaacccacaaagccatcagtattggtgtcattagaaataawttttttaagggggtagagaaaccacagatgcgtgattctatttactcgagggtgaaaagcaacctggtctacttgcctgataggaaccaagacagcaaggactactccttcttttgttttctgcctagcggtagacaagcctcgtttttcctgttcataaaaagacaaactgcctattctgatctgttaactcgga

SEQ ID NO: 684019 - DNA, 1027 bp, Homo sapiens
tgtcaattatacctcaataaatctgtcttaagaaatggaatctgactccctcactagactctcagctcctcaagggcagggattataaattataggcggggtgtgttggctcatgccggtaagcccagcactttgagaggccgaggcaggaggactgcctgagcccaggagtttgagaccagcctgggcaacagaatgagaccttgtctccactgaaaattaaaaaaaaaagttaggtgggtgcagtggtgtgagcctgcagttcctgctactcaggagtttgaggtgggaggatcccttgagctcaggaatttgaggtaacagtgagctatgattgtgccactgtaccctagcctgggtgacagagatcctgtgtctaaaaaaagaaaaaataaataatatttttatctacattagcatcttgtaatgcaagaatataaaagcagttgagtaagaacttgccgaataaacataataattaatgagccaaagaaatttaactgatgattaaaacaatgagtccagaaataatccgaaggcactacataactgacgcatactaaaaattcacatctacaataaatgcatggtatggtaaaaagagcactgcactgagattaggaaacgtgagaaactcaaagtggatcttcactagctaggtgaccttagataaccaaacctcactggacatcattccatcatctgaaattcagggttcttaataattcttattttgtttacatcatagaattccttgggaaactaaataagacaagtaaaaaattcattcaaacccacaaagccatcagtattggtgtcattagaaataatttttttaagggggtagagaaaccacagatrcgtgattctatttactcgagggtgaaaagcaacctggtctacttgcctgataggaaccaagacagcaaggactactccttcttttgttttctgcctagcggtagacaagcctcgtttttcctgttcataaaaagacaaactgcctattctgatctgttaactcgga

SEQ ID NO: 684020 - DNA, 1696 bp, Homo sapiens
tgataccaaccagatgtcccacaatgatgataaatttaatttatttccaatttctcaaactcttctacagattcaggcagcacagtcacagccattagctcactgagctggatgcatcattgaaggaacggaattgatcaggcagatagattgtagtgcatggctaagagtctcctaaggagggagatggcagaaatccagacatcaaatagatgatgaaatggccatttccattaaggtaacatcacatcacagatattaattaggaggcactataataaagttaagtggatgtgggggaaaatgctgagttaaaagtcaccccatatgtccttagcctgaggtaattacagatctgaaggtgagtcatggatctgcaattttccattcattttacaatagctgcaggaacgtttagagattacgtaaaaggagattagaatccttttttagactggggacaaattatctttaaaaaaagaaaatattcttatgttttccttttaacattcctgttttattcccaaggaaaatgacatcctttatttacattaacattaatggaggatgacaatgtactgrctactttcttcttcttctttttttcttttttttgagacggagtctcactctgtcactcaggctggagtgcagtggcacaatcccggctcactgtaacctctgcctcccacgttcaaaagattctcccacctcagcctcctgagtagctgggactacgggcacacaccaccatgcctggctaattttttgtatttttagtagagatggggtttcaccgtgttagccaggatggtctcaatctcctgaccttgtgatgccccctgcctcggcctcccaaagtgctgggattacaggggtgagccacctcgcccagcccagttcttactactttctagagaaattaagcaaatgaaacaagttagctttaagtttaaatgcattttaccaagttttttatttcaagaatgtaaattcatcttaaaaactgatgggatattttgttctcagtgttcaatccaaatctaccttaacagctaaaaaaaaaatttttttttttttttttttgagacagtctcgctctgttgcccaggctggagcacagtggtgtgatctcggctcactgcaagctccgcctcctgggttcacgccattctcctgcctcagcctcccaagtagctgggactacaggcacctgccaccaggcccagctaatttttttttgtatgtttagtagagatggggtttcaccacgttagccaggatggtctcaatctcctgacctcatgatccgcccgcctcagcctcccaaagtgctgggattacaggcgtgagccactgcacccagccggaataacaatcttttaaagtattatttgatgtacgtaaatgatgaagacagccatattccaaacctgcagagcttccctacaatagtatgagaccaatagccaaagtgctggttgctcaacaatagatttatgccagttttttttgttctgtaattccttgcaatcttatctcccctagtaccttgcccaattatatacttcccacgtgcatccatgataactaacaaatgcagacagatggccaaaatgtgagttgaggaagtgttgagtacaaaaggagtttatctttccatttcagtataatttggatcataatctcagaattc

SEQ ID NO: 684021 - DNA, 1696 bp, Homo sapiens
tgataccaaccagatgtcccacaatgatgataaatttaatttatttccaatttctcaaactcttctacagattcaggcagcacagtcacagccattagctcactgagctggatgcatcattgaaggaacggaattgatcaggcagatagattgtagtgcatggctaagagtctcctaaggagggagatggcagaaatccagacatcaaatagatgatgaaatggccatttccattaaggtaacatcacatcacagatattaattaggaggcactataataaagttaagtggatgtgggggaaaatgctgagttaaaagtcaccccatatgtccttagcctgaggtaattacagatctgaaggtgagtcatggatctgcaattttccattcattttacaatagctgcaggaacgtttagagattacgtaaaaggagattagaatccttttttagactggggacaaattatctttaaaaaaagaaaatattcttatgttttccttttaacattcctgttttattcccaaggaaaatgacatcctttatttacattaacattaatggaggatgacaatgtactggctactttcttcttcttctttttttcttttttttgagacggagtctcactctgtcactcaggctggagtgcagtggcacaatcccggctcactgtaacctctgcctcccacgttcaaaagattctcccacctcagcctcctgagtagctgggactacgggcacacaccaccatgcctggctaattttttgkatttttagtagagatggggtttcaccgtgttagccaggatggtctcaatctcctgaccttgtgatgccccctgcctcggcctcccaaagtgctgggattacaggggtgagccacctcgcccagcccagttcttactactttctagagaaattaagcaaatgaaacaagttagctttaagtttaaatgcattttaccaagttttttatttcaagaatgtaaattcatcttaaaaactgatgggatattttgttctcagtgttcaatccaaatctaccttaacagctaaaaaaaaaatttttttttttttttttttgagacagtctcgctctgttgcccaggctggagcacagtggtgtgatctcggctcactgcaagctccgcctcctgggttcacgccattctcctgcctcagcctcccaagtagctgggactacaggcacctgccaccaggcccagctaatttttttttgtatgtttagtagagatggggtttcaccacgttagccaggatggtctcaatctcctgacctcatgatccgcccgcctcagcctcccaaagtgctgggattacaggcgtgagccactgcacccagccggaataacaatcttttaaagtattatttgatgtacgtaaatgatgaagacagccatattccaaacctgcagagcttccctacaatagtatgagaccaatagccaaagtgctggttgctcaacaatagatttatgccagttttttttgttctgtaattccttgcaatcttatctcccctagtaccttgcccaattatatacttcccacgtgcatccatgataactaacaaatgcagacagatggccaaaatgtgagttgaggaagtgttgagtacaaaaggagtttatctttccatttcagtataatttggatcataatctcagaattc

SEQ ID NO: 684022 - DNA, 1060 bp, Homo sapiens
tcttcacatttcatttataaaaaacaacttatcctaaagaagacaaatgattaaataaaacaaaaacctaaaactactcctccccagaaacagaaactgagatttttttattgttgttgcctacaaagtgttttaaaacaatttaaacaaatatttaaataacaaggcattccacatgtaaatccaaacttccagcttttttgaaaaatgggaagctctggcaacccaacacccacattctcacagccacaccagtatccatattcccaattagacacagttgactaatgaatatcggctggccctttagggttacgtgttactcagttctcacctgactgctcacttttaccctacctgcctacaccttgcatggtgagaactgtcaagcttctaacttttcccagtattccttccccatcatttttatgttcctcatctcctttctatgtttttgtttctgctcagcagcagccattacagaaaaggaaaaaaaaatgagtatcacaattgttcagtagacaaacattagtaccgtactgccacgtatttatgaactaaaaacattctggattattccactcaagtccatgaattctctaggaattgtgtctagaaaacaattggaaagatagcttgactgggagttaagattaagttctcaggcccagacatatcttaaatttacttgagactctgggcacatgtaggccatgtgacctctccaagtatccattgcacattttctaaaataaagcagggtttgagggggagacaggaaattaaactatatcagtgttctgaagatccatatggtcacacatctgtgcctttggagctgaggttgggaaccaagggcctacaggcagagttgccaatgctatgcccacttcagtgtgggcaggcctgctccctgccttgacatgatctaccagtccctgcttggtctcttctcctgtctaactgagtggccacacttcaagtcattstctccattctctgctctctagttttcttcccacttccaccagtgctttggcttgctccaagccattgtgca

SEQ ID NO: 684023 - DNA, 808 bp, Homo sapiens
tcccccagtttctgtgtcgatgggtacacaggaggaaccacatggtgataatgtatctttgttccaagctacatcattagcagaaatatttcttaaattttatcttttaacctaaatagttatttcatgrccatcaaagattctcaagctcttcgtagagatggattttgtctcagaacgaaatttcatgcttcattgtcttgagatgattgtgacttttagatgatcattatttgctttttttttgtaatgggggcattggggagacagcgacattgtaaaaacactgggttatttctattatggatggattcagggtgagtgtttctgaagatatagctatcccatttctgaagttggtaatgagagtattgttaaacaaaggtagaaattaaaaattcagaatatattttacataattagtattttaaagttgtgtgatttaagcaccattttaaagaatgatttgccatactgtaattcccactgtaaatctcgcctgtaatatatacattaaagcactctgagattgctctagaatgtgaattactaagtgctgatgaataattttgaataatgtgactgctttcaccattgagtggaaaattaagattgtggtattgctctatttagaaatgattggtttgtgagagtgaaactcacagctgttgggccccctccaaatcacggtgcttccaaggcagagcggaaactgggactcaaaaggtttttcacgctcaaatgcttctttgttgtagaaatgtttttcttccagttgcttagaatgaccagttccctggaaattatt

SEQ ID NO: 684024 - DNA, 923 bp, Homo sapiens
tgtctttctaaactaaaagccccaaactaggtaactaggtagagtacctaccttaaatataaggagtatataaaagagagtgggaagagccaggcacagaggctcatacctgtagtctcaacgctttgggaggctgaagcaggaggatcactggagcccaggggtttgagaacagcctaggcaacatagtaagaccccgtctctactaaaaataaaattagctgggcttaatgacacatgactatagtcatatctatttgggaggctgaagtagaaggatcacttgagcccagcagtttgaggctacagtgagctacsatcacgccactgcactccagccaggcccactcctgcagtgggccactgcactcggcccacagttgttttaataaggggttgttttttacaacactttataattgtaatttaggtttttgtgtgaacaagagagatcttgtctctaaaaaaaaaaaaaaagagaggaggccacacacggtggctaacacctataatcctagcactttgggaggccgaggtgggtggatcacttgagctcaggagttcaagaccagcctgggcaacatgctgaaaccctgtctctacaaaaaaatatagaaatgaactggctgtggtagcacactcctgtagtctcagctacctgagaggcttacatgggaggattgcttgaacctgggacgtggaggttgccattagctgagattgtgccactgcactctaccctgggcaacacagtgagagtctgtctcttaaaaacaaacaaacaaacaaaaaaactagctgggtgcggtggctcacacccgtaatcccagaactttgggaggccgaggtgggtgatcacctgaggtcaggagttcaagaccagcctgaccaacatggagaagccccgtctctactaaaactac

SEQ ID NO: 684025 - DNA, 636 bp, Homo sapiens
gcttataggtcctgttcattcatattcctcttagcatctctccatctgaagaaactagaatgctcctttcctctagaataggaggacagctctcacatgacagtcataagacctgcttgatatgcatccttttcaggggaagttcagacagtccttataagccccttataatmctattagatctcatgagaacttcttcagtatcacaagaatagcatggaggaaaccacacccatgattcaattacctcctactgggtccctcccatgacaggtggggattatgggaacttcaatgcaagataagatttgggtggtgacacagccaaaacatatcattctgctctggcccctcccaaatgtcatgtcctcacatttcaaaacacaatcatgcctttccaacagtcccccaaagtcttagctcattcagcattaacccaaaagtccaagtccaaagtctcatctgagataaggcaagtcccttctgcctatgagcctgtaaaatcaaatgcaagttagttacttcatagatacaatgggagtacaggcattgaggaaatacacccattccaaatgggagaaatttgaaatgatctcatttgactccttgtttcacatccaggtcacactgatgcaa

SEQ ID NO: 684026 - DNA, 613 bp, Homo sapiens
tagaccttaatgtaaagtaagcacaagggaaaagaaaaatgaggagaaatgccaaatgatcacattaacaaaacaatcaagttcttgattgcagtattaaaacggggaaactgctgtgttaactcatatgctctacacaaaggttaccaggggaaccatacttgcacacttcctggttctcaaaaatgtaccaatgtgatgtttgtgtctgtctcttttcttttcctttttggaaatcttaaccaaaaatctcctgtactcttgtggtttccttgttattcaacttgtaaattcatttttttaatgctyacatcacagaatccactaagctggcaatatataagaaggcactgatttttttttctccaaaagttaccaatgcagcatggaatgcaatttcttctccttctggagcccctaaaagtaaaatagtgtaaattgtttttgcctctaagtatgtttgatttttgtttactctcttcctacttctagattataagttcctccagggcaggcactagatctataattttctatataattccctatagaaattagacaggtctaaacccatagtgagagataaataattcttttcagctgttattacatg

SEQ ID NO: 684027 - DNA, 696 bp, Homo sapiens
taccttagtatatatttaaaagattataaaagatgatctccctaccaagagaaaacaagaagaaataagatccaggcaatggtcactatgagatacactgaagaaaagtgawttatttcaaaatccgactcaaagatatgagattacttagtgtgatattctccaggttcatccatgttgttgcatatggcagaatttccttttttaaggccctatgatattccattgcatgcatgtaccacattttctttagctcttcatccattcatggatattcaggttgtttccatatttggggtattatgaataatgctacagtaaacataggagtgaagatatttcttccagatcctaatttcaattcttttggatatacactcagaagtgggattgctggatcatatgttagttttatttttagtcttttgagaaactttcatactatttttcacactggctgtaccaatttacattcccaccaacagtgcacagggatttcaatttcttaacatccttgccaatagttgttatctttcattttgttttgttaataatacccatcttaacaggtgtgaggtgataactcattatgctaagtgaaatactccagtcacagaaagacaaattctgcatgcttccacttacatgaggtatctaaaatagtcacattcatagaaacatacagtagaataatgg

SEQ ID NO: 684028 - DNA, 1063 bp, Homo sapiens
aatttaaatagcattatggaaaatcttctaaaaagaatttgacatcattagagaacagaatgattctgaaatggaaactcatattgaattctatccagatgmttcaaatctaattacttttaaatttttgtcaatgattttccaaatggactgttttctccatgctacaatgcatttcttgagttagagtgtcaccttaagacgtaactgtggtacttgtattgctgttctcaggaatagtagctaaatggaaggtctcgagaatcagactcccttgaaatcctgactcctccatttcttatctatatgacttgtgtcagctcctttaacccctaattctcaaatttcttagttataaacatcaaaactggggggctaatttggaccctccatttaagcagtggtttttgttctgattactcccatccttaggcaatactgtaatcctttgaattctttgttaggaattgccagagacaacctggatttctttggttaatatttgttcatacttccaatgacctgcttgcagaattatgcaatgttagtattttttatctattgatgtttaaacttggaaatacctaaatgatattattggtaccaatctgtctagtaaagctggagcaccagtttttatgggcagacgttaaatgtcataatatgccagaagctcgtagcaagaagacaggaggagaccttcaggtgcaagtattcccaggttagaagaccagctgacatcttactccctaatgcttttggtgaaagtgaggtgttaaactgtgaatagattgtggtgaaatgttgtaatgaagtgggtatctggaatgatttacataagtcactgtcaaagcatacattctttgacagagtatacatcctttgatttagtaaaactgcagggtagctcccattaggttatgggatatattattgaaaccctttgaagattctgcaagtcagacttacctttatcttctatccattagcctaggcacttcacagaccaagtctgctgccaggttatcagaaccacattaagtagccaaattcaccctgaaag

SEQ ID NO: 684029 - DNA, 614 bp, Homo sapiens
tttttggcaacattgtaagactgatagtatcctcatttgctctttaagaaagcgaatctcggaatggttaaaaaatttactcaaagttacacatttaagcagtatatctgcctctgtagttactttatctttgtagaaacttcatatatgaaaaagaactaatcgaggatgaaaatgtgttaaaaaaaaaaaaaaaaaaaagcaacaaggcctaacttgttctcaggcagagggaaggatggtgaggaaatagaaaaagtgtcttgaaaggtaggcttgccaaatacataatttagaatgttaagggggcctcaaaaattgtggaatccgcaagtccaacaacagctgtgtctgacagaagttaagtgatttgccaaaaataaaaaactgagaagtgacaagttaagaaacaaagaccacaagggttrtggttaagaagtgacaacttaagaaacaaagaccctaggttaatcaacctagggttgattaacaagctttgattaagcacttactgcatgcaaagcagtgtgctaggctgcagagacataaaaacatacaatacacccgaggagatttgggccttcccttgggctgggagctgccctgtgctgttc

SEQ ID NO: 684030 - DNA, 635 bp, Homo sapiens
tgtctgccagaccccttggagaactggagatggacgtctatccccattctcctctccccttgcagactgatttggggttgggcctgctcctgacttctctgagtagccaccccctccacctcaccttcatttgatccaggcctcagtttccacccggccttggacttggtttaatcatattcacccatgttcaccacaagctgaacacagaccgatgtgtccaaagagaaccccgacccctcccagaacgcatcctccgtttgggattcctgatgttggtgaaaggcaccaccaggtatctgctcactgggtgagtcctgttggtcccagaactgcagcttatgtcactgcaatttactcacctgtcttcctgttccccaggaaaatgatcacacctgtatctaggggtcacccttgtcattctttgacactgtctctttcccatgcgctgtgcttagtgggggtggcccatgggccgtgtcagccatygcttgctcaagccaaaggctggatgaacaagtgactatcacaaagccaacaggggcccaatctggaaacttggctgcattcaattccagttgttccaaaagattggattgatttaataggaatgcttcctaacgcgtgaacaatta

SEQ ID NO: 684031 - DNA, 646 bp, Homo sapiens
gcaggtgcctgtagtcccagctactggagaggctgaggcaggagaatggcatgaacccaggaggcggagcttgcagtgagccgagatcgagccactgcactccagcctgggtgacagagcgagactccatctcaaaaaaaaaaaaaaaaaaaaaagaataccaccaaaatcaccgtcatatatcaacatgaaaaaatatacaaagtggctttcatattcatagaaatagcatgcaataatgaaaatatacaaagtaaagtaatcagtaagtctattaataaaactataattagccagagcccactgtccaaatcacaacattaggagaagtgatgtgataaaaraaccagtaaaatgcagttgttgagtaatttgggtctaaggtcaactgtaatgaaaataccagaacttaaccactgaggtcattaattacatctaagtgactgcattagagcattttgcctttttcttctatccaacttctctcttgtttatgctatcaaggcctatgcagccatcagatttgtgcaggcaaagatttgtgcagactgcaaaaatgattccaaaaagcatttaattgaaatgtgttaataaagttccctggagttttatcacatttttgtagaatgttttatgtcttaattta

SEQ ID NO: 684032 - DNA, 646 bp, Homo sapiens
gcaggtgcctgtagtcccagctactggagaggctgaggcaggagaatggcatgaacccaggaggcggagcttgcagtgagccgagatcgagccactgcactccagcctgggtgacagagcgagactccatctcaaaaaaaaaaaaaaaaaaaaaagaataccaccaaaatcaccgtcatatatcaacatgaaaaaatatacaaagtggctttcatattcatagaaatagcatgcaataatgaaaatatacaaagtaaagtaatcagtaagtctattaataaaactataattagccagagcccactgtccaaatcacaacattaggagaagtgatgtgataaaaaarccagtaaaatgcagttgttgagtaatttgggtctaaggtcaactgtaatgaaaataccagaacttaaccactgaggtcattaattacatctaagtgactgcattagagcattttgcctttttcttctatccaacttctctcttgtttatgctatcaaggcctatgcagccatcagatttgtgcaggcaaagatttgtgcagactgcaaaaatgattccaaaaagcatttaattgaaatgtgttaataaagttccctggagttttatcacatttttgtagaatgttttatgtcttaattta

SEQ ID NO: 684033 - DNA, 1373 bp, Homo sapiens
  misc_feature 110: n = A,T,C or G
acgttctactttaccaaacacagagaaacatgcaaaatagggtagaaataaacaaaaacatataagtcaaagcttatatttatatatcagatgaaccagtaacaaactanaaatcataaaagaacattttcttgtcattttctaatcattttatgtaatgtataccaatattcacttgtaattgagaaattcctttttttttttcaaatggtttccttatgccaaagagaaattcttgtctgtaaagtggggagattaaaattttgacactaaagaatactactggggaaaagagaggggtgtgggatgaaagaaaatcgagccagctgtacayctataggtaaccagtgtaggtcattagaacacaggcttcacactgcatgctgatctgcaaagtgaggacataccagtgacaactttggaatctgcatccagccacaggtaacagatgtattgcaccagactcagatctagattttgtgatgactatataatgaactagaagttcaaattagagaaagaaacaattcaaaatcagaagaaaggtaaaagcaagtggccacatgatcgcattaaaaaagaaaaaggcaaatatctcagtaagtacatctggcacacatagtcagaggaagccaagaaacttgaaatttaatttgaaatgagatattttttagcaagaaggatcatatcagcaagccaaggagataatattttaaaatttttgttttgttctaatgaaagaaaaaatatgatattaaaaatctagaaagttctttcttctatgacaatttttatgttttttaatccagcaaaacacagctctgttccttgtgtgtagtgttctttattgttcttctataaaaatgtaaagttcagggatgatggctcacgcttgtgatcccagcattttgggaagccaaagcaggcagattgcttgagcctaggaatttaaggccagcctgggcaacatgacaaaacctcctctctacaaaaaatgcaacaataacaaaaattagctgggtaggcatggtagtgtgtgccagcagtcccagttactcaggagactgagatgggaggatggcttgagcttgggaggttgagcctgcagtgagctgagatcacaccactgaactgcagattgagtgacagagtgagaccctgtctcaaaataaatgaaagaataaataaataaaactatactttagctctttcaagtctgatggtgaagaatgtcttattcagttttgtatctgaggttacaccactggtatatggatcaaagctttaactatttgtaattttcttcactgtatatttcagttatgtcagatattttttggcactgcacccaaagtcccagctacttgaaaagc

SEQ ID NO: 684034 - DNA, 1373 bp, Homo sapiens
  misc_feature 110: n = A,T,C or G
acgttctactttaccaaacacagagaaacatgcaaaatagggtagaaataaacaaaaacatataagtcaaagcttatatttatatatcagatgaaccagtaacaaactanaaatcataaaagaacattttcttgtcattttctaatcattttatgtaatgtataccaatattcacttgtaattgagaaattcctttttttttttcaaatggtttccttatgccaaagagaaattcttgtctgtaaagtggggagattaaaattttgacactaaagaatactactggggaaaagagaggggtgtgggatgaaagaaaatcgagccagctgtacacctataggtaaccagtgtaggtcattagaacacaggcttcacactgcatgctgatctgcaaagtgaggacataccagtgacaactttggaatctgcatccagccacaggtaacagatgtattgcaccagactcagatctagattttgtgatgactatataatgaactagaagttcaaattagaraaagaaacaattcaaaatcagaagaaaggtaaaagcaagtggccacatgatcgcattaaaaaagaaaaaggcaaatatctcagtaagtacatctggcacacatagtcagaggaagccaagaaacttgaaatttaatttgaaatgagatattttttagcaagaaggatcatatcagcaagccaaggagataatattttaaaatttttgttttgttctaatgaaagaaaaaatatgatattaaaaatctagaaagttctttcttctatgacaatttttatgttttttaatccagcaaaacacagctctgttccttgtgtgtagtgttctttattgttcttctataaaaatgtaaagttcagggatgatggctcacgcttgtgatcccagcattttgggaagccaaagcaggcagattgcttgagcctaggaatttaaggccagcctgggcaacatgacaaaacctcctctctacaaaaaatgcaacaataacaaaaattagctgggtaggcatggtagtgtgtgccagcagtcccagttactcaggagactgagatgggaggatggcttgagcttgggaggttgagcctgcagtgagctgagatcacaccactgaactgcagattgagtgacagagtgagaccctgtctcaaaataaatgaaagaataaataaataaaactatactttagctctttcaagtctgatggtgaagaatgtcttattcagttttgtatctgaggttacaccactggtatatggatcaaagctttaactatttgtaattttcttcactgtatatttcagttatgtcagatattttttggcactgcacccaaagtcccagctacttgaaaagc

SEQ ID NO: 684035 - DNA, 583 bp, Homo sapiens
tgaaaggctgaggtaggaaaatcctggaacccaagagtttaagaccagcctgggcaacatagcaagaccccatctctgtttttaaaaatgcagaatctcaggcaaccccaaacctactgggtcagaatctacatttttaacaagactcccaggttatttgtctgcaattcgtttgagaagcacaaccatagattacaatatggaaatggcatcctatggtctttgagtctggaatagaagtagcagcatactgccagtgggtatgtctggagatcctggagcacaggaatgagcatgggtggttttcacagccatagaatggccgtgtgctcttcaagcctgagrttgctgctatcaactccatgaatcctccaaaaattttcagctctgagttttgagtcattttcaggaccaggccatcttggttgtcattgactgagctaggggtttgtggcagacatcctcttcctccctcctggagacttttgcttctgtagggatctggatctctgaccggagtgtccccctggtgctgcacatctttgtgtcctacaactgcttttcttggcaagttacatctaga

SEQ ID NO: 684036 - DNA, 459 bp, Homo sapiens
ctagccatgcaaacttttggtgttcttaaagagctaatgactcaccatgtgcacacctatgggttgataataggtggcagtaacagatctgctgaagcacagaaacttgctaatgggatcaacatcattgtggtcacaccaggccgtctgctggaccatacgcagaataccccagggtttatgtataaaaacctgcagggtctggctattgatgaagctgattgtatcttggacattgggtttgaagataaattaaagcaaattattaaacttttgccaacacrcaggcagactatgctcttttctgccacctaaactcgaaaagttgaggacctggcaaggatttctccgaaaaaggagccattgtatgttggtgttgatgaagataaagctaatgcaactgtggatggtcttgagcagggacactttgtttgtccctctgaaaagagataccttctg

SEQ ID NO: 684037 - DNA, 1028 bp, Homo sapiens
gtcacatagtaagtggaacagcttgagatttaagcccaggtgttctgactgtaaataatttcattacaccaaagcagcagagataatggcaacgaccacactcttgggtgagttttaaaattctgactcctctttagattgtacctctcatggtaaatttctaggaggctgattctttttcacaatcaggagagttctcctgtcccatctggtattctgttcttccaactcttcagaagcccacaactctggggagaaagagtctctgttctgtctttggccataggttattttgattaggggtaaggacatgaggtaagaaaatcagtgtagatcaagtttatgcaaaatatcctaactacattaattcacagaaccatgataacaatcatgtgagtagggactcaggatacatttatgtttgtmtgggtgtgtgtatgcatgcatgtatgtatctatcacttgaactaagatgtaatccattagctacttaacagaaaataaaaacaacacagcaagttggaggactcacagtaccagatatcataacttattgataagtttaatgaaaacagtgtggcattattataaaggcagacaaacagagtaaagcaaagaaaacagagttcatacagtgtaagattttacttaagctctaggatggaaaagcatgcagtcatcttgcctaccacatataaaatagaatgatggatctaatttcaaacatgtcagtcataacaactgtgatatggtttaactgtgtccctatccaaatctcattttgaatcgtagttcccataatccccacatattgtgggagggacctagcaggaggtaactgaatcacaggggcggttatccccatgctgttctcgtgatagtgagtgagttcttacgagatctgatgctgggctcttctgataagggggtcttctgccttcgctcagcacttcttcctgcctccatgtgaagaaggacgtgtttgcttcctcttctgccataactgtaagtttcctgaggcctcccca

SEQ ID NO: 684038 - DNA, 1028 bp, Homo sapiens
gtcacatagtaagtggaacagcttgagatttaagcccaggtgttctgactgtaaataatttcattacaccaaagcagcagagataatggcaacgaccacactcttgggtgagttttaaaattctgactcctctttagattgtacctctcatggtaaatttctaggaggctgattctttttcacaatcaggagagttctcctgtcccatctggtattctgttcttccaactcttcagaagcccacaactctggggagaaagagtctctgttctgtctttggccataggttattttgattaggggtaaggacatgaggtaagaaaatcagtgtagatcaagtttatgcaaaatatcctaactacattaattcacagaaccatgataacaatcatgtgagtagggactcaggatacatttatgtttgtatgggtgtgtgtatgcatgcatgtatgtatctatcacttgaactaagatgtaatccattagctacttaacagaaaataaaaacaacacagcaagttggaggactcacagtaccagatatcawaacttattgataagtttaatgaaaacagtgtggcattattataaaggcagacaaacagagtaaagcaaagaaaacagagttcatacagtgtaagattttacttaagctctaggatggaaaagcatgcagtcatcttgcctaccacatataaaatagaatgatggatctaatttcaaacatgtcagtcataacaactgtgatatggtttaactgtgtccctatccaaatctcattttgaatcgtagttcccataatccccacatattgtgggagggacctagcaggaggtaactgaatcacaggggcggttatccccatgctgttctcgtgatagtgagtgagttcttacgagatctgatgctgggctcttctgataagggggtcttctgccttcgctcagcacttcttcctgcctccatgtgaagaaggacgtgtttgcttcctcttctgccataactgtaagtttcctgaggcctcccca

SEQ ID NO: 684039 - DNA, 1028 bp, Homo sapiens
gtcacatagtaagtggaacagcttgagatttaagcccaggtgttctgactgtaaataatttcattacaccaaagcagcagagataatggcaacgaccacactcttgggtgagttttaaaattctgactcctctttagattgtacctctcatggtaaatttctaggaggctgattctttttcacaatcaggagagttctcctgtcccatctggtattctgttcttccaactcttcagaagcccacaactctggggagaaagagtctctgttctgtctttggccataggttattttgattaggggtaaggacatgaggtaagaaaatcagtgtagatcaagtttatgcaaaatatcctaactacattaattcacagaaccatgataacaatcatgtgagtagggactcaggatacatttatgtttgtatgggtgtgtgtatgcatgcatgtatgtatctatcacttgaactaagatgtaatccattagctacttaacagaaaataaaaacaacacagcaagttggaggactcacagtaccagatatcataacttattgataagtttaatgaaaacagtgtggcattattataaaggcagacaaacagagtaaagcaaagaaaacagagttcatacagtgtaagattttacttaagctctaggatggaaaagcatgcagtcatcttgcctaccacatataaaatagaatgatggatctaatttcaaacatgtcagtcataacaactgtgatatggtttaactgtgtccctatccaaatctcattttgaatcgtagttcccataatccccacatattgtgggagggacctagcaggaggtaactgaatcacaggggcggttatccccatgctgttctcgtgrtagtgagtgagttcttacgagatctgatgctgggctcttctgataagggggtcttctgccttcgctcagcacttcttcctgcctccatgtgaagaaggacgtgtttgcttcctcttctgccataactgtaagtttcctgaggcctcccca

SEQ ID NO: 684040 - DNA, 1558 bp, Homo sapiens
tgtgagaacacttttcaactcagataagaacttcagaataaatacaactataaatttataagaaaagaacaaaggattaaaacctatttctctctctctctcacatgcacacacatgcacatacacaactggttagtaaacatgtaaaaatgcttaagctcatgaataattagagagatgtgaattaaaaaaataaaatgtcatttgtacttattggataagaaaaattgaaagcctcacaaatgatggtaaggatgtaggaacacagggatttctaatctagcatgagttcaaataggtacaaccacttgggagaacaatttgtctctgctaaggaaggtgcagaagtatatttcctactaattagcaatttcacttcagggcatttacactaacaaacacgtgcacaaagatgcatgcacaggcatgttcattgcaataaacaacaacgacaataaagcaataactaattttacccaatagggaaatggataagtaaactatggtatttcacaattaagttaaaatgaatgaactaggtctacactgtatccacacaacataaataagtccctaaaatgtactgttgagtaagaaaagccaagttgcaagagaatttacaatatgatgccatttatgtaaattaagaatgcacacaaaacaatagtaaatattgttttggatatacaaatatgtactgaaagcacaagatcatgcatggaaatgacacacaccagcttcaggcagaagttgctctgcagaggggaggaggggagggatgtgagtgaagggggccaaggctttagccgtatctttttgtctttcttttgtttcaagtgatctgaagtaaatacgagaaaacgttaacagttgtttaatctggatggtaagcatatggttgtctgttttatattctgcacctttccatatgtacaaaatctttcttaatttaaaaattaaaatgtagaaatatttttaatagcttagaaccagaattcaagtcctttccctctaaattgtctttaatacaatcaacatttatgatgtctcatgagccaggcatggragagctagctgttcagagagctgtggtcccaaattcaaagagtacaatctcctaacagggagaaagggaacaattatttctcattcttttcggttatcgtttgatgcctgtcactgagaaaaacaactgcagtttttcgctggaactaaatataaatacaccaaggaaagacctgtgtgaagggctttccccagggtcacattcttggctggcacatctacagatggcagtcacaggttccatttgactgtcaaaatgtcactggttgttggtgcctgttcttgtgtgtgtggcaccacgaggcctctgggacctaggccatgtcaccaactgcaggtagcagggttcctctgcagcggccatgttctgtcaggtggccccttggtagttgctacattggagcagaaagatgaagaaaggagctcacattctagtgggggagacaaatatgtagatcaagccatatggtccagagaggaggtagaaacaaca

SEQ ID NO: 684041 - DNA, 1558 bp, Homo sapiens
tgtgagaacacttttcaactcagataagaacttcagaataaatacaactataaatttataagaaaagaacaaaggattaaaacctatttctctctctctctcacatgcacacacatgcacatacacaactggttagtaaacatgtaaaaatgcttaagctcatgaataattagagagatgtgaattaaaaaaataaaatgtcatttgtacttattggataagaaaaattgaaagcctcacaaatgatggtaaggatgtaggaacacagggatttctaatctagcatgagttcaaataggtacaaccacttgggagaacaatttgtctctgctaaggaaggtgcagaagtatatttcctactaattagcaatttcacttcagggcatttacactaacaaacacgtgcacaaagatgcatgcacaggcatgttcattgcaataaacaacaacgacaataaagcaataactaattttacccaatagggaaatggataagtaaactatggtatttcacaattaagttaaaatgaatgaactaggtctacactgtatccacacaacataaataagtccctaaaatgtactgttgagtaagaaaagccaagttgcaagagaatttacaatatgatgccatttatgtaaattaagaatgcacacaaaacaatagtaaatattgttttggatatacaaatatgtactgaaagcacaagatcatgcatggaaatgacacacaccagcttcaggcagaagttgctctgcagaggggaggaggggagggatgtgagtgaagggggccaaggctttagccgtatctttttgtctttcttttgtttcaagtgatctgaagtaaatacgagaaaacgttaacagttgtttaatctggatggtaagcatatggttgtctgttttatattctgcacctttccatatgtacaaaatctttcttaatttaaaaattaaaatgtagaaatatttttaatagcttagaaccagaattcaagtcctttccctctaaattgtctttaatacaatcaacatttatgatgtctcatgagccaggcatgggagagctagctgttcagagagctgtggtcccaaattcaaagagtacaatctcctaacagggagaaagggaacaattatttctcattcttttcggttatcgtttgatgcctgtcactgagaaaaacractgcagtttttcgctggaactaaatataaatacaccaaggaaagacctgtgtgaagggctttccccagggtcacattcttggctggcacatctacagatggcagtcacaggttccatttgactgtcaaaatgtcactggttgttggtgcctgttcttgtgtgtgtggcaccacgaggcctctgggacctaggccatgtcaccaactgcaggtagcagggttcctctgcagcggccatgttctgtcaggtggccccttggtagttgctacattggagcagaaagatgaagaaaggagctcacattctagtgggggagacaaatatgtagatcaagccatatggtccagagaggaggtagaaacaaca

SEQ ID NO: 684042 - DNA, 1558 bp, Homo sapiens
tgtgagaacacttttcaactcagataagaacttcagaataaatacaactataaatttataagaaaagaacaaaggattaaaacctatttctctctctctctcacatgcacacacatgcacatacacaactggttagtaaacatgtaaaaatgcttaagctcatgaataattagagagatgtgaattaaaaaaataaaatgtcatttgtacttattggataagaaaaattgaaagcctcacaaatgatggtaaggatgtaggaacacagggatttctaatctagcatgagttcaaataggtacaaccacttgggagaacaatttgtctctgctaaggaaggtgcagaagtatatttcctactaattagcaatttcacttcagggcatttacactaacaaacacgtgcacaaagatgcatgcacaggcatgttcattgcaataaacaacaacgacaataaagcaataactaattttacccaatagggaaatggataagtaaactatggtatttcacaattaagttaaaatgaatgaactaggtctacactgtatccacacaacataaataagtccctaaaatgtactgttgagtaagaaaagccaagttgcaagagaatttacaatatgatgccatttatgtaaattaagaatgcacacaaaacaatagtaaatattgttttggatatacaaatatgtactgaaagcacaagatcatgcatggaaatgacacacaccagcttcaggcagaagttgctctgcagaggggaggaggggagggatgtgagtgaagggggccaaggctttagccgtatctttttgtctttcttttgtttcaagtgatctgaagtaaatacgagaaaacgttaacagttgtttaatctggatggtaagcatatggttgtctgttttatattctgcacctttccatatgtacaaaatctttcttaatttaaaaattaaaatgtagaaatatttttaatagcttagaaccagaattcaagtcctttccctctaaattgtctttaatacaatcaacatttatgatgtctcatgagccaggcatgggagagctagctgttcagagagctgtggtcccaaattcaaagagtacaatctcctaacagggagaaagggaacaattatttctcattcttttcggttatcgtttgatgcctgtcactgagaaaaacaactgcagtttttcrctggaactaaatataaatacaccaaggaaagacctgtgtgaagggctttccccagggtcacattcttggctggcacatctacagatggcagtcacaggttccatttgactgtcaaaatgtcactggttgttggtgcctgttcttgtgtgtgtggcaccacgaggcctctgggacctaggccatgtcaccaactgcaggtagcagggttcctctgcagcggccatgttctgtcaggtggccccttggtagttgctacattggagcagaaagatgaagaaaggagctcacattctagtgggggagacaaatatgtagatcaagccatatggtccagagaggaggtagaaacaaca

SEQ ID NO: 684043 - DNA, 1226 bp, Homo sapiens
ttctccacatatgtttggattcccccagataagaagggcgtttagatgctaggcagtcccacttctcccagaaaaaattagtacagtcttcaaactaaaaagatttaggacaaaygttgcaaaaagaggatgaaagcctacagtaggtgaagtaatttatttaaagtaattattttaataaatacctcatgtctagacacatttatttataagatgctaaggggacttggaaaagggattgcaaagtaactatcaatacgctttaaaatttcatgagaaattagaaaggaattgcaattgggtaggaaaatagtgggttctgctaatcaccagcttggtgttgaatattgacaattaataggatcacctggttaaacagtgttgcttgttgtgaacacccagaaaataattaagtgaatacttggagccacaatgaatttattaaggacaaatcattgtaaccgtctttatttcctttttgatttgactaatagatttgtagactactggtagacaacaaacaaatgttataggactgtgtctttataaagttaaaaatactcatatttatatttagtataaaaataaaacgtggtaactccagaaaaggtagagatttctactgaaataatgaacccaaacttctcactaaaaaacactaaaattatatgaaaggaataagaaagataaaaatccgcagataaagagattaggagaggaaacgacaggaccagcaatgacaacgcatttttggaaggtggaaaataaatggatgagtggtaactgacttggcagaacagagaaagctggaagcaagtgactccaaaaggagatgccaacgaaggaagacaatttgggcaacagaacgccaggaagtctcaggaatctgaagcaccgaggacctcagaagcaaggagtggagttgaaaacaggagaattgggtacaagccctgctcatgtacatttctggtaatcattttactgggttgcttttaaatagaaactgacagccaaaaatcatcagacatttgggaaaagcttctaacatgaaagacaggacaaacattaatatttgtaggaaataacaacaaacattaagatttataggaaataacaagtcaatacatttaacatcaccagagagggaagaggagacactccattctcaaaagatgacgtctactttacactgcatttgtagagctctgggagtttattgcacaggt

SEQ ID NO: 684044 - DNA, 246 bp, Homo sapiens; identical to SEQ ID NO: 683883

SEQ ID NO: 684045 - DNA, 1338 bp, Homo sapiens
tacttgaccagagcccaaatagcaacatcctgcttaactctgcaagcacttttcactacccaagatttccctgattgattaatttgcctattgtttgtctccctgcccctgtccctctctaggatgtgggcttaaggagagccaaaactttgttcatgtggtgaaccacagccatgtccaccatcttgaatactgtctgatacacaaaaggtactcaataaatgtttttaaatgattgaaacagtcatgaaaacagtcataaagactttggagacaactgcttctctctttttttgattcctatttattaaactcttttcccactaagaaattgctttatctatatttcagaaacaatttactagttgcatgaaaaagaagagagaagccagaagaaatccagagatacttggggggaaagaatagacagttgtatccattgggattctttcaataacaaaagttagaaaaacccattccaaatggctttrgtgatgaaaggaacgtattactttaggaagtgagaagctaagaggtaataatggcttcgggtgagacttcatccagtgacttgaacaatgccactcaaggtggaggtgacgttaccaagagagaagtatatggaggctgagcagcagaaacaccagatgtccactatagtagcctcccactgtagaaataggagcagagctctccccttttctgctgcaagaacacacatgtcccactggctctcgcctgctagacacaactagattgcaactattatttctacaaatcaaggtctctttaactctcaaatggggtagatagaatgcacacactgatagactcaggaagatgctgtgattaatgttcgtagccatgaggcagaattgagtctggcttcttgtgtctctggagttgggcaagtacagaacagttgcccggaaagaggaaggactcaatgggataatgtctgggtcatccagagattcctacctggagaagagctcagaaagcatggagacctttttattccccaaaatggcctcttcgaaaggacacagttctgcaaagttaatctttgctggcaaagtcagatacaaatgagcaggttaaggtccagtctgtcttacagagtatcagaaaagggctaaatgacaggcacactatcaaagtcccaaatgtgagctgtattccattaatgagttctgttttatattgctgcacacagacctgcacgcctcattcagtatcagtcatcactgagcagaacatcctcgacctccattttcctgcctatgagacagtataacctatagactttcacttgccattcacttactatttttctga

SEQ ID NO: 684046 - DNA, 1618 bp, Homo sapiens
gactgttctcactgtatcttcaaagctcagtgctgtgcctggaacatggcaggtgctcaacacttgttgagtaaatgatgaatggataattgtaacacttagatgcaaagtgccctaagtaaggttctttctctgcctctttgttttgaggaaacagatcacagcagctaggtgacagctgtctttgatcacctccacaccccaagaaagcctcccaacttagaatgcttcacgcaagaggaagctgaggcagttcacagcaaaggatatcctataatgctgtaaattgacaaagccctcaactggcagaggacactgctggcttcctctgttaaactgatagtttcccaactgctactgggttggcaagtcaaacttgctccatttgtacacagggttatgtatgtcaactggttttatgtgagttgctctggccttgcgcattagatcacaaacactgaagacagagactatacctgctctttaatatctgcctctgcccctagactttcattccaagcacccaggcaagcgagttgcaacatttttcacctctgcagacctgatggatatgacactcaaccaattaagaggttgggagggtggggaggagtgagccatgtagttcacagttcagactccccgccctggccgccctcccatggttcgggtgtggtgagtccccctggccttggaggtaggcaccacacgtgtggtcactcggcaaagacctgctgttcaccctgctgctgcccgccccccaccaccatgactcttacaattaattcagtgagttgctaaagtcacactccttgagacagacccacgaggactcatttccaggatgtttttggctccttgacaaccttttccgttgtggaagccagtaagtggcatttaaagtcacagagattttgttgtttgaaaaaaaaaaaaagattccactgattgaagagaaggtggagtctcttaatagcagaaatgcccacacccctgggtctctcccttccgttatgtacctcactttctggcctaagcttcacttaagctttttctctggtgtccctatgatttcctaatgtgtcagaaactatgaagttgtccatatttgtcagctcatgacacattctcaaatgaacgtggaagacagtcttggaaaatgcattctaataaaaagccttctcttccttcatgttgtacatgcactgaaagaaattcactagcattttctttcactcaaaatgccccacccctggcttaacgctaagaataagccaaatgsttaaaaaaaataaataaaaagatggccaagcatggtggctctgaaatcctagcactttgggagactgaggcaggagaattgcttgagtccaagagttcgagaccaccctgggcaacatagtgagaccctgtttctacaataaaaaacacaaaaattagccaagcatgatggcacgtgtgtgtgctctcagctactcaggaggctgaggtaggagatcacctaagcccgcggaagttgaggctgtagtgaactgtgactgcaccactgcactacagcctaggtgacagaaataaataaataaataaaaataaataaataataataaataataaatgc

SEQ ID NO: 684047 - DNA, 1199 bp, Homo sapiens
gttttatataacaggtgtagttttcaaattttatataacaataatatattttaaaggttataaaaattatacacatgtggcattaaaaatgccagactgaggtgttaaattcttaaaactatagaactaaaagtcgccttgaacatttctagattacacataagctgattatcattttattcatgcttatgcataaagaccaagaaatactaaaagtttcaaggagagtatttcttgcttgataaaatcagccaattctaggacaactgatactcatcaaatatacaaagtaattgatcacagcaaaatactgggttctattaacaggaataaagtgggagaaatgcagacaataatcttattttataaatgaaatttttaaaattatatgaagtcactgtggaaaaatatggtgaggtgaatactgaaatatatccttttctcaaaggaaggataatttcacacacgcagggcacttttacaaataagagtcacttcacttgcagcaccttccttttagcacaagggtcagcaaaytagcaccttgggccaaatccagcccactgcctgtttttgtaagtcaagtattttggaacacagccatgcttattcactttacagtccacagtgtcaattagctgggtgtgatgttgcacacctatggtcccaactagtagagaggctgaggtgggaggatcactagagctcagaaagtcaagactgcagtgagccatgatcacacaactgcactccagcctgggaaacagagtgagaccctgtctcaaaaataaattaatttatatagtccacaaagcctaaaatatttactaactggctctttgcagaaaaagctggccaactcctggtttagcagatgaaagatcctttgatacattttaataaaagttttacccaatatactgaaacgtttatattaaatacagatccccatgtacaatcccttggcaatattcagattgagggtccaatatttcagcactcaggcactgacataaaaatttaataactagcaatcttgttgctaacaaggtacagcatcaatatagcatgtagcttccatttgcaacacaggaaatattacaagaattttaacaagaactcttaagatgtcatcactgatgctttaaatacactttaattgtgaaataatcagtatactctagatctaacctcacttg

SEQ ID NO: 684048 - DNA, 1199 bp, Homo sapiens
gttttatataacaggtgtagttttcaaattttatataacaataatatattttaaaggttataaaaattatacacatgtggcattaaaaatgccagactgaggtgttaaattcttaaaactatagaactaaaagtcgccttgaacatttctagattacacataagctgattatcattttattcatgcttatgcataaagaccaagaaatactaaaagtttcaaggagagtatttcttgcttgataaaatcagccaattctaggacaactgatactcatcaaatatacaaagtaattgatcacagcaaaatactgggttctattaacaggaataaagtgggagaaatgcagacaataatcttattttataaatgaaatttttaaaattatatgaagtcactgtggaaaaatatggtgaggtgaatactgaaatatatccttttctcaaaggaaggataatttcacacacgcagggcacttttacaaataagagtcacttcacttgcagcaccttccttttagcacaagggtcagcaaactagcaccttgggccaaatccagcccactgcctgtttttgtaagtcaagtattttggaacacagccatgcttattcactttacagtccacagtgtcaattagctgggtgtgatgttgcacacctrtggtcccaactagtagagaggctgaggtgggaggatcactagagctcagaaagtcaagactgcagtgagccatgatcacacaactgcactccagcctgggaaacagagtgagaccctgtctcaaaaataaattaatttatatagtccacaaagcctaaaatatttactaactggctctttgcagaaaaagctggccaactcctggtttagcagatgaaagatcctttgatacattttaataaaagttttacccaatatactgaaacgtttatattaaatacagatccccatgtacaatcccttggcaatattcagattgagggtccaatatttcagcactcaggcactgacataaaaatttaataactagcaatcttgttgctaacaaggtacagcatcaatatagcatgtagcttccatttgcaacacaggaaatattacaagaattttaacaagaactcttaagatgtcatcactgatgctttaaatacactttaattgtgaaataatcagtatactctagatctaacctcacttg

SEQ ID NO: 684049 - DNA, 1199 bp, Homo sapiens
gttttatataacaggtgtagttttcaaattttatataacaataatatattttaaaggttataaaaattatacacatgtggcattaaaaatgccagactgaggtgttaaattcttaaaactatagaactaaaagtcgccttgaacatttctagattacacataagctgattatcattttattcatgcttatgcataaagaccaagaaatactaaaagtttcaaggagagtatttcttgcttgataaaatcagccaattctaggacaactgatactcatcaaatatacaaagtaattgatcacagcaaaatactgggttctattaacaggaataaagtgggagaaatgcagacaataatcttattttataaatgaaatttttaaaattatatgaagtcactgtggaaaaatatggtgaggtgaatactgaaatatatccttttctcaaaggaaggataatttcacacacgcagggcacttttacaaataagagtcacttcacttgcagcaccttccttttagcacaagggtcagcaaactagcaccttgggccaaatccagcccactgcctgtttttgtaagtcaagtattttggaacacagccatgcttattcactttacagtccacagtgtcaattagctgggtgtgatgttgcacacctatggtcccaactagtagagaggctgaggtgggaggatcactagagctcagaaagtcaagactgcagtgagccatgatcacacaactgcactccagcctgggaaacagagtgagaccctgtctcaaaaataaattaatttatatagtccacaaagcctaaaatatttactaactggctctttgcagaaaaagctggccaactcctggtttagcagatgaaagatcctttgatayattttaataaaagttttacccaatatactgaaacgtttatattaaatacagatccccatgtacaatcccttggcaatattcagattgagggtccaatatttcagcactcaggcactgacataaaaatttaataactagcaatcttgttgctaacaaggtacagcatcaatatagcatgtagcttccatttgcaacacaggaaatattacaagaattttaacaagaactcttaagatgtcatcactgatgctttaaatacactttaattgtgaaataatcagtatactctagatctaacctcacttg

SEQ ID NO: 684050 - DNA, 1467 bp, Homo sapiens
agcaaaataataaaaatgacaatgataataataataagctcctgtctgtgtttttgtgttctgtagccttagaaaaactgcttagtatctaaaagacatttgacagttatttgttaagtggacaagtgaaaacataaataaaaatgttttctttgtaaattctgttgaaaaaccacagaaatgaaatagaaacacttctgttgtgagcaccttaaagattaaaactacatctattccatcttgtctcctgcaacttataaaacctaacttacagaagctctttgataaataggtagccaaattaaaggtgtcctcatacagtttggattgtaccatgtattaggtgtccacatccaggtagcatactagcatttttgttactgtgaaacatttttatatttttattataatctgctgacccttgcattgggaaaattgtacattatgacaatcttttggcaaatggtagcagagcaycttcttctaacaaaattactgttatcatgacaattaaccagctggtggaagaacacatcttgttccaacaaagtaaatgcatctctttcaacttcaaaacaggaggaatgaagtcagtaatagtgagaccttgttggcacaagcatatgtaacatgatctgtgcttcactgttcttttgtgaacaaaaattccttacttttactttttaaatctatggtaggacctcccagagcagggctccacaactcccaggccacagactggtaccagtccacggtctgttaggaaccatgccacacaggaggaggtgcacagcaggcaagccagggaagcttcatctgtatttacagccactccttatggctcatattgcagcctctactctgcctccagtcagatcagtgatagcattagatattcataggagcatgaaccctgttgtgaactgcccatctgagggatctaggttgtgtgcttcctatgagaatctaatgcctgatgatctgtcactgtctcactttgcccccagaagggaccatctagttgcagaaaaataagctcagagcttccactgattctacattatggtaagtcgtataattattttattatatattacaatgtaataataatataaagtagcacaataagtgtaatgtgaccgaacaatcctgaaaccatccccaccttcccccagcccatggaaagattgtcttccacaaaaccggtccctggtgtcaaaaagattgtggacaactgacctaaagtaattcactatcacaagtcttacctgggttgctgttttcagaagagtattttggcatctgtttttctttgtagtcagaaactaattcgcaaattctatgtataaaaatataacaaataaaattactgttttaaaatactgatctggaaacttaccaaatgtaaaattcttagagtatttcaaacaatatcagaatatcagaacttaacagtattatcccatc

SEQ ID NO: 684051 - DNA, 1467 bp, Homo sapiens
agcaaaataataaaaatgacaatgataataataataagctcctgtctgtgtttttgtgttctgtagccttagaaaaactgcttagtatctaaaagacatttgacagttatttgttaagtggacaagtgaaaacataaataaaaatgttttctttgtaaattctgttgaaaaaccacagaaatgaaatagaaacacttctgttgtgagcaccttaaagattaaaactacatctattccatcttgtctcctgcaacttataaaacctaacttacagaagctctttgataaataggtagccaaattaaaggtgtcctcatacagtttggattgtaccatgtattaggtgtccacatccaggtagcatactagcatttttgttactgtgaaacatttttatatttttattataatctgctgacccttgcattgggaaaattgtacattatgacaatcttttggcaaatggtagcagagcatcttcttctaacaaaattactgttatcatgacaattaaccagcyggtggaagaacacatcttgttccaacaaagtaaatgcatctctttcaacttcaaaacaggaggaatgaagtcagtaatagtgagaccttgttggcacaagcatatgtaacatgatctgtgcttcactgttcttttgtgaacaaaaattccttacttttactttttaaatctatggtaggacctcccagagcagggctccacaactcccaggccacagactggtaccagtccacggtctgttaggaaccatgccacacaggaggaggtgcacagcaggcaagccagggaagcttcatctgtatttacagccactccttatggctcatattgcagcctctactctgcctccagtcagatcagtgatagcattagatattcataggagcatgaaccctgttgtgaactgcccatctgagggatctaggttgtgtgcttcctatgagaatctaatgcctgatgatctgtcactgtctcactttgcccccagaagggaccatctagttgcagaaaaataagctcagagcttccactgattctacattatggtaagtcgtataattattttattatatattacaatgtaataataatataaagtagcacaataagtgtaatgtgaccgaacaatcctgaaaccatccccaccttcccccagcccatggaaagattgtcttccacaaaaccggtccctggtgtcaaaaagattgtggacaactgacctaaagtaattcactatcacaagtcttacctgggttgctgttttcagaagagtattttggcatctgtttttctttgtagtcagaaactaattcgcaaattctatgtataaaaatataacaaataaaattactgttttaaaatactgatctggaaacttaccaaatgtaaaattcttagagtatttcaaacaatatcagaatatcagaacttaacagtattatcccatc

SEQ ID NO: 684052 - DNA, 1467 bp, Homo sapiens
agcaaaataataaaaatgacaatgataataataataagctcctgtctgtgtttttgtgttctgtagccttagaaaaactgcttagtatctaaaagacatttgacagttatttgttaagtggacaagtgaaaacataaataaaaatgttttctttgtaaattctgttgaaaaaccacagaaatgaaatagaaacacttctgttgtgagcaccttaaagattaaaactacatctattccatcttgtctcctgcaacttataaaacctaacttacagaagctctttgataaataggtagccaaattaaaggtgtcctcatacagtttggattgtaccatgtattaggtgtccacatccaggtagcatactagcatttttgttactgtgaaacatttttatatttttattataatctgctgacccttgcattgggaaaattgtacattatgacaatcttttggcaaatggtagcagagcatcttcttctaacaaaattactgttatcatgacaattaaccagctggtggaagaacacatcttgttccaacaaagtaaatgcatctctttcaacttcaaaacaggaggaatgaagtcagtaatagtgagaccttgttggcacaagcatatgtaacatgayctgtgcttcactgttcttttgtgaacaaaaattccttacttttactttttaaatctatggtaggacctcccagagcagggctccacaactcccaggccacagactggtaccagtccacggtctgttaggaaccatgccacacaggaggaggtgcacagcaggcaagccagggaagcttcatctgtatttacagccactccttatggctcatattgcagcctctactctgcctccagtcagatcagtgatagcattagatattcataggagcatgaaccctgttgtgaactgcccatctgagggatctaggttgtgtgcttcctatgagaatctaatgcctgatgatctgtcactgtctcactttgcccccagaagggaccatctagttgcagaaaaataagctcagagcttccactgattctacattatggtaagtcgtataattattttattatatattacaatgtaataataatataaagtagcacaataagtgtaatgtgaccgaacaatcctgaaaccatccccaccttcccccagcccatggaaagattgtcttccacaaaaccggtccctggtgtcaaaaagattgtggacaactgacctaaagtaattcactatcacaagtcttacctgggttgctgttttcagaagagtattttggcatctgtttttctttgtagtcagaaactaattcgcaaattctatgtataaaaatataacaaataaaattactgttttaaaatactgatctggaaacttaccaaatgtaaaattcttagagtatttcaaacaatatcagaatatcagaacttaacagtattatcccatc

SEQ ID NO: 684053 - DNA, 650 bp, Homo sapiens
cccaggacccaggaagcagaggttgcagtgagccgagattgcaccattgcaccccagtctgggctacaagagtgaaactattaaaaaaaaaaaaaaaaagggctgggcacagtggctcatgcgtgtaatcccagcagtttgggaggctgaggtgggcggatcacctgaggtcaggagatctagaccagcttggccgacatagagaaatcccatctctackaaaaatacaaaatatagctgggcgtggtggcatgtgcctacaatcccagctacttgggaggctgaggcaggagaatggcttgagtccgggaggtggaggatgcagtgagcagagactgcgccattgcattccagcctgggcgacagagcaagattctgtctcaaaaaaaataaaaaataaaaaagtaaaaaaaggaaattatcaatttacttttctgcatctcgtgtctgcgttagcagaatctgtctcataggagactgtggtagggagaattctaagctaaccctcaacaacccacatcctatgtaattcctccccacaagggtgggagggactgtgaatataatgggctatcagtcttgtgactgtgttaaccatatagcactttaagaaagggagattattgattaaggaagggtgatgtccttga

SEQ ID NO: 684054 - DNA, 1034 bp, Homo sapiens
cactattttgtctagctttgatgaacagaggccacattttcagagccattatcattgtccttggcaaatagcagtcccagcactggatgtttccaagaatgtaaaatcatgaccagatatcctggaagtcatgacagctagtcccttccccacattcctgctggggcggcctaatggcaggtgggaactgacttcatctgtgaggaccacacaagcaccccctgtgattctgatgcctgtccatgaaatctgtgtcctcctgtctctagggcatagaggagcagctggtgacttcagaggcagaggcccagcaaaaggagcacacatagaagagggggtgctttgggaaaatgtggtctgcacggcagggggggagtgctcttccctgctggcaccatgcagagctagctgaggagaagggagcagggtgggaagtggggttgggggctgtgcctctattaagagtgtcccttgactgctggtcctaccagggagagaagagaggacaggaaggtgaaggagagctaagcatgcattgtgtactcctccattgtgggcctccaagagcaagagggaggctgggggagccgggttgaagatctttgggccactggtgctgccctccatgcagccctagcaggacggcctgagagcgacaggtgggaagtggggttgcggggctgtgctctttgacagatggaggtgcccagggctgactgaagtggagggagggggcaggagagtggatcaggggccttggcttcatcaggtgtgcctctggacactgcaccaccagcccacccrggcctgggagagggcagagctcgggctggggccaagaggctgggccttcactagctgtgccctccattgctagccccagccagtgatcaccaaagaggagaggagagaaggcacaggattccagagggaaatgcggctcctgcctgtgtccctgctggtcccacagctgagcagatggtgctggcctagtgcagggaaaccacctgagatttacgcagctaacttgtctc

SEQ ID NO: 684055 - DNA, 656 bp, Homo sapiens
tggaarcacttcccggacagctgtgctcgctttggctcaagtaaacttaatattatattttgtgactcagcttatttctctaggtcaacaagtccttagaaatgaaaaaagaaaaaggggcaacctgcatggttacctggagtccccctcatcctggtcctgccactagaatcctacttgtagataatcccaggtatggtgaatagaggttggacaagagccaacaaggtggagcatctttgcctctgaccaaattgcctaaactgagttcattcccagacttaattttcctggaataaagaggatcttgggtaaacttgagggagtccttgtgtcttcagactgctgtaacaaaaatcccatagaatgagtggcttaaacgataggactttatttattcctcacagttgtgatgggtgggaagttcaagatcaaggtgttggaggcattcaaatcagagtgactccatcttgaataagggctgggtaaaatgaggctgagacctgctgagctgcaatcccaggaggctgggcattcttagtcacaagatgagataggaggtcgacagaagatataggtcataaagaccctgctgatagaacaggatgtagtcaagaagctggccaaaacccaccaaaaccaaaatggcgatgaaa

SEQ ID NO: 684056 - DNA, 1059 bp, Homo sapiens
ttcaaagctcggcgattaaccccgggcacgtccgccaacgccacccctcygcggctcggattacgctgagtcagcgagggcggccggaggagcccctggggagccgcggggaggacccggcacttggggggagggatccctcgggtcccaggggaaaggatcgggaagtcactccgacgctcccgaacctccgaggacacgttgcctggggcgcagattcctcgagggctgggacggcgacgagggcctgagggttcgattcctgttccagcttgctgagtccagcctctgggaacgcggcagggtccgaagggaggaggcaggcgcagaggctctgctgccctcactctgcggtgtgaccttgggctgcttgtttagcgtctcggagcctcggttagtaagggaaataatgaatgtgaaaggtggggctcttgccgggccctcgctgagtgtgaacggagtggaactttttggggcaatcctacttgcgtccctaaaaggggatgtaaaaccctgtttcctcctgaactcctcagggactattaaaaatgcaaatatgccaaacaaatgtggttattttttctccacctcgatgggaactgaggtctctctttttttttttctggacgttgtctagcgcttgtggcccaggctggagtgcaatgacgcgatcacggctcactgcaaccttcgcctcctgggttcaaacccgttcaagcgattctcctgcctcagcctcccgagtagctgggattacaagcgcgccccatcaagccctgctaatttttgtattttttagcagagacgggggtttcaccattttggtcaggctggtctcgaactcctgacctcaggtgatccaccgatctcggccttccaaagtgctaggattacaggcatgagccaccgcatccggccggatctgagttcttaaagaggcagcacctaaaagcttttaccgccaaaaagggtggaggtgggaggagtgtccaagggccacaaattccaacagaaaggcttccctccccccatcctcaaatgtggtggtaaaacaaggcc

SEQ ID NO: 684057 - DNA, 591 bp, Homo sapiens
ggctggtaaatcccagcagaaataaaagggaggaaaatccattcagctcctaggtccaaaaccaatgctcagtacacatcaaacctaaagtatacataatcaccaaccccctgctagaaactctttctacataaatactcacccaagggcctaatgaaatgtgcaaggatgtttgcggaagcactatgacagtggcaggaaacgagatgatatatggggaaagggaatcacccttatttctttctttctcatgggcagcagtcattactataatgctcctgacttgtttctaccccttccctctctctgtctgtctatcccccacctctctctcatgtgcacccacacgcawgcatgcatgcaggcacgtatacacaggtgaggccagccttacatgattgatgcatttggactaaggaactggcatgagttcggtcccctcctctctccttcctttgacagtgtgcccccctacagagagcctgtaactggatttccctgggccaggctgtgattagtggtcgaggctctactggaactggtccagtatgaactgttgtctctctaattctggggtttagttaggaaacc

SEQ ID NO: 684058 - DNA, 591 bp, Homo sapiens
ggctggtaaatcccagcagaaataaaagggaggaaaatccattcagctcctaggtccaaaaccaatgctcagtacacatcaaacctaaagtatacataatcaccaaccccctgctagaaactctttctacataaatactcacccaagggcctaatgaaatgtgcaaggatgtttgcggaagcactatgacagtggcaggaaacgagatgatatatggggaaagggaatcacccttatttctttctttctcatgggcagcagtcattactataatgctcctgacttgtttctaccccttccctctctctgtctgtctatcccccacctctctctcatgtgcacccacacgcaagcatgcatgcaggcacgtatacacaggtgaggccagccttacatgattgatgcatttggamtaaggaactggcatgagttcggtcccctcctctctccttcctttgacagtgtgcccccctacagagagcctgtaactggatttccctgggccaggctgtgattagtggtcgaggctctactggaactggtccagtatgaactgttgtctctctaattctggggtttagttaggaaacc

SEQ ID NO: 684059 - DNA, 1087 bp, Homo sapiens
atgtccggttatcttgcttttttcttcatgttagcagccattaagaataactgcctagacccattagttcattagtacttgctagtgatagtctaattaagtgtctttatgaactcacttaatttaaatatatttgttttccagtccattgcattctatgctgacgagtaatgctatattgactagtaaatatagcttgtaaagactaagcttgggaatctctgaaaagtcatctcaggaaacagacctagacaacatctgcactaagctagcaccctctgtcttttccagatttgctccttttttaaaggaaggctgtttctcactttaatttttctaagtggcgtttagcctcagcctctgtgctactccatatgctttcccagctgaactatcagaccaaccagctagataggttccctggtgattaattttttcttggagcccctgaggcctgtagtcatgcacatatggtgtctaatggcttggtggataactgagttaatggtgtgtgaaggtgacctgaataaatttggaatcaaaactaatacaggttatggcaagctggtcccatcataaatttggagtacttgtattcttgcctaagtaagtgttaggtgactcctttggagagaaactatgtggtcctgagttcagaaattctgttaaggacacaggagaccaaatgcctcctcttgtgaaccttgtattgaacatgttcactttccctttctcacattcaactggagttcagaaaaatatcatcattctccttttacaattattctttctaarctgagaacgtgaataactaggacaggcagggcgttggtgtggtttcatcactttttcccaatccttcctgcagttttttgcaagccttccattccacgcttcagactgccactgggtcttcagtttgtttttgattgttggagccatgtcaatgaaaaaaggctgagtttgacctctcaatatatggatactaatttattgataaaaatggagagtagaataatggtatttatggtatacaaatattacactgtaaagaaacacattcctatttttttgtgcatccccgtgg

SEQ ID NO: 684060 - DNA, 1087 bp, Homo sapiens
atgtccggttatcttgcttttttcttcatgttagcagccattaagaataactgcctagacccattagttcattagtacttgctagtgatagtctaattaagtgtctttatgaactcacttaatttaaatatatttgttttccagtccattgcattctatgctgacgagtaatgctatattgactagtaaatatagcttgtaaagactaagcttgggaatctctgaaaagtcatctcaggaaacagacctagacaacatctgcactaagctagcaccctctgtcttttccagatttgctccttttttaaaggaaggctgtttctcactttaatttttctaagtggcgtttagcctcagcctctgtgctactccatatgctttcccagctgaactatcagaccaaccagctagataggttccctggtgattaattttttcttggagcccctgaggcctgtagtcatgcacatatggtgtctaatggcttggtggataactgagttaatggtgtgtgaaggtgacctgaataaatttggaatcaaaactaatacaggttatggcaagctggtcccatcataaatttggagtacttgtattcttgcctaagtaagtgttaggtgactcctttggagagaaactatgtggtcctgagttcagaaattctgttaaggacacaggagaccaaatgcctcctcttgtgaaccttgtattgaacatgttcactttccctttctcacattcaactggagttcagaaaaatatcatcattctccttttacaattattctttctaagctgagaacgtgaataactaggacaggcagggcgttggtgtggtttcatcactttttcccaatccttcctgcagttttttgcaagccttccattccacgcttcagactgccactgggtcttcagtttgtttttgattgttggagccatgtcaatgaaaaaaggctgagtttgacctctcaatatatggatactaatttattgataaaaatggagagtagaataatggtatktatggtatacaaatattacactgtaaagaaacacattcctatttttttgtgcatccccgtgg

SEQ ID NO: 684061 - DNA, 1690 bp, Homo sapiens
ttcgttcccccagataggcaaattctagagccactcagtatcatacttgagacccattgcccaagatgaatcctaatttataccagatgagctcaagccaagactaaatgtggaggccagtacatgaaaggaagcagactcccctctttttagggcctgtgggccaataggtggaccacagactgggctggaaacaagacagcaagcttccccttattgtgccactgcaatcattgagcaccatctttttctcctagagaggtaagggtttgggaaggaagagacagaggtgaacaggctttgagattcttagcttccaagggtttttcagagccccacaaggtttgagtgggacacaacaaggaccaccccatacatatataccttgaccttgggtggttacttgagataaatgagccaaagactgcagagactttaaattgttctgaaatgtaaattttttcggctacactgctgaaattcacagagatttgcattttagaacttacctccaatmttggaataaaataatttttcatctttgttgaattttagacttcaggagcaagcagatgaggtagtttctttttgtctctctcctctctttttcttttttgtttgccttgcagttcctaagtgaatgtggtacttaggagcaatataaaaaggaggatgaatcaactataaaatataccttttaagttttacaactctttttattttgtttttgattagaatacacacttaggtagtcttggactttaagctcgtttgctggaagcaggtggaaagtgaaggaatgtgccgtgcccgagatccatgtttcccacaagtccataagtcctttgtggtttgtgtgcctgccctccttgtgtttttcactcagccagcttgtatttactgagcgctcgctcgccctgtgccaggcctctgccaagcctactggttctgccctggagaagttcacagttccagccatctgggaacatccagtgacagtgcagcccaagcaggaagatggttaaggcacagaggagacagcattgaccttcacctgggtggatccaggactgcctgcttgtaaaggaggaggaggcaggagtccatccagaagaaaaggagggaggagagaaggttcttttgggcattagcagtggcagaccaggtgtgagagagcaggagaggtttgggaatgagggataagttaagtgtaggcagagaccttagcagatgacagagggaatagttggagttaaagctggagagcttgcagaagcccagattgtgaagggccttgtgtgcagtgttgggaagctctttatataggggaacaaaactttgagttttggaacctagtgacaataaggaggatgggttgaaggaatgagagcctacagacaatgtcttagcccacagcctctaggaagcagggcctgagacaaagactaaagtaccaatattttgctgcagaaggagttgcaaatccagggcagcaaggatgaaggaaaagggaagtgcagggtaacagacgttgtgtctgaccatgctggctcctgctcaccaggggcccagagacacagcagcacattgggctctctggactctccccaaaggcctgcaaggaggagctctaccttggaatagtggaatagtctggaggagagaaaggaggtgggttttattcgccctg

SEQ ID NO: 684062 - DNA, 626 bp, Homo sapiens
tgacatatgcagcaccatggatcaatcttgaaaaygctatgctgagaaaaagaggccggactctgcaaaaatgttcatactgtaagatttcattttgatgatgctcaagaacaggcaaaattaacctatggtgattgaaatcagagtagagagtgcctatgggggatgcagactgaatggaaagaggcatgggggaacattctggggtgatgaatatgttccttatcttgcctgtggtgattttatagatatatacatttattaaaactcatcaggttgtatacttaagaactgggctgtgcagggtatgaaaattaagctaagttgcttaaatgtgtgctttctctgtgacttaagcacacagatgaaggacaattttcctttgctaatctttaacaactaaccctttgccaacgaccttcactggaacttactctacaacaagctcacatgcaacctaaagcacctcaaataacaccttcagtgacttccaatattacatttcattgtgggctggcagtgctaaagggtccatctctttagtttggttacaaaagtgcataaaactaaagtttaatcttcatcttggaaattgtaatcttggacttaagtacaaactgttggta

SEQ ID NO: 684063 - DNA, 2808 bp, Homo sapiens
ccacaaagctgctcaactcactatgctctcctccaccaaggaactaaaaaattaagtgtctaggggtatccacggggtagggaggatggagtattaaaagaaaaacaaccaccaccaccaccaagacccaacaataatccttctgtaactcaccaggagacatgactggaaaaacacttgcttaactacacagaaggtttcttcattgaaccaaagaaacaacaggccctttcaggaatgctgggcggagggacagaaaggtcacttggaggtttgattgcagttcaaacggaactgctttaaaatgatggtaggtcagtaaacacaggttttcataatggggtttacactggggacaccaacatcttggtgttgattttcccctcagaggggagagagggtgctgtgttgctgaatctgcaaggcagctgcttccctctccagcaggcaaaccatgtgcttcccccaagacagaccatagatggcagcaacaacttgctctcagtcctcagagcaaccacagcagctggaagccacgatgacaaaggggacaagctgcagttcagtggtgctgatttcctgggtccaaaaatgaaataactgctcacagaaatgcctcggcacgtaccatcacagtgggtgtacttcacactgctggagcactgcaggttgttgatgggcagggtccaggtctgggcttgacgaagctgtgtcctctctacccacataaaagcctgttctgtttcagcccccaggggcacattaagtgagaaaagataactgggccccagggcgtccttaccttctgccatcacagagcatcacccaaccacaaggccaggtgttgagaatgaaggagatggctcaactagatttagctgcaagcttggttctgtttttccctcggtcttttcacagcaatcccctccttctcaccagctttcctctcttagcagctgctctaattgaatgatcgtttagaaaggttcagctggagggtgccaggcccaagctgccgggctgcatgtgtcaggccaaccctgagcacagcccatgggtgacatactggagaaccaggtagctcctgaaggaattctgggggcacagcactaacatctcaggttttctggacctatttacttttgttttgaacagaatagggtactcaatctttttggttttttgaaagaataaattttcgtttcctgaaaactgcgtgatcacaatgccagagatgtccacagggcagggagctgggaagaaaagaagctttagaggccagcagagcccctaatgctggctgggtcatttcccccttgggcagcagaaccaccagagatcacgggtgggggtgatggtggtgaggaaaacatggtagccaggagcctggaagctgtaggataaagggaaagctctactaccattaggaagctcctgctctgcatcttactcttattatacagctaacagaaacgagattgtcagagagaacttctaactatagggtgtggcctggacatgtggctcaggggtgggggagatctgactgctgcagatgaaatggaaggaaacagtgggaatgtactagtcccacgacatcccagctttatggaatatgaagaatccagggttgttatctaccagacttgtgatctctgatttgccctctcctatcagactttggagaggatgtgccggctctccagtggaaaacaaatgacctctgtcaggccgtggttgggcataagatagcacagggagtccagatctttctgactgaggagaaaagtgccagaagacgcagatcaggatttctgcaggtttagtcagagaacccacagtgcctcctgacctctgaaaatcagggcctgccatgaagtgtggataccttcatcaactctaaatttcaaagaacagctttggaggaaatgcaagcagcacaatgtttgtctatttaaatagaaaatcttgggaaaaatttaattagcttctttagatcaatctgaatccattaattaaaaggatttgaggctgttgcttaatggacttgaatgtgacctaggtttaattatatctgaacaacaatatgaaccatctcttctgccctgtgggcaccagaatatctcagtacacataaaataaaaactttattaactctcccaaagcctcatatgtttagaatgaagcctaagcaaatacaacataatttcctggcaatgagtttttctgtcacacaattaggattgtaggaaatacattacttggaaacaccaaaataacagttttttgtcacttcagtcaataagcaatttttttcttgcttcctgtgtgcttattacctgtgatattacaatggagcagatgtattaaggtcaaatagcacatctgaggtttgaatgaaaacacaacaggcggagagagttcatcaccaccaaacagcactctgtaaacttccttgcacttatggtcttgccacacattggcaccttaaccacaytgaattgcttttcccctaatctcctgctattctgcctacttaaccgatttccttagcaaggaggcaagagacactgcaagaatgtacataagtgccaaggcttaactctgctggagaaaactggccatattttacttatacttcaccttgccttcagaagcccagaatctaatgaggatattccagatgacaaaatatctccatggctgcaactccagctccatcaatgagtatttctacacagagggattgtgggatctaggattaaatttctgaactaatgctaagcagagagaacagatgaggcacca

SEQ ID NO: 684064 - DNA, 610 bp, Homo sapiens
atagcattccttagctttattcctacaccgwtccatctttgtattgtgttgtcgtaagttgtatctttataaaatacatacttgtgtgttcattaacatagatgcataattattgttttgtttgtcttttacatcatataggaaacaaagagagattttacaaaccaaaaaatacgataatactagtttctatatttacctacgcagttacttttgctggagagccttgtttcttttttttttttttttttttttttttgaaaatacactaccccattttggaggacaaagtttattgctcaccctggcaccagcaggccacacaaggaatgccggctatctttcctccagctacctgcctcaagactggggatggaggatggtagctgttacataaaataccaaattttaccagcccttttcttcatcaagcacttccctgaaggctgcaactatttgactaaattccagagctccaaaatcactaattctgacagttcttgccagctcactagttgtttgctggaaggatgaattcctggagctttctaccttgtgccattttccatgacatgtaactggctgttattctaccattttgtggataact

SEQ ID NO: 684065 - DNA, 504 bp, Homo sapiens
tttttaatgacactgaccagtgctcyctgcagtgcccccttctcctcgccacatcccttttcccctgcgagctgcatggggctcctagctgtttgggagcaagacctgagcaagacagaggaaaccagagggtctggattgaggccccagtgagtcacactcaccaggggtccctggacacctctctatgatgtctgccttcctggagaaactgagccccgagctgttgctcctgcaagttcagggaggcgttgccagcgtgaggaggaaggctttccagggctccggccacccctcagtgtagccactgaaggcaaacacttacccacaatgtgctatgcgggctccggcccagcctgggatgtccacaggccctgacgacgaggctttgaactaaggcagagagagcaaggcctcaaccaccaagcccttcaaaggctggtgggaagtgctctctgttaattccaaccacatggcaaattaagttctatttagcccctttcc

SEQ ID NO: 684066 - DNA, 504 bp, Homo sapiens
tttttaatgacactgaccagtgctctctgcagtgcccccttctcctcgccacatcccttttcccctgcgagctgcatggggctcctagctgtttgggagcaagacctgagcaagacagaggaaaccagagggtctggattgaggccccagtgagtcacactcaccaggggtccctggacacctctctatgatgtctgccttcctggagaaactgagccccgagctgttgctcctgcaagttcagggaggcgttgccagcgtgaggaggaaggctttccagggctccggccacccctcagtgtagccactgaaggcaaacacttacccacaatgtgctatgcgggctccggcccagcctgggatgtccacaggccctgaygacgaggctttgaactaaggcagagagagcaaggcctcaaccaccaagcccttcaaaggctggtgggaagtgctctctgttaattccaaccacatggcaaattaagttctatttagcccctttcc

SEQ ID NO: 684067 - DNA, 837 bp, Homo sapiens
tttgggaggccgaggcaggtgggtcacgaggtcaggagatggagaccatcctggctaacacagtgaaaccccatctctactaaaaatacaaaaaattcgccgggcatggtggcaggcgcctgtagtcccagctactcaggaggctgaggcaggagaatggcatgaaccagggaggtggagcttgtagtgagccgagatcgcgagcctgcactccagcctggacaacagagtgagactctgtctcaaaaaaaaacaaaaaaacaaaaaacaaaaaaaaaaacagaaattagccaggcagggtggcgtgcacctgtaatcccagcttcttgggaggctgaggcaggagaattgcttgcacccaggaggcggaggctgcagtgagccaagatcatgccactgcactccagcctgggstacaaagtgagactctatctttaaaaaaaaattaaaaaaaaaaaaaaaattgtggacctgaaaaaaaaaaaaaaaaaaaaagaaactgataaaatggaacaaaatgtatgaagcaacaatcaatgtatatcacacactattcgcaacttcataaatagtgacaaagaggaatatcaaggagaaggcattgagtaaagtttgatgtaaaatacacacatacaaggccaggcgccgtggcttacgcctgtaatcccagcactttgggaggccgaggcgggtggatcacaagatcaggagttcgagaccagcctgaccaacatgatgaaaccccgtcgctactaaagatacaaaaaattagctgggcatagtggtgcatgcctgtaatcccagctactcaggaggctgaggcaggagaatagcttg

SEQ ID NO: 684068 - DNA, 729 bp, Homo sapiens
ttgcccactttccacccttaggcagacaggtgcagctcaagactgtagctggttcctggctgtcctgctggccaccctaggattctacagcatggcaggtgtgggagctgtgctcctattccactattatacacacccagctggctgcctgcttaacaagatgctcctcagtctgcacctttgcttctgtggcctcatctccttcctctccatcgctccttgcatccgcctcagtgggtacatgtcctacagcattccaggttttgggggccttaaaagcatagcaagtttcattacctccctaatctcaattatttgataaaagaatctctgcttccctatccccaccaaagsatggggagacagaagtacaagtgggggtagaaatggaggaaattaccagcctgtagactaaagcaattatacttactccccagagcaaccccgctctggcctcctacaagcttctgtcatcagctgctatatcatgtatctgactttctctgcactgtccagccgtcctccagagagaggtaagggacaggacctggattctccatgctaagacctttttttgcccctgccaaatacctagctcattgttaatacccatctcttctgttgtcccttcccagtaatccttcaaggacagaatcacaccctgtgcctgcctggcctgagtaaaatggaaccccaaacaccagatatctctctagcaatgctgagtgc

SEQ ID NO: 684069 - DNA, 1373 bp, Homo sapiens
taataagaacccatcccctcactcccaccaaccctactctgcccaaatgtttgccaagaaaaacgaaaggaaaaaagacatcatgtagagtgaataattaagatggatctaccaaatcaagctcgtcttcactctgcttcccacagcgaaatgccacacggtgtgtgggagagartgagtgagcacttctctgcctctcactgttccaactcccaccttccacaggcttcagcaggatgtggatgcaaaccttttgccccttactcactgatcactccctgggcctggattcacgcatcacgtcttccatgtttctctgcttgtctgtgtccaaaattcagggactgtacatattggactaaaggagatattacaaagggataacatggctctgggcagtgattctcaatgtggcagagaggggaacatcttccagggggagcccgtcagaatctgtatgtgttgggggtgctcctgtggtttgaaatggccctttgggccgggcgcggtggctcacgcctgtaatcccagcactttgggaggtcgaggtgggtggatcacctgaggtcaagagttcgagaccaccatggccaacatggtgaaaccccatctctactaaaaatacaaaaaaaaaaaaaaaaattagccaggcatggtggtgtcggcgtgtaatcccaattacttgggagaggctgaggcaggagaattgcttgaacccaggaggcagaggtggcagtgcgccaagatcgtgccactgcacttcagcctggctgacgagagcaaaactccatctcaaaaaaaaaaaaaaaagaaaagaaaaggcccctttaaagtttctgatttgctccccttctcctcccacccaagggaacatgatcctgctcacactgagaaccactgtctttccaaggcatcattattgatggcaggtaatggcctcaggtgaactggaatagaaacaaggctttccactgctgggcagggttccttttgatttctggtgataaaacagctgcagggaggttaaaggcaaggccacagggcattctcaggcaatgtcataaaactagatgggaagagggaaaaggatacaccagtatcctaaagaaacaaaccatagttgagggcaagaggagatgagctcatgaaagaatcaactgacagcttcaagagagagaatgagctgcaccagggctccccctccctttctgccacagtggcttccatcgagctttgtgtttggttcatttaagaagataaccagtgactcaatgttgttggtggaaatatattccacatgactcatagcatccttagacctattcacaagagaccctggcatgttctcccctgccacacaagggcctaaggaa

SEQ ID NO: 684070 - DNA, 559 bp, Homo sapiens
tccaccctccaagaagttacagatgttgtcatcccgcttgaggactagatggaaagtctctcgaacaatctgctgttgaatttcttctggctatgaaacaaaaagataagtgaatcagtgggcaagcctgaaaaactacatcccatccatggggatggacaagggaagaagtgtttctaagctgggaacatctaaacatttagtacttgtttctagaaatgataaaaatgatgagaaaaaatargagtgaatctatgaaagatgggtgacaatgctctgatacaggaattaagatagggtatatttacctaaatatctaagtcactaaccattactgtcctataggtaagctgatatttaaacaagaaaaggaacattgataaactctcatacaaagtcagagaataactggaaggcctgatcctgaaatattttgtcttcccctggaaaacatctatgacaaagatataataaatctcaacaggtctaacattttaagaaggtcaagatgtgggccaggcacagtggctcacgcctgaaattccagcactttaggagg

SEQ ID NO: 684071 - DNA, 853 bp, Homo sapiens
ccatgtcagccaggcttttcttgaacttctgatctcaagtgatcctcmctcctcagcctcccaaattgctgggattacaggcgtgagccaccacgcccacctgtaaccattatttttaagattgctaccattggatagttctgtcatggtccaacttttggatatttaaaattgatccctgtgtggctaacagaattaatgtttccaaaaatgttgaaaattatatagttctcttaattccccacctctaactatatttttgggttatttctttaggaacagatgcccaggagtcatattactgagaatctagaaatcttttgcaaagttcttgttatattgccaaattgcttcccaaaagggttgttctaaaccataatttcaccagcaatgtaggggagaaccatttttatgctgcccttgtgagaattgggtatgaaaacatttttaaaatgatttttgatgaggtgaaaataatatttgaatatattttaatttgcctttcccccacttatagtgagcttaaacattttttccttttcctagctgtatttctccctttgttattcgttctttcgtccatttatctactggggagatggggagtgttatctttttagtttatcagttatttgcattttaaatataaccatttgccatattttaacaacgatttttccattaaataattctttttataaaaaaactttatatatctgttgatgttttgtgatttttattgcttctaagctaatacagatttttggatcttattcaatttcgctttcttctgtttaggttattatctggttttatacctaactacttattttcaaattgctaaccagttatc

SEQ ID NO: 684072 - DNA, 853 bp, Homo sapiens
ccatgtcagccaggcttttcttgaacttctgatctcaagtgatcctcackcctcagcctcccaaattgctgggattacaggcgtgagccaccacgcccacctgtaaccattatttttaagattgctaccattggatagttctgtcatggtccaacttttggatatttaaaattgatccctgtgtggctaacagaattaatgtttccaaaaatgttgaaaattatatagttctcttaattccccacctctaactatatttttgggttatttctttaggaacagatgcccaggagtcatattactgagaatctagaaatcttttgcaaagttcttgttatattgccaaattgcttcccaaaagggttgttctaaaccataatttcaccagcaatgtaggggagaaccatttttatgctgcccttgtgagaattgggtatgaaaacatttttaaaatgatttttgatgaggtgaaaataatatttgaatatattttaatttgcctttcccccacttatagtgagcttaaacattttttccttttcctagctgtatttctccctttgttattcgttctttcgtccatttatctactggggagatggggagtgttatctttttagtttatcagttatttgcattttaaatataaccatttgccatattttaacaacgatttttccattaaataattctttttataaaaaaactttatatatctgttgatgttttgtgatttttattgcttctaagctaatacagatttttggatcttattcaatttcgctttcttctgtttaggttattatctggttttatacctaactacttattttcaaattgctaaccagttatc

SEQ ID NO: 684073 - DNA, 853 bp, Homo sapiens
ccatgtcagccaggcttttcttgaacttctgatctcaagtgatcctcactcctcagcctcccaaattgctgggattacaggcgtgagccaccacgcccacctgtaaccattatttttaagattgctaccattggatagttctgtcatggtccaacttttggatatttaaaattgatccctgtgtggctaacagaattaatgtttccaaaaatgttgaaaattatatagttctcttaattccccacctctaactatatttttgggttatttctttaggaacagatgcccaggagtcatattactgagaatctagaaatcttttgcaaagttcttgttatattgccaaattgcttcccaaaagggttgttctaaaccataatttcaccagcaatgtaggggagaaccatttttatgctgcccttgtgagaattgggtatgaaaacatttttaaaatgatttttgatgaggtgaaaataatatttgaatatattttaatttgcctttcccccacttatagtgagcttaaacattttttccttttcctagctgtatttctccctttgttattcgttctttygtccatttatctactggggagatggggagtgttatctttttagtttatcagttatttgcattttaaatataaccatttgccatattttaacaacgatttttccattaaataattctttttataaaaaaactttatatatctgttgatgttttgtgatttttattgcttctaagctaatacagatttttggatcttattcaatttcgctttcttctgtttaggttattatctggttttatacctaactacttattttcaaattgctaaccagttatc

SEQ ID NO: 684074 - DNA, 853 bp, Homo sapiens
ccatgtcagccaggcttttcttgaacttctgatctcaagtgatcctcactcctcagcctcccaaattgctgggattacaggcgtgagccaccacgcccacctgtaaccattatttttaagattgctaccattggatagttctgtcatggtccaacttttggatatttaaaattgatccctgtgtggctaacagaattaatgtttccaaaaatgttgaaaattatatagttctcttaattccccacctctaactatatttttgggttatttctttaggaacagatgcccaggagtcatattactgagaatctagaaatcttttgcaaagttcttgttatattgccaaattgcttcccaaaagggttgttctaaaccataatttcaccagcaatgtaggggagaaccatttttatgctgcccttgtgagaattgggtatgaaaacatttttaaaatgatttttgatgaggtgaaaataatatttgaatatattttaatttgcctttcccccacttatagtgagcttaaacattttttccttttcctagctgtatttctccctttgttattcgttctttcgtccatttatctactggggagatggggagtgttatctttttagtttatcagttatttgcattttaaatataaccatttgccatattttaacaacgatttttccattaaataattctttttataaaaaaactttatatatctgttgatgttttgtgatttttattgcttctaagctaatacagatttttggatcttattcaatttcgytttcttctgtttaggttattatctggttttatacctaactacttattttcaaattgctaaccagttatc

SEQ ID NO: 684075 - DNA, 599 bp, Homo sapiens
ttttctaactcttggggcaagtccaatttgaaggttttcttatgmttcgttactcaaagtgtggtccccagaccagcagaaatgttattgcctgggtgcttactagacttgcatctcaggacttaacctatacctgctaaatccgaatctgtattttaacagcattcacagctgattcattgcaaatgaagatttgagaagcaatgctctagagctttaagttattatctgtcttaattgctggtttctccctctcttacccttttaaccatacttcttctgaaactcatatgtataattagaaatcaaaggtgagttatcaaagtgatttcatcagagttgagctttcttatgcacgtagtaagtgaaaaaataaggccagacatggtggctcacacctgtaatcccagcactttgggaggccaaagcaggtggatcacttgaggtcaggagttcaagaccagcctgaccaacatggtgaaaccccatctctactaaaaatacaaaaattagctgggcatggtgacatgtgcctgtaatcccagctacttgggaggctgaggcaggagaattgcttgaacccgggaggcagaggttgc

SEQ ID NO: 684076 - DNA, 599 bp, Homo sapiens
ttttctaactcttggggcaagtccaatttgaaggttttcttatgattcgttactcaaagtgtggtccccagaccagcagaaatgttattgcctgggtgcttactagacttgcatctcaggacttaacctatacctgctaaatccgaatctgtattttaacagcattcrcagctgattcattgcaaatgaagatttgagaagcaatgctctagagctttaagttattatctgtcttaattgctggtttctccctctcttacccttttaaccatacttcttctgaaactcatatgtataattagaaatcaaaggtgagttatcaaagtgatttcatcagagttgagctttcttatgcacgtagtaagtgaaaaaataaggccagacatggtggctcacacctgtaatcccagcactttgggaggccaaagcaggtggatcacttgaggtcaggagttcaagaccagcctgaccaacatggtgaaaccccatctctactaaaaatacaaaaattagctgggcatggtgacatgtgcctgtaatcccagctacttgggaggctgaggcaggagaattgcttgaacccgggaggcagaggttgc

SEQ ID NO: 684077 - DNA, 650 bp, Homo sapiens
atgcctggtgcatagtatggactcattaagtatttattgatagttgaatgaaacactcttctgaattgctaaaggacagtatatacaactttcagctaggcattcagtttagtcccttaatgaacagggaaggcagggagggagaaaaagaaggaaggcgagaaggacagagaaagtctatgaaaatgagaaggcagcttacttccccataaaagtgaactgtctcttctactatacatgccccctcccaaaataaaaagagaaacaactgctcctttgcagactggtcttcacatcagtggagcagtttatgcctcgaggtttgaaaatatttgctataacatttgcaaagaccttcctctaaagctgggaagaacactatagacatgtaaaacaccttcataaacattttaaaaaatgtattaggagagtagaaagtcaaagccaattttttaaactcttcttttcaatgtagaaacttggtttttaaaagttgaaaagggtttgcttcatcttcagaagtaatggtctctggatcaacaataataccataatgaggctgggcatggtggctcatgcctgtaatcccagcattttgggaggccgaggcrggcagatcacttgaggccaggagttcgagaccagcctgg

SEQ ID NO: 684078 - DNA, 650 bp, Homo sapiens
atgcctggtgcatagtatggactcattaagtatttattgatagttgaatgaaacactcttctgaattgctaaaggacagtatatacaactttcagctaggcattcagtttagtcccttaatgaacagggaaggcagggagggagaaaaagaaggaaggcgagaaggacagagaaagtctatgaaaatgagaaggcagcttacttccccataaaagtgaactgtctcttctactatacatgccccctcccaaaataaaaagagaaacaactgctcctttgcagactggtcttcacatcagtggagcagtttatgcctcgaggtttgaaaatatttgctataacatttgcaaagaccttcctctaaagctgggaagaacactatagacatgtaaaacaccttcataaacattttaaaaaatgtattaggagagtagaaagtcaaagccaattttttaaactcttcttttcaatgtagaaacttggtttttaaaagttgaaaagggtttgcttcatcttcagaagtaatggtctctggatcaacaataataccataatgaggctgggcatggtggctcatgcctgtaatcccagcattttgggaggccgaggcargcagatcacttgaggccaggagttcgagaccagcctgg

SEQ ID NO: 684079 - DNA, 1470 bp, Homo sapiens
tggcagaagtggaagaaaatctgggtataagtagatccatgcagttctgacctgtgttgttcaagggtgaactgtactcacagtgcgggtggaaggatcaacacaacttaggacataacagctaattgctttactgaacatatactatgggctagagatggttctgatgatattacgtgtagtaaatcataatcctgaagacaaccctaagaagtagtgtcccattatttcccccattttacagatgaggaaactgaggcacaggtaaaaaaaattccaggggcacaactagtgttagatttgggttatatcttcaggcaagcccaccagagcctgagccgtactctctgtgtctggcgttgagaaaaaacaaacaaacaaacaaacaactgataagatgycagcttgagaaatggcgtagagcttcagtctgactttatgcctctgggaaacatcagaaagggggataaagtgtcaggaactccactgcagtgatatcacctacatgaggaaattgatcctgtggacgcagcatcacttaccagcctgaagacactgcaccaactgcctgattaacagcaataatgataataatactaacatccaccatttattgacaaattcctattactgtcaatgtctccctattgttataaattaagcccaagctcctttgtgcagtgctcaaggaccttcgtaacacaagatctgcctatttcttcagactcatgccgcatatatccatcctcacactgtaagctccagtgatattgatgggttcattgctcctctgcacccttcaatttcagggcttcacttacactcttctcccatcttgaacgtcctttatgctctctacacctacgcaactctttcagccttgattcaactattcccatatccaggaagactccgcatagcacacagcttaggtgaaataccactcctctgggtctctagagcaggaagggtttacatctgtcttcatatttactgactataataactacctcagtttgtacatctaacattcaccaagtattgaaattctgagggcaaaatctgtcatattcacctgtaccctattgtccagcacagcacctgcacaggctgtgtcaaaaagtgacagttggcattgtgtatcagaccctgggtatggcaccttgaatccagttctaatctcagtataacctacgagtttgagattatcgagccgtatgtactagttcattctcgcattgccataaagaaatatctgaaactgggcaatttatgaagaaaagaggtttgattggctcacagttctgcaggctgtataggaagaatggcagcatctgcttccagtgagacctaagggagcttttactcatggagggaggcagaagaggggcaggcaccttacgtggcaggaacaggaccaagagaacaaggcagggggcagggggtgccacacacttttcaaaaaccaga

SEQ ID NO: 684080 - DNA, 880 bp, Homo sapiens
ctcaagtgacaattagtaagaccttaaataaagaaggatagatatatctgaatctacaaaagttacacagcattggaaaaaaaaataatggccaagtaaatttaagacctaggcatatatgagctagtaaactcacagaaggtacagatttgtattctgcataatgtatagaatacattttacatttgtaaaatgtattctatagctgtttcgattgtttttgacaaatgagagggatagatgctagaaaaggtactcagttctctgaaatgaagttcttctctgggaataccaaacgaccatattctcagtgcagtatatttcatatttgcatgacattgtatagcacatgctgtctctatccatcatcctgatgcatcttctagtctgtaaattatgctggtttttgtcagcagagtgagaactagtcattaaggaatgtgtaattaaacctcaacatcccagttctcattccccctctgacaggsggataaaccagggatcattactgctatcaggggctgctcagtggaaagagaaacaaggggaagttgggtgtgctacgctgatgtgctatcattggtaattgatttgctggcgtaaattccatgtctctacatttctaattgcttttgtgcatattcttgggggttgattaatgccatctgttcacaggatcagctgaattgatagagttttaaaggatgacaacagtaatgttgaagatagaaagaaagtgaagggaaatgccaaaacactgcttgtgagttatattatttttaactatccacctttagaagcagaaatatccttctaaaggcaatccaaagcaaatagcagtctaaagaaatgtgccaaacagactgatgttatgtaggta

SEQ ID NO: 684081 - DNA, 654 bp, Homo sapiens
aggcagtcttttattccccctttaacctgattcacctagatggaagtattgacagtgtgcatgctcagacagggagctagtgataaacggggtcatccaaggttatttgagtccccaagaatgctaaccattttggatgtcctcataagtatacagcagaaattggacacagtgtccctgaagaatatcactaaggcaaatatttacacacatttatttttatgagtgttatgcaatacgttaggttacatcaaatgcaagtttgtttttctttctttaatggcarttttctccaatgcttttgatatatcaatgtgcaagggaggatgtctaaaactgggatagtatagtgcttcccccatttgcttagccaaatatctcatctcacgacccaggcttgctgctctgcagaggtcactttgagaaacgctgatttcagggctttttgctttatcactgttaacgtccctatgatctccttcatttggtaccacaacaagactctgagtttttgtccttttattccctttgaatgtctgcggcaacaaggaaatgaggtgggaaactattcattgccatcaggaaggcttcatgttgctctgtgtctctggaggctgcaatacgaatgcctcagaaaggcacaccgcttactca

SEQ ID NO: 684082 - DNA, 601 bp, Homo sapiens
ttttttctttctttttttttttagagggggtctcgctctgttgcccaggctggaatgcagtggcgcaatcttggctcactgcaagctctgcctcctgggttcacgcggtagtgagaatattttcaatcatgagatgtcctgtaaattttagaaattatgttcaccaaagtaatttagttaaaaactaaataaaaatataataaagtagcttataagccttgacaacctgagacagttatcctgtgaaaccttggtgtgaggcaaggcatgggcagtgtgagtgaaagtgcccgcagccagcgtggccatcaaccaaacattccttctgcacagatttattaaacctcccayatgaatcagcatcgtgttcgcaaaggctaacggccggctttattcggcatctcagaaacatttctgcctcactactctccctttggaaaagtcactgttgaagatatccacctagatgcattgatgaatttaaggacgtgcattatcttggagaagaggaacactgaagggtgcccgagcccaagcctctatgccctgcaggagttccctctgagagaagccgcccaggccacttgcctcttggtgacag

SEQ ID NO: 684083 - DNA, 622 bp, Homo sapiens
tcggatatcaaataatgaatgcacttttacaattgccaaatgttctatttcaaggaaatattatctattaatttttctacaagttattaataaaaatatccaatgtttatcatgtacagtactccctctatccatctggaaggggtagctcttaagtactaatagatgtaattcgaatcatactgtgaaattcaaagtaaaaataatatatacttctgccattaatttaagcaattcccttaatgtctatggggataagttttcctgttgwcaaatataatattgatactctctatctttattccaggaatattatgaagctaaaatgaattaaaagatattaggaaacaaacaaagtaatactggaaggtagcattttcaattttgatgactattattaacaatttttctttcaaaggtaattgttttccatggaaaaggaaaacaatgctatcactaattaccttaatattaatattatgcataatgatttatcacatgccaattatacaacaaaaatgtatatattataaaatatctctacaagctctgtgagatagacactcttgctgaccccgctaaaatccacaactcttccccctcccttttttttcttttgcta

SEQ ID NO: 684084 - DNA, 1206 bp, Homo sapiens
ggtttcacctcgcagcactgctattttatcttttttctgaatcttcagtactagctaacatcccgactctttgtgagagacctaactgtagcacttctcaagatattttttcaaagatatttccctttgtttgaagaattcaaatgccagttagaataatacttttatttttcacagaaaatggactgtatttaggaatctaggttaatctctcctttctacaagaaagtacagatacaaggagcagctcagttgatcactatagtctgtggtaactgccatttagcatcaagatggaaaaggatgtacagccagccactcattaactacacccctgtttatcttcatgccatggatcctttttagaaattcacttgtttagtattttccaaattgctagtcatgaaccattaatggctcaaggctgtgatattttttttttaaatgaactggaaatatactagaaaagataawgtaagtgtgagtacctcacatatagaagtactgctaattgtttaacggaaattttgacttggatgtatatgtacatttacgcataggagttttagattacaatatttaacttatgctttattccaattaaaaattaaaaatctttaaaataaactgcataagttgtttgctaattattcatttaaaaagaatgtaggttttcccctactaaacttctaagtgcttgcttttgaaatcaaactgagaatttgcataattaaaattgttttcatttgtattatgaagaagtatgactataggtctcttattttaataaggaggttttcttacatttgtatatgtgtatttgtgttttgcattttgaactagaaggtatgcctctgtggatgcaaataataaaataaatactgtaacacagccctcatgcaactttacctattctggaaagataaaacaaagaacttcatagaaaagttttctgagcagccaaaaacagttatcacagacaggcactaagatctgtgtacattattcctagaacaactttaggttttcatgtagacagaaatttagcagttgctattatctgtaacaggtatctggctaaataatttccacatactgtctagtagaacgtgtgttgtttgcaactattaaatatgttttagagagagttgaaatagtggagaggctttcaacacttcgttttattttaactataaaagccaataa

SEQ ID NO: 684085 - DNA, 1482 bp, Homo sapiens
aatgaagtatattttaatgtcctacagtttaactaaatttgatcagcttgacttaatccctggaaaatgatttttgggtgcaaggcaggcatggaaaagaaacatctaagcaaaatatgaaaatctaaatgaacaagttgcaacagaaatctgactttgaaagaaagaccaattcatgagagtaatatacatgaaattttaaattcaatgtatttctcatgaaattttggttggttttctaaatatccttcatctacttgagtaaacaatttaaattttgcacacatggtttctattgaaatgggtaatcaataaatatgttagtgactgtttttcaaaagagaaacccaacaagaaatgccaatatttaatccctttgtgggcatgaatttaacttgttgcctaaacaatatactgataaaaaaagaggtttgtattaaatgccgatttcactctgtagcattgattacacaattaaaaaagaaaaaaaaaagcacctttacttaaagctcaccttcttggttgcaagaatataccagattaacaagaaaagaaaagaaaagaaacacaactgctgatatatcctagggacatattcttatatatcttatttcattatatcaaacagattttaaattgctagaactcaaaactagctgaaagaacaaaattacaacacatcaaattattagctaaatatagtgctataagaagaatattctgaaaagaagattggctgtttaaagayaaaggaacatcagggtcagccgctaatgtcaaaggcaaataaatactgttccaagtattgaagataatatgcactaatagtgggttttagctggattcagtctgatgcaggtgcatgtttagcagctgtgaaagcaacacactaacacacacattcacacataaacatgcacacagagcataatataaaccagctctcttaaaatgtagagaaccgaacactgcaaacaaaaacctcaaaaactaatgaactcatgtacattcttgaacagtagctctctatctccagaagatttttcaatttctaacaatccaagattttaaagcataaatggacccatattcaggctgaaactctaggagaaaaattctttctccaaaatgcttactaatggaactttagcaaattaccttaatatttttgtatctccattttctcattttataaaataccatacagtagaacttatctcaaagccatattactaggatgacatttaaacataatatatgtatataaaacacttagctcacacttagtgctaaataaatattaattattacattattactatcccacagttgattaatagtttcagtgaagaaataaaaagcaaaattataatttattttatcagaaatcttacttgaattcataaaagcatacttgtctactaattttacagttaatcactatatttattttattggtggtcactgaccaacagagaacaa

SEQ ID NO: 684086 - DNA, 645 bp, Homo sapiens
taaaactagacaaatgtattcagttttgcaaaggcatgaaaatccaacaaatctttctcatcagattgcatgaactattggatgactattygcaattttttccataaaaatattgtttgaggtatggtacatttttaatgtaattgttccagtgcctaacattaggtttactataaatatcagatgttctttcacagattttgagatcttaataatatcaaaaacatatcactgatgctctatgccttgtcaatctgaatgaaaatgacaccattattagcatcatcactaacagatttcttaaattagctgccaatactatcagttacatattttgctgttactttagaaatgagcttgttataagcatgccacttgtcactattttatctggctaacaataaattcaagtgttcttggacaagggacatcagtagggcagggaccagagtccaaatatagaagagacattttttaaattgtggccaggaggtaatttacgtatcctctttaggcctcaatgtcttccttagttaagctgctgagaggattcaatgaaataattcatgcaatgcacttaacacagagcttggcacacactaagtgaaggattttagtactttataataaatatgataatttcct

SEQ ID NO: 684087 - DNA, 617 bp, Homo sapiens
caagtgatcctcctcccacctcagcctcacaagcagctgggactacaggcaagtgccaacccttttgtatttttttgtagagatggggtttcaccatgttgcccaaactggtcttgaactcctagactcaagcgatcctcctgcctcagcctcccaaagtgctgggattataggtgtgagccactgcacctggcccacatgcaactttaccaaatctgtaatattcacttcagtataaacattcactgctgacctccaagttttacctatacaaactgtggctttctggctaaaatgagcagcaagttttgcttacttgacacacttttgctccttcaycacttgtcacagtctaaatttctttccactgttagaagaaatattcattggcataacaggaattcattacttttgataaaaacctcaccagtgctcttatgcttcaaactgactatgcaaaggtcatttcatgcagcctcattacccttgtctctaatcattcttctgaaataaaaataagaaaaagaaaaaagaaacccacctactcccttgtgggcatccaagctggtaaactctattgtcccattatggccttttctaggattttcctgatactg

SEQ ID NO: 684088 - DNA, 1009 bp, Homo sapiens
attgataaaaacaaataaaattcttcaatataagcaagttagtgatctctgcttctaacttaggctttcccttgtgtattaatcaacgttgtaacaagtatccttaatgcctcaattacgagatacagaaaaggttagttcaagtttaggttgcagtccagtgaagattagcccattctctcttccaggtgttctatctgtgtgtctaccatctcctaaagccttggaattctcccctatatcctgtacctctggccagatattgaatgaaatgaatgtggaagatcagactagagatctgaatagcatacatcatacatcacttctgctcacatactatgggccagaactcagttgggtgaccacacttaaatgcaagggagagtgggccatgaagcttggcagtgaacctagaagagagaacatgggtattgatgaataaataactagccagtctgccatgcctttataagccttaaggwactttgacaagttcaaaaagcattcaggtcaaaaaatattttccaggttttcatgtgtttactattaccttagggatgttttattctcaagatgtttgtccttaacatgtttttcctcagctctgaatctgtagacagtggaatttgcattgccaacaagttggttggtaataatccaagggaaatttatacattttattattttgtattttcttccttaagattatagaacttccacgacttttgtctttccctatatcttcagtacctgacagaatttttttttatattgtaagaggctgatgtatgaaattaatgtggaatttcatgcctgatagcttactaattggatgctcagtagattctaatttgtggggtttttttctaaattgaataatgtacagtatatcaattttacaacattagtttatgaagccttgacaataatttataaactttaattaacattgatatacacatattattgctattctaacagtaactagatattaagaatcaagcttttt

SEQ ID NO: 684089 - DNA, 1009 bp, Homo sapiens
attgataaaaacaaataaaattcttcaatataagcaagttagtgatctctgcttctaacttaggctttcccttgtgtattaatcaacgttgtaacaagtatccttaatgcctcaattacgagatacagaaaaggttagttcaagtttaggttgcagtccagtgaagattagcccattctctcttccaggtgttctatctgtgtgtctaccatctcctaaagccttggaattctcccctatatcctgtacctctggccagatattgaatgaaatgaatgtggaagatcagactagagatctgaatagcatacatcatacatcacttctgctcacatactatgggccagaactcagttgggtgaccacacttaaatgcaagggagagtgggccatgaagcttggcagtgaacctagaagagagaacatgggtattgatgaataaataactagccagtctgccatgcctttataagccttaaggaactttgacaagttcaaaaagcattcaggtcaaaaaatattttccaggttttcatgtgtttacyattaccttagggatgttttattctcaagatgtttgtccttaacatgtttttcctcagctctgaatctgtagacagtggaatttgcattgccaacaagttggttggtaataatccaagggaaatttatacattttattattttgtattttcttccttaagattatagaacttccacgacttttgtctttccctatatcttcagtacctgacagaatttttttttatattgtaagaggctgatgtatgaaattaatgtggaatttcatgcctgatagcttactaattggatgctcagtagattctaatttgtggggtttttttctaaattgaataatgtacagtatatcaattttacaacattagtttatgaagccttgacaataatttataaactttaattaacattgatatacacatattattgctattctaacagtaactagatattaagaatcaagcttttt

SEQ ID NO: 684090 - DNA, 1009 bp, Homo sapiens
attgataaaaacaaataaaattcttcaatataagcaagttagtgatctctgcttctaacttaggctttcccttgtgtattaatcaacgttgtaacaagtatccttaatgcctcaattacgagatacagaaaaggttagttcaagtttaggttgcagtccagtgaagattagcccattctctcttccaggtgttctatctgtgtgtctaccatctcctaaagccttggaattctcccctatatcctgtacctctggccagatattgaatgaaatgaatgtggaagatcagactagagatctgaatagcatacatcatacatcacttctgctcacatactatgggccagaactcagttgggtgaccacacttaaatgcaagggagagtgggccatgaagcttggcagtgaacctagaagagagaacatgggtattgatgaataaataactagccagtctgccatgcctttataagccttaaggaactttgacaagttcaaaaagcattcaggtcaaaaaatattttccaggttttcatgtgtttactattaccttagggatgttttattctcaagatgtttgtccttaacatgtttttcctcagctctgaatctgtagacagtggaatttgcattgccaacaagttggttggtaataatccaagggaaatttatacattttattattttgtattttcttccttaagattatagaacttccacgacttttrtctttccctatatcttcagtacctgacagaatttttttttatattgtaagaggctgatgtatgaaattaatgtggaatttcatgcctgatagcttactaattggatgctcagtagattctaatttgtggggtttttttctaaattgaataatgtacagtatatcaattttacaacattagtttatgaagccttgacaataatttataaactttaattaacattgatatacacatattattgctattctaacagtaactagatattaagaatcaagcttttt

SEQ ID NO: 684091 - DNA, 233 bp, Homo sapiens
cagactgtcatttgtgtggttgtactagtgaaaaactaggaaacatgaacttcactttggtgctccaggccctcaaattatcatttggggtgggtccctgcttctccaggatggatacttttgtttattgccgtattcccagaacctaaaagtgcctagcaaatatgcaaaaagcactgtattagtaagggttctccagaattaacaggatctctctctmtctctctctctct

SEQ ID NO: 684092 - DNA, 627 bp, Homo sapiens
ttttgtctttaatcaaactaggatccccagagacatacaggattgctgcaaatgccaggataactctaatctcccactgatctgtattcttctgttcttttcctccaatccctcataaatagttgttacatgttagaaatgtaagagtttctatctaaaaaatagttagaagtgtatattttctaaatagctaactttaaactcatatrttttgtctcataattttctcttaattcaggattaaaaggtagctactaggatataggaaaatgtaataattagcataaacatatgctaaaataattactctgatacaattatactaactttaatatgaacatataatttgttcacaaaccaaaaatatctgcttgatcactgttagctataaatagagactttcatgtttgcttggattttttttttcattccatcttggggtgaagcactcttgaatgaccgactatgtaagaaacccagacagtctaaggaaacatactatgtattagttaagtaaactgtcaaattatctgaagatatttgaaaatatttaaattagacctagaaaaagaagagcaaattagtttataattactgaaattaaacttaaccttttaatgcaaccac

SEQ ID NO: 684093 - DNA, 628 bp, Homo sapiens
cttgggcttgactaattataacatraatgattttaaaggacagctcatttctctatttggttttggtctgcaaaaagtaaaatagagagcttgggaagttatgtgagaacacacgtgttccctaagataaaaattttataatactctttgctaatttttgcaacatggcaaaattaaggtagtttagacatatctgtaagatcatgagaaatgttctaggtgtattgctttctgatgacaaaaatgagaaaacctaggaaaacacagagttgacagatcctagatgattttcttttaatacattatgtctcaaatagaatttcaggaagtcctggttcgtattcaattcaggtttacatattctgacatgagatccatgtgcttaaatatgaggctgtcagaaggcagaattatatctattgtatgtggtttggcacttgacaaattactggtcctgggagccgtcccacttccatatgaggctgaccacaggctgcttgaaaataaaatattttctcaaaaaggatctttttaaaatatttgaactctggcaaacaacaattgtgagcctcacattctgatttatataaggaataataaattatggcttgaaaaacgttaggacatt

SEQ ID NO: 684094 - DNA, 738 bp, Homo sapiens
gttctttgtcccctgtacacctcttatttactttaactataatattttctaattatttttctctgggaagttttcattagaatttgcctttcatttcccctattatatcaaatctgcattttaaagatttttatgctaatttattatttatcacatggattaagaatggaaaagatttaactcttgagtaagtgatggggaagaaatagaaaagaaagaagaaagtagagagaaagaaggtgagataaaagctaccagccygaatatcacgaaaaatcaggtagtgtctacagtggctgagcactggtcatgtgtaaaaagcaagagtatgattctgagctgtgatatttggtgtaaatatagtttctattttatggaagaaaagtttttaaactacttctgtaaggacatttacctagcgtacctaaaagctaaatggatatcatgtttgatattttaaattttttttcttggtaaatacactagaatatgtccatgccatttaaaaaaataatgaaatctgagttgtaagaaaggaagtaagtgttgatggggatataagttgggaaactgtcaaaagccagctgatttaaaagaatgagagaccatatagtatatttcatcatcttcaagcagacttacaagtaaatccccaaagatataaaattcgattaccatgttagaggtgccagaggtagataatatgatccttattataaataagtttacactaacaca

SEQ ID NO: 684095 - DNA, 2220 bp, Homo sapiens
  misc_feature 2021, 2022, 2023, 2024, 2025, 2026, 2027, 2028, 2029, 2030,2031, 2032, 2033, 2034, 2035, 2036, 2037, 2038, 2039, 2040,2041, 2042, 2043, 2044, 2045, 2046, 2047, 2048, 2049, 2050,2051, 2052, 2053, 2054, 2055, 2056, 2057, 2058, 2059: n = A,T,C or G
  misc_feature 2060, 2061, 2062, 2063, 2064, 2065, 2066, 2067, 2068, 2069,2070, 2071, 2072, 2073, 2074, 2075, 2076, 2077, 2078, 2079,2080, 2081, 2082, 2083, 2084, 2085, 2086, 2087, 2088, 2089,2090, 2091, 2092, 2093, 2094, 2095, 2096, 2097, 2098: n = A,T,C or G
  misc_feature 2099, 2100, 2101, 2102, 2103, 2104, 2105, 2106, 2107, 2108,2109, 2110, 2111, 2112, 2113, 2114, 2115, 2116, 2117, 2118,2119, 2120: n = A,T,C or G
ggctactaaaatatttaactttggagaaccatttcaaatatgggggttctttataaggaattatctgatccaagtcttcattctttttttgtgtttacttcatattctatatttaacactgcagcatttttcagtgtattagacatatttatttatgtcctatctgagctgataataataaggcccttttactcctagtgtccaacacagtgctttgcattatctacttactactggttaacaattatygtacaattggttaacaattgaccagctgaaagaaagtgctcctgagatttttatcatgattgcttctgttgaggattaatctctcaggcctccactgggttacaaaggcaaaatctggagtgaatttgtagggtagattaaaatgaaagcatttatatgctgaacattagatactgtattcattgagatatctaaagtataaacttctgctgttcaatatattagtcactggcaagaagatgcttctgaacacttgaaatacagccagttcaaactgagatgtgctttaaatgtaaactatagcccagcattaaagaatcagtatgcaggaaaatcccatatatgtatttaatatatcgattgcctgttaaaatgaaaatatgtagatatattgaattaaataaagtcatcaaaagtaattcattttaatgactttcttttaactttctttttaatgtagctgccagaaaatttaatattatatatgtagttctcatttatggctcacattatattcctatttgatagtgttgatatagaaaataatactgaactaaaatgtatagctgtctcttttattaatattcttatttttaataatggtgttaattttctttctaatatcttggataatccaattcccaagcgtgactgaagagttttcagagttttcatattcctcacatgacatcccacaaaacacattcattttttacactaaattccttaaaataattgctagaattataatgagtatcagagtccaattatttaattatatgctgaattaatattattctcaaattaatttcctatgtgcttgatataattcagtttcagcattttgttcctctaagtcattgaatttctaattacaatctataggcggttgagatcacttagtaaaacatttattcctgcccagaatggtaaatatgatgtctttttaacataacaatttttaaatgtattaaagataaatttaaataacaatatcatttggtgatcatttctataataaaatacacatttataaattttgtttatgagaagtaacaagggcaacatatataaaaagaaatatttatataactaaacaccaccataaattacagaagacactgctttcagtaagtcgtttgtaatacttttcacagatacaatgttaaaaaagttctataaattgatgtcatatagatgaaaaaatgttagctgttttatgaaagaatgtatcatatttgttcctatatatgtgtaaaaaataggaattatgtttaccgttgctaccactgttatgaaaacttaatttatatattggaagcaataatctgaaacttactgctagagtttcataatatatcttagacccaacttccatttcccttacgcttgccatctgtctataatgctgttaaagcttttcaaaatgctttgacaccatgaaagaaaccataaacaggcagcagaaacaattcatgaagacacttttgaataaataattcagacacattcaaaggaatcctcgttttcttatatttttatacttctcataatttttataagaaagtgtgtataccactgaagatattactcagtttatgtatcctaaaaattattccaagttaaacaaatgacatgcacaatgaatttcaattttacatatatttttaccgtaaggagtagagttttgtaaagaaatgccctaaattttggttaataatgagttatttaacagaatcaacactgtttactgttcttgaatatcaagactnnnnnnnnnnnnnnnnnnnnnnnnnnnnnnnnnnnnnnnnnnnnnnnnnnnnnnnnnnnnnnnnnnnnnnnnnnnnnnnnnnnnnnnnnnnnnnnnnnnnaaaaatataaattttcaaatacctatcatagtgaccatttgtcttatttgtagccatacaacatttttgactacttacctttatgttttgtatttttcac

SEQ ID NO: 684096 - DNA, 2220 bp, Homo sapiens
  misc_feature 2021, 2022, 2023, 2024, 2025, 2026, 2027, 2028, 2029, 2030,2031, 2032, 2033, 2034, 2035, 2036, 2037, 2038, 2039, 2040,2041, 2042, 2043, 2044, 2045, 2046, 2047, 2048, 2049, 2050,2051, 2052, 2053, 2054, 2055, 2056, 2057, 2058, 2059: n = A,T,C or G
  misc_feature 2060, 2061, 2062, 2063, 2064, 2065, 2066, 2067, 2068, 2069,2070, 2071, 2072, 2073, 2074, 2075, 2076, 2077, 2078, 2079,2080, 2081, 2082, 2083, 2084, 2085, 2086, 2087, 2088, 2089,2090, 2091, 2092, 2093, 2094, 2095, 2096, 2097, 2098: n = A,T,C or G
  misc_feature 2099, 2100, 2101, 2102, 2103, 2104, 2105, 2106, 2107, 2108,2109, 2110, 2111, 2112, 2113, 2114, 2115, 2116, 2117, 2118,2119, 2120: n = A,T,C or G
ggctactaaaatatttaactttggagaaccatttcaaatatgggggttctttataaggaattatctgatccaagtcttcattctttttttgtgtttacttcatattctatatttaacactgcagcatttttcagtgtattagacatatttatttatgtcctatctgagctgataataataaggcccttttactcctagtgtccaacacagtgctttgcattatctacttactactggttaacaattattktacaattggttaacaattgaccagctgaaagaaagtgctcctgagatttttatcatgattgcttctgttgaggattaatctctcaggcctccactgggttacaaaggcaaaatctggagtgaatttgtagggtagattaaaatgaaagcatttatatgctgaacattagatactgtattcattgagatatctaaagtataaacttctgctgttcaatatattagtcactggcaagaagatgcttctgaacacttgaaatacagccagttcaaactgagatgtgctttaaatgtaaactatagcccagcattaaagaatcagtatgcaggaaaatcccatatatgtatttaatatatcgattgcctgttaaaatgaaaatatgtagatatattgaattaaataaagtcatcaaaagtaattcattttaatgactttcttttaactttctttttaatgtagctgccagaaaatttaatattatatatgtagttctcatttatggctcacattatattcctatttgatagtgttgatatagaaaataatactgaactaaaatgtatagctgtctcttttattaatattcttatttttaataatggtgttaattttctttctaatatcttggataatccaattcccaagcgtgactgaagagttttcagagttttcatattcctcacatgacatcccacaaaacacattcattttttacactaaattccttaaaataattgctagaattataatgagtatcagagtccaattatttaattatatgctgaattaatattattctcaaattaatttcctatgtgcttgatataattcagtttcagcattttgttcctctaagtcattgaatttctaattacaatctataggcggttgagatcacttagtaaaacatttattcctgcccagaatggtaaatatgatgtctttttaacataacaatttttaaatgtattaaagataaatttaaataacaatatcatttggtgatcatttctataataaaatacacatttataaattttgtttatgagaagtaacaagggcaacatatataaaaagaaatatttatataactaaacaccaccataaattacagaagacactgctttcagtaagtcgtttgtaatacttttcacagatacaatgttaaaaaagttctataaattgatgtcatatagatgaaaaaatgttagctgttttatgaaagaatgtatcatatttgttcctatatatgtgtaaaaaataggaattatgtttaccgttgctaccactgttatgaaaacttaatttatatattggaagcaataatctgaaacttactgctagagtttcataatatatcttagacccaacttccatttcccttacgcttgccatctgtctataatgctgttaaagcttttcaaaatgctttgacaccatgaaagaaaccataaacaggcagcagaaacaattcatgaagacacttttgaataaataattcagacacattcaaaggaatcctcgttttcttatatttttatacttctcataatttttataagaaagtgtgtataccactgaagatattactcagtttatgtatcctaaaaattattccaagttaaacaaatgacatgcacaatgaatttcaattttacatatatttttaccgtaaggagtagagttttgtaaagaaatgccctaaattttggttaataatgagttatttaacagaatcaacactgtttactgttcttgaatatcaagactnnnnnnnnnnnnnnnnnnnnnnnnnnnnnnnnnnnnnnnnnnnnnnnnnnnnnnnnnnnnnnnnnnnnnnnnnnnnnnnnnnnnnnnnnnnnnnnnnnnnaaaaatataaattttcaaatacctatcatagtgaccatttgtcttatttgtagccatacaacatttttgactacttacctttatgttttgtatttttcac

SEQ ID NO: 684097 - DNA, 2220 bp, Homo sapiens
  misc_feature 2021, 2022, 2023, 2024, 2025, 2026, 2027, 2028, 2029, 2030,2031, 2032, 2033, 2034, 2035, 2036, 2037, 2038, 2039, 2040,2041, 2042, 2043, 2044, 2045, 2046, 2047, 2048, 2049, 2050,2051, 2052, 2053, 2054, 2055, 2056, 2057, 2058, 2059: n = A,T,C or G
  misc_feature 2060, 2061, 2062, 2063, 2064, 2065, 2066, 2067, 2068, 2069,2070, 2071, 2072, 2073, 2074, 2075, 2076, 2077, 2078, 2079,2080, 2081, 2082, 2083, 2084, 2085, 2086, 2087, 2088, 2089,2090, 2091, 2092, 2093, 2094, 2095, 2096, 2097, 2098: n = A,T,C or G
  misc_feature 2099, 2100, 2101, 2102, 2103, 2104, 2105, 2106, 2107, 2108,2109, 2110, 2111, 2112, 2113, 2114, 2115, 2116, 2117, 2118,2119, 2120: n = A,T,C or G
ggctactaaaatatttaactttggagaaccatttcaaatatgggggttctttataaggaattatctgatccaagtcttcattctttttttgtgtttacttcatattctatatttaacactgcagcatttttcagtgtattagacatatttatttatgtcctatctgagctgataataataaggcccttttactcctagtgtccaacacagtgctttgcattatctacttactactggttaacaattattgtacwattggttaacaattgaccagctgaaagaaagtgctcctgagatttttatcatgattgcttctgttgaggattaatctctcaggcctccactgggttacaaaggcaaaatctggagtgaatttgtagggtagattaaaatgaaagcatttatatgctgaacattagatactgtattcattgagatatctaaagtataaacttctgctgttcaatatattagtcactggcaagaagatgcttctgaacacttgaaatacagccagttcaaactgagatgtgctttaaatgtaaactatagcccagcattaaagaatcagtatgcaggaaaatcccatatatgtatttaatatatcgattgcctgttaaaatgaaaatatgtagatatattgaattaaataaagtcatcaaaagtaattcattttaatgactttcttttaactttctttttaatgtagctgccagaaaatttaatattatatatgtagttctcatttatggctcacattatattcctatttgatagtgttgatatagaaaataatactgaactaaaatgtatagctgtctcttttattaatattcttatttttaataatggtgttaattttctttctaatatcttggataatccaattcccaagcgtgactgaagagttttcagagttttcatattcctcacatgacatcccacaaaacacattcattttttacactaaattccttaaaataattgctagaattataatgagtatcagagtccaattatttaattatatgctgaattaatattattctcaaattaatttcctatgtgcttgatataattcagtttcagcattttgttcctctaagtcattgaatttctaattacaatctataggcggttgagatcacttagtaaaacatttattcctgcccagaatggtaaatatgatgtctttttaacataacaatttttaaatgtattaaagataaatttaaataacaatatcatttggtgatcatttctataataaaatacacatttataaattttgtttatgagaagtaacaagggcaacatatataaaaagaaatatttatataactaaacaccaccataaattacagaagacactgctttcagtaagtcgtttgtaatacttttcacagatacaatgttaaaaaagttctataaattgatgtcatatagatgaaaaaatgttagctgttttatgaaagaatgtatcatatttgttcctatatatgtgtaaaaaataggaattatgtttaccgttgctaccactgttatgaaaacttaatttatatattggaagcaataatctgaaacttactgctagagtttcataatatatcttagacccaacttccatttcccttacgcttgccatctgtctataatgctgttaaagcttttcaaaatgctttgacaccatgaaagaaaccataaacaggcagcagaaacaattcatgaagacacttttgaataaataattcagacacattcaaaggaatcctcgttttcttatatttttatacttctcataatttttataagaaagtgtgtataccactgaagatattactcagtttatgtatcctaaaaattattccaagttaaacaaatgacatgcacaatgaatttcaattttacatatatttttaccgtaaggagtagagttttgtaaagaaatgccctaaattttggttaataatgagttatttaacagaatcaacactgtttactgttcttgaatatcaagactnnnnnnnnnnnnnnnnnnnnnnnnnnnnnnnnnnnnnnnnnnnnnnnnnnnnnnnnnnnnnnnnnnnnnnnnnnnnnnnnnnnnnnnnnnnnnnnnnnnnaaaaatataaattttcaaatacctatcatagtgaccatttgtcttatttgtagccatacaacatttttgactacttacctttatgttttgtatttttcac

SEQ ID NO: 684098 - DNA, 654 bp, Homo sapiens
taaacagaggtctaggctttaggttagctgtctagcaatttcaaaattcatttttttttcttctcgttttgagctgctgattttttggtaakaaagagttcggattagcagtacgtgcattcctgtgactgcgtatgagtatttagtcagtcataggcataatctctcaaattgtacctgttattttaatgatactatgtttgactgtaattttgaaattcaaagaccaagagtagaatttcaaccacagctgagtcatgaattaatcaaacagagggggaggaaaaaaataatggatgttatgacttccaattttagtcgacatctaaggaactttgaagttgtcacatttgtccttaaaccaagaaaaaactgaacaaactgaaactcagtaactcttctgagagctatcagaatatttaggtcatagggcaaactaacaccactaagatggagatcccagagaatacagagacccacctctgagatcagcttatctggattaaaatcctttagagctataaactggtaggaacacttaaatggtaactgagactcagtgctggaggcagagtatggactagtgtgaaagtgagaattttctggaactctgtcttaggttttttcctccaatctttcatgggcttttcctcc

SEQ ID NO: 684099 - DNA, 621 bp, Homo sapiens
agagcatagagtaaccaaaagaaattacttggaggctccccaggcattgaaatgtagaaaggcagtggctgctaaaggatcaagatcaggaagaaaggctcagagaaatccccccacatcccagggccctggggccttcagtttgagccacaagtgccacattaagtcctcaggacagggcagcacaatagatagaatgctcccaaggtgtaagaaagcaatggacagaactgcagagcgaacagaaaatgccataaatctagaaagttaacatccagttaaagagcagaaatacattttctgtggttcagaaagcaggtatgtagactataaaacattaaggtgtcattggcrtctcaacaatgctcaaatccaaatccctgctgagggaagtgctgatcccccccgtcaaaatatatgaagctagaggtgaaattaatataactgaatctcctaagcccagacaacgcttcactgtagagtaaatcaacttgtctcactgtactagtgaatgtgtagggagacacactgacaaagaagggtaaatatttttatgaggataaatattatttacttgtttctctactgcttttttgtttctttttccagacaaaatctgta

SEQ ID NO: 684100 - DNA, 584 bp, Homo sapiens
cttgataatatcctgaagtgtgttttccagcttggttccattctccccatcactttcaggtacaccaatcaagtgtaagtttggtcttttcagatagtcttatatttctggaaggttttatttgttcctttttattcttrtttctctaatcttgtcttcatgctttattttattaagttgatctttagtctctgatatcctttcttctgcttgattgattggctgttgatacttgtgcatgattcacaaagttctcatgctgcgtttttcagctccatcaagtcatttatgttcttctccaaactggttattctagttagcaattcctctaaccattttttaaggttcttagcttccttgctttgggttagaacaggctcctttagctcagaggagtttgttattacccactttctttccattatcttatttaagcaatgcaacaacattttgagataagaatttatattagtgtatgggacatatagatcaagtgcttagcacacatgcccatatacatgtacacacacatccccatgccgctgatagaatttttcaatttaaataactgaaatggcagtgaa

SEQ ID NO: 684101 - DNA, 1877 bp, Homo sapiens
tcggcaacgacatgtgactggtgactaatgtattggacagtgcaaatctagcacatttccgtcattgcagaaagttccactggacaccactgctctagactaattggcccaggaggaggtggaggcatgagataagtgagtagacatggccttaaccttcatggctggaattcaagcatcaggactaaatgtagttcccttgtcctttccttactgccaaccacatgggtcctccctgtccccaactccccagccacctccttggatagttcctacttagcacccactacattctgaagcctctgcacagaaggtagatgctgttgctgcattttgggaatgagtttttctgtagtcctcatgtctctgtaggcttaccgagaccagtctcctcaccatggtcaagctggtaggaggcaggcatgatcctggtgtattggggagttttgcttttgtttgcagaaaaggctcttagaaggagagacaagcctggctggaagtcatcgggaagtmtatttttagttctgtgcaggcagacaacagccctctgagctcaccaagggcttcttgcttgtatgaggatgataaagtccggaaggaaagacacagccttatcaagtctaaacagaaaattgatgtcagaattatttatttttctactaaattttttttataaccaagtcatcttcccaaaggtgaactgagtggtctcacagctcttaggatggtgagctcagtatggcatagcgcagcataggagacaacttccagacactgaatggcagtctcttaaagtcaatgtccatcctggcacaatcaaagccctaaggatggggactgggaaggacagtgagtgagagactggtacttcaattttgatcgtatttcttctcacctgtctcagagatcttattgttattttcttccccttttagtcatattttagtcttcttcaggtacagggtacttcttggaaaaatcaacagcacagtcccatgttgtcattttactagcacagagccgggccctcccaggatctgctctagcccagtgcgagaacgaaatgggtgtggcgatctgacaagatatcatcatgtgggaaaatattttaatgtaatggtaactttcaagtctagtactagacaaactatcacagaggtcgtgaaacacgaagcttcgcagcaggatactcaagtccacacagttgattaaatcaatttaaaagacacagagaaaaaggtgggcaagtttacgtattttggataagatacaaatgaaggggaagaaccacacttgagtcttgagttaagcagtgctcatctgttctgccctcctccatccatcaccttcccctctctctgtctctttctctcatctctacgtcagctttctcccctattggtgtggttacagggaccagaattgaggttgaaaaggggagctcagccctcagaaggttcctggagctaacacaaacactgaactgtgtcttctagggagacacagggagcagatgcacccggccacaggcattgctttctggtcagcctgttgagcagctctgggttttaccagcatctctggaacagagcaaacgtggagccagaatgagacatctccatgagtaactgatttacagataatgtagctgtcggcctggtggcatggtccttcctaatgacttgctcctttcctccttttctacctgtaaatatcatgctcacttgttccatccactttatcatatattccatgcttcctttctatctgctctacaggttactaacttaccatctatagatgacatggcttatgaattctgtttatgtcttccaagctacttgcttactcagtacattaaacatttatgagtttca

SEQ ID NO: 684102 - DNA, 1877 bp, Homo sapiens
tcggcaacgacatgtgactggtgactaatgtattggacagtgcaaatctagcacatttccgtcattgcagaaagttccactggacaccactgctctagactaattggcccaggaggaggtggaggcatgagataagtgagtagacatggccttaaccttcatggctggaattcaagcatcaggactaaatgtagttcccttgtcctttccttactgccaaccacatgggtcctccctgtccccaactccccagccacctccttggatagttcctacttagcacccactacattctgaagcctctgcacagaaggtagatgctgttgctgcattttgggaatgagtttttctgtagtcctcatgtctctgtaggcttaccgagaccagtctcctcaccatggtcaagctggtaggaggcaggcatgatcctggtgtattggggagttttgcttttgtttgcagaaaaggctcttagaaggagagacaagcctggctggaagtcatcgggaagtatatttttagttctgtgcaggcagacaacagccctctgagctcaccaagggcttcttgcttgtatgaggatgataaagkccggaaggaaagacacagccttatcaagtctaaacagaaaattgatgtcagaattatttatttttctactaaattttttttataaccaagtcatcttcccaaaggtgaactgagtggtctcacagctcttaggatggtgagctcagtatggcatagcgcagcataggagacaacttccagacactgaatggcagtctcttaaagtcaatgtccatcctggcacaatcaaagccctaaggatggggactgggaaggacagtgagtgagagactggtacttcaattttgatcgtatttcttctcacctgtctcagagatcttattgttattttcttccccttttagtcatattttagtcttcttcaggtacagggtacttcttggaaaaatcaacagcacagtcccatgttgtcattttactagcacagagccgggccctcccaggatctgctctagcccagtgcgagaacgaaatgggtgtggcgatctgacaagatatcatcatgtgggaaaatattttaatgtaatggtaactttcaagtctagtactagacaaactatcacagaggtcgtgaaacacgaagcttcgcagcaggatactcaagtccacacagttgattaaatcaatttaaaagacacagagaaaaaggtgggcaagtttacgtattttggataagatacaaatgaaggggaagaaccacacttgagtcttgagttaagcagtgctcatctgttctgccctcctccatccatcaccttcccctctctctgtctctttctctcatctctacgtcagctttctcccctattggtgtggttacagggaccagaattgaggttgaaaaggggagctcagccctcagaaggttcctggagctaacacaaacactgaactgtgtcttctagggagacacagggagcagatgcacccggccacaggcattgctttctggtcagcctgttgagcagctctgggttttaccagcatctctggaacagagcaaacgtggagccagaatgagacatctccatgagtaactgatttacagataatgtagctgtcggcctggtggcatggtccttcctaatgacttgctcctttcctccttttctacctgtaaatatcatgctcacttgttccatccactttatcatatattccatgcttcctttctatctgctctacaggttactaacttaccatctatagatgacatggcttatgaattctgtttatgtcttccaagctacttgcttactcagtacattaaacatttatgagtttca

SEQ ID NO: 684103 - DNA, 1877 bp, Homo sapiens
tcggcaacgacatgtgactggtgactaatgtattggacagtgcaaatctagcacatttccgtcattgcagaaagttccactggacaccactgctctagactaattggcccaggaggaggtggaggcatgagataagtgagtagacatggccttaaccttcatggctggaattcaagcatcaggactaaatgtagttcccttgtcctttccttactgccaaccacatgggtcctccctgtccccaactccccagccacctccttggatagttcctacttagcacccactacattctgaagcctctgcacagaaggtagatgctgttgctgcattttgggaatgagtttttctgtagtcctcatgtctctgtaggcttaccgagaccagtctcctcaccatggtcaagctggtaggaggcaggcatgatcctggtgtattggggagttttgcttttgtttgcagaaaaggctcttagaaggagagacaagcctggctggaagtcatcgggaagtatatttttagttctgtgcaggcagacaacagccctctgagctcaccaagggcttcttgcttgtatgaggatgataaagtccggaaggaaagacacagccttatcaagtctaaacagaaaattgatgtcagaattatttatttttctactaaattttttttataaccaagtcatcttcccaaaggtgaactgagtggtctcacagctcttaggatggtgagctcagtatggcatagcgcagcataggagacaacttccagacactgaatggcagtctcttaaagtcaatgtccatcctggcacaatcaaagccctaaggatggggactgggaaggacagtgagtgagagactggtacttcaattttgatcgtatttcttctcacctgtctcagagatcttattgttattttcttccccttttagtcatattttagtcttcttcaggtacagggtacttcttggaaaaatcaacagcacagtcccatgttgtcattttactagcacagagccgggccctcccaggatctgctctagcccagtgcgagaacgaaatgggtgtggcgatctgacaagatatcatcatgtgggaaaatattttaatgtaatggtaactttcaagtctagtactagacaaactatcacagaggtcgtgaaacacgaagcttcgcagcaggatactcaagtccacacagttgattaaatcaatttaaaagacacagagaaaaaggtgggcaagtttacgtattttggataagatacaaatgaaggggaagaaccacacttgagtcttgagttaagcagtgctcatctgttctgccctcctccatccatcaccttcccctctctctgtctctttctctcatctctacgtcagctttctcccctattggtgtggttacagggaccagaattgaggttgaaaargggagctcagccctcagaaggttcctggagctaacacaaacactgaactgtgtcttctagggagacacagggagcagatgcacccggccacaggcattgctttctggtcagcctgttgagcagctctgggttttaccagcatctctggaacagagcaaacgtggagccagaatgagacatctccatgagtaactgatttacagataatgtagctgtcggcctggtggcatggtccttcctaatgacttgctcctttcctccttttctacctgtaaatatcatgctcacttgttccatccactttatcatatattccatgcttcctttctatctgctctacaggttactaacttaccatctatagatgacatggcttatgaattctgtttatgtcttccaagctacttgcttactcagtacattaaacatttatgagtttca

SEQ ID NO: 684104 - DNA, 1877 bp, Homo sapiens
tcggcaacgacatgtgactggtgactaatgtattggacagtgcaaatctagcacatttccgtcattgcagaaagttccactggacaccactgctctagactaattggcccaggaggaggtggaggcatgagataagtgagtagacatggccttaaccttcatggctggaattcaagcatcaggactaaatgtagttcccttgtcctttccttactgccaaccacatgggtcctccctgtccccaactccccagccacctccttggatagttcctacttagcacccactacattctgaagcctctgcacagaaggtagatgctgttgctgcattttgggaatgagtttttctgtagtcctcatgtctctgtaggcttaccgagaccagtctcctcaccatggtcaagctggtaggaggcaggcatgatcctggtgtattggggagttttgcttttgtttgcagaaaaggctcttagaaggagagacaagcctggctggaagtcatcgggaagtatatttttagttctgtgcaggcagacaacagccctctgagctcaccaagggcttcttgcttgtatgaggatgataaagtccggaaggaaagacacagccttatcaagtctaaacagaaaattgatgtcagaattatttatttttctactaaattttttttataaccaagtcatcttcccaaaggtgaactgagtggtctcacagctcttaggatggtgagctcagtatggcatagcgcagcataggagacaacttccagacactgaatggcagtctcttaaagtcaatgtccatcctggcacaatcaaagccctaaggatggggactgggaaggacagtgagtgagagactggtacttcaattttgatcgtatttcttctcacctgtctcagagatcttattgttattttcttccccttttagtcatattttagtcttcttcaggtacagggtacttcttggaaaaatcaacagcacagtcccatgttgtcattttactagcacagagccgggccctcccaggatctgctctagcccagtgcgagaacgaaatgggtgtggcgatctgacaagatatcatcatgtgggaaaatattttaatgtaatggtaactttcaagtctagtactagacaaactatcacagaggtcgtgaaacacgaagcttcgcagcaggatactcaagtccacacagttgattaaatcaatttaaaagacacagagaaaaaggtgggcaagtttacgtattttggataagatacaaatgaaggggaagaaccacacttgagtcttgagttaagcagtgctcatctgttctgccctcctccatccatcaccttcccctctctctgtctctttctctcatctctacgtcagctttctcccctattggtgtggttacagggaccagaattgaggttgaaaaggggagctcagccctcagaaggttcctggagctaacacaaacactgaactgtgtcttctagggagacacagggagcagatgcacccggccacaggcattgctttctggtcagcctgttgagcagctctgggttttaccagcatctctggaacagagcaaacgtggagccagaatgagacatctccatgagtaactgatttacagataatgtagctgtcggcctggtggcatggtccttcctaatgacttgctcctttcctccttttctacctgtaaatatcatgctcacttgttccatccactttatcatatattccatgcttcctttctatctgctctacaggttactaacttaccatctatagatgacatggcttatgaattctgyttatgtcttccaagctacttgcttactcagtacattaaacatttatgagtttca

SEQ ID NO: 684105 - DNA, 614 bp, Homo sapiens
ggcacacaattattcattctcttcccagtctttctgcttttacaaaacttggtagttaaactctataactcaagctttctatttattctgaataatttcaaagccacagacttgaatgttgaccactccctagaaatatgaaggctcagggaagggatcgattattgctatttggagttttcgcattttggcataatggttattttactttttaaatgtctagatatagtaggcctgcctatttaccaaaaataatatctaagttggttcatcactctggcaccaaaaaatagcacactaaaggggaactatctaccacctataggctggaggagtcagayacacagttattcattagagaagccaaaaaaaaaaaaatgtagggtgggcttgaagcatggctgccacaaggttcccaggtgaccatgggcttgggtttgctctaggagaaactgacctccaggcatcctgagaaccacgtatgcctcctcatatgtatcttggtccagacctcctttgaaatagaccaggcaccaagagcgtttgtagtccattcaccctatgatatcccctttggtgtgatactgttatgggttgagtggtgtcttccttcc

SEQ ID NO: 684106 - DNA, 1495 bp, Homo sapiens
gtaaagaaatagcacttgaacataaatttaatttctactgctgtgtccggtttctgttggctggaacgggacttcatgttctgtatttgtcctgattggctagcaacttagaacttttaaaagaggcaaaggcagaggagaacaaaggaaggaggaagtaacttgtggaatgctgagaaaggtaagaacactttcaaataaggaagaggaacaggctatgagttaatgcttgcttggactagtataagcatgccagggcaaatatttaggctaaattgtgggagctaagaacataaagtacattgctttctttattatggctagcagatatttaagaatgttagcacaggtctttgaatacattttgcttctaaaagaagttactatttattcctaattagacggggaggaaagtctttgaagaggactctctactttactttttacatagggtttttgtttactgctraactacccttattttcaaatccccaaaaccatctacaatattttgttttgttttgttttttttgagatggagtctcggtctgtcactaggccaaagtgcagtgggtgatcttagctcactgcaacctcagcctcccgggttcaagggattctcctgtctcagcctcctgagtagctgggactacaggcccgagccagcacacccagctaattttgtatttttagtaaagacagagcttcaccatgttggccaggatggtttctatctcttgacctcatgatctgccctcctcggcatcccaaagtgctgggattacaggcgtgagccaccgcacccagcttacactggttttaaagcagctggtgatttggtataacatccctgaattctgtaccttactcttaagaagacttgcttattaagggcatttgtactgttgaagcattgaaggtcacatttgggatattttagaccagctctattcaatgaaaatatgatgtgagacacatgtaatttaaaattttctagaaaccacatttaaaaagtaaaaataaactagtaaaattactgaactctctctatgtatactattttaattccaacatgtaatttatataaaaataccaataaaatatatgacattgtgttttcctctcaaagccttcaaaatacagtgtgcttttcacattcacacaatacacctccgttcagacccacctcactctatgtccttagcagcctcatggagcctcataaagcccagtgctgcttcaaataacagcttctaatgcgagaaatgctagagtctgatttgtttgtttatttgcttttttttaaagtttgttttgtttcacctatttgttttacatattgggtcaattctgagattttgtcagtacaatgtaagtttcagttatttttttccttagtgtaaataattctgtagctgtcccttttacattccttctcatcccatttttgacaaaggatttccaacaatggcagacactgaatcaaaagaaaaga

SEQ ID NO: 684107 - DNA, 607 bp, Homo sapiens
aagaaagaacagagaaaaaaaagaagaaaagaaggaaaaaaagaaggaaagaaagaaggaagaaagaaaagaaaagagaaagaaaaaacaatggggcatgctaggattaggatctgscaaatttttgttataaactctgcaaaattatgtgagtttttaaatagttgttattttgaaacattttaagcctaacaagaagtttcaaagatattacatggggttctcatgtaccattcatctcattttccccaatgataacatcttatctaaccatagaacattatcaaaaccaggcaattgacactgttataatactattaactctacgtgacttttaaaatcatgttcatatatgattttgttttgaataagcattaaaagagaaagatacggccgggcatggtggctcacgcctgtaatcccagcactttgggaggacgaggcaggtggatcacgaggtcaggagattgagaccatcctggctaacacggtgaaaccccgtctctactaaaaatacaaaaaattagccgggcgtggtggcaggagcctgtagtcccacctactctggaggctgaggcaggagaatggcgtgaacccgggaggcgga

SEQ ID NO: 684108 - DNA, 900 bp, Homo sapiens
tcagaaaaagaaaaaaggaaaaaaagaaagataagttgcaatccaagtaatacgccttaygtttaggcaaggtaacttgagggttgagcagtgtttgacattttcattccagaatgcttttacgttcttgccttcaccatgatgtttttgtttttgcctctgcctttgaccatactgtcccctctgcctgaaaaggtgtccccttcccccagcccacctccttttttagcttattatagtcatttcaatattttctagaaaaaggcaggttcttgaattactgggtaaatgaggtttatatgtttctccagatgccctgtattgagcccaagagtcgtatcccaaaacattttgccaacagggtgtgcttactgtctggctgtgactgacacgatattccaccctccccctgcgcttgcttatctcttactctccctttgttactaagtagattattacactaacctgacaaagttgccatgagggtgagaagagataatggtcataaaagagttctgtaaacaaccagacttcggaatagttggacagaaaggtgttggcagagtggaggtgggggaaaaagggtgtacttgtgaagacaaactcacagacagaagctccaattgctggctctgacattagcaactgtgtggccttaggcaagttctagaacttctccttcttcttctttcttctccttctccttcttcttcttctttttttttagagaaggggtggggtctctctttgttgccctggttgaagtgcagtgatgctatcctagctcactgcgggctcgaactcctggactcagaggctccaactcctgggctcagaggctccttccacctcagccccctaagtagctaggaccacagccacacctggctccagcatgtt

SEQ ID NO: 684109 - DNA, 618 bp, Homo sapiens
tctgtcagctaggctgaagtgcagtggtgaaattatagctcactgcagcctcgaactcctgggctcaagtgatcatcccacctgggcctcccaaagcactgggattacaggtgtgagccacaatgcccagcatctatttgtctgtctttaagacaatgcaaaacgttcttagtgactacagccctttataagtcttgcaattagagaggcttagtcctccaacagtttcgtgtttatttgtttttcagatactttgactaggctaggttctttatatttccatatgaatattagactaggctttccagtttctacaaactgtctgcttgattgtaattttggattgtattgaatctatgaatctttttgtgggaaattaatatcttaatcactatgggggatatttacaatttgcttatctgtttaggtatggcccattcacttatttattcaacatttacttgataagcaactttgcttttgttaggcattgctcagggaaaccagcatgtactcgtgaatgaaagagacagaaatcctatctttgtggacttccattctagctgggaaagtaggagtgaaggtarggataagaactaatagtaaacattataaata

SEQ ID NO: 684110 - DNA, 1525 bp, Homo sapiens
ggactttttcttcctcttcccatgcaatgactttgctttagaacaatcacatggcttagagctagtctgagtagcagcagcacccaaggagcgtcagttcttgttaaaaagcaatacctgtgtgatgcatttttacgccacaggcaaagggaaggatcaccctcattttaaactcctgcagagtcccttaataaaatatcaaagcattccatcaagttcttctgggtggtgttattgctgtacatttgttggtgagtcattttctgtgctgtgtttgctttgaaaggatcttccaatttatctccaatattcctttcttatcatgtccttttctttagctaggatttcacataaccctaatgcattattaagaatgtcttccttattgacacactggttttctagcatgtcttcatagatacccacaagaaaggcaattaggtagggggaactatgacttggttgtaaatcaagtaattgatttaacagattaggatatttggaaagaccacgatcctgcaaaattcctttcaaatagttccatgaactattatgtggtactagttgaatcatttccagagtgtattggacttctctctccaatacagcacaatcattgtagccagtggtgttggaaataacaaaatatcttcggttccagacagagttatttctcacatcctctttgagaagttggtccacatactgcagctcattatcccaaagtttaaattcctgaataacccattgtcgatgctgccaggcatgataattctttgcatcctgattaagaatattatcaataaattcaggctcctgagatggatctcttagccattccactattactcgcctattgtgacaaactagatagtttttgggctgcccctcaattatttcagtgatgtagttcatttcctcatgtagatccttctgaagtgactttaagagaactctccggaaatgtcacactgtataattggctgcatttaactcaacagcatcccgggttagcttaaaacctcgttcgcttctttcttcatgctgcaggacagctcggaagtaatcaaacatctctaaatttgtcactataaatgatctggaccacgggattggggccatcattctgcggcactggatctgtatcagcccattctgttctgtccctgtacgggacatrggagggcgaatccaggctcagaaacccgtcgtccatgggggacgccacggcttccccagcctctgctgccatctcttcctcgtgctgctcctggggcagcggtgggtgcggctggggcgggggctgctccagctgccggggctcaccgccttgcgcagcctccccgaccccctcggtggccgccatctcaagatggtccttattcttaaggtgttaacaaacagaagtgcaaacaaaccagttttattgcatattggtgcaataaaaacattatatgtcccaattaaaaatatgaagaggagatattagaggcccaaaggagagaatggttaattctatctcaag

SEQ ID NO: 684111 - DNA, 2053 bp, Homo sapiens
tggataatttttgtacatttatcttttttacctctagggtcatagtttcctaaaggtaaattccwtttttttcctctttaaaatttttttataccaaaaaaaaaaaaaaatgagatgaggtctcagtatgttggccagggtagtcttgaattcttggcctcaagcaatcctcccacctcggcctcccaaagtgctaggactacaggcatgagccaccacacccagcctaggtgcaaattccttttaagagctcgttcaatgatataaaagcttagcttgaaaatttcaagtgtaatactttctctagttagagataatatatctctatttctgtatttgagttaaaacatgtttgttaaggatatgacattcaaatattttgaatgttaacatgttttaatatttatttcttgaccaagaaagcaattcttttcatatgcatgtaaactgctgtgaaagtacagattggctgatgctgatgctatgtaatagcattttaaattttgttttgtcttgtgaagtttagatgataaacttgtttatggattctccttaaaacttgcttcccttgattaaattcaataaaaacagaaaagtgtagttggaattgatttctggaattatacctgttaaggatttgaaaattaatgtctcttggttccctgaagtttgatattatttatgtggctcttattctatcatttgaacgtaagctttcacttttgatgaggtggaaattaaatgaggctaaggaaagtagtggcatgaccttatattgttatagtacattgttccaaggagatatttaaaaatgaatatcagagtctgaatttttcttcttgggtaaatgaaaatggaaataactagctaaactgcttcttttaatggaatttaataatataaaattaaactaatagaagttaaaataaatttatgagagttatgaaagtacttccaagagcatacaaaatagctagagttcttacttatttattgttatttattacagcattcagaataaagagaaacaaatgattgatattgtctttgttaggattcattcattgaatgcccactatgtacctggtatggtattttcaagctgctctattcagaattattattgaggtaactaattatattttcctggttagagtatcttctggactagattaatgtgaatattattacattactttaaaccttgctgaaagctttttgtttgtttgtttccatttataatgtctaaggaaactggataaaatgaaaaaagtttaatcacttttttccattgtaaaatgagtggcttcttgaaagtttttttggttaaaggagatgatgatatgaccacgtattagaatattatgcaaaaatttagaactatgctatgaaagaacatttaaggacactaacataccattgagtgcaaaaagcagaatataaaccttaattacagcatgatacaattttatcgttgttagataggcagatggaatataggaaagaacaagaatgaaatataaatggcagttaggtctcagtaggattatgagtggttttctttcttcattatgagggcttttttcaacacagttaaaagcaaacattttctgattatagaaacaatgaatatcattaaaataaataaaaactgatatccagtagaaaacattttcaaaatttaaagatattatttaaaattattttttaagccaccacaaagaaaataaattacaaaatttatgttttttttcattagggtgtatttatcatgatccttttaatgttcacaaatgaactactaaaggcaggtaaatttgatggatgaacatgtactaagtaggatttattttagatgatactttagggccccggttcaaaagtgtggcccagggatcagcagcagcaacatctcttgaaaacttgttacaagtacatacttggggcccagcaatgtatgtttttacaagtgattttgatccatgcttaaatttgggaaatattgctttacgattttgagttatgagactgagctagaacaatttctcaaaaa

SEQ ID NO: 684112 - DNA, 2053 bp, Homo sapiens
tggataatttttgtacatttatcttttttacctctagggtcatagtttcctaaaggtaaattccatttttttcctctttaaaatttttttataccaaaaaaaaaaaaaaatgagatgaggtctcagtatgttggccagggtagtcttgaattcttggcctcaagcaatcctcccacctcggcctcccaaagtgctaggactacaggcatgagccaccacacccagcctaggtgcaaattccttttaagagctcgttcaatgatataaaagcttagcttgaaaatttcaagtgtaatactttctctagttagagataatatatctctatttctgtatttgagttaaaacatgtttgttaaggatatgacattcaaatattttgaatgttaacatgttttaatatttatttcttgaccaagaaagcaattcttttcatatgcatgtaaactgctgtgaaagtacagattggctgatgctgatgctatgtaatagcattttaaattttgttttgtcttgtgaagtttagatgataaacttgtttatggattctccttaaaacttgcttcccttgattaaattcaataaaaacagaaaagtgtagttggaattgatttctggaattatacctgttaaggatttgaaaattaatgtctcttggttccctgaagtttgatattatttatgtggctcttattctatcatttgaacgtaagctttcacttttgatgaggtggaaattaaatgaggctaaggaaagtagtggcatgaccttatattgttatagtacattgttccaaggagatatttaaaaatgaatatcagagtctgaatttttcttcttgggtaaatgaaaatggaaataactagctaaactgcttcttttaatggaatttaataatataaaattaaactaatagaagttaaaataaatttatgagagttatgaaagtacttccaagagcatacaaaatagctagagttcttacttatttattgttatttattacagcattcagaataaagagaaacaaatgattgatattgtctttgttaggattcattcattgaatgcccactatgtacctggtatggtattttcaagctgctctattcagaattattattgaggtaactaattatattttcctggttagagtatcttctggactagattaatgtgaatattattacattactttaaaccttgctgaaagctttttgtttgtttgtttccatttataatgtctaaggaaactggataaaatgaaaaaagtttaatcacttttttccattgtaaaatgagtggcttcttgaaagtttttttggttaaaggagatgatgatatgaccacgtattagaatattatgcaaaaatttagaactatgctatgaaagaacatttaaggacactaacataccattgagtgcaaaaagcagaatataaaccttaattacagcatgatacaattttatcgttgttagataggcagatggaatataggaaagaacaagaatgaaatataaatggcagttaggtctcagtaggattatgagtggttttctttcttcattatgagggcttttttcaacacagttaaaagcaaacattttctgattatagaaacaatgaatatcattaaaataaataaaaactgatatccagtagaaaacattttcaaaatttaaagatattatttaaaattattttttaagccaccacaaagaaaataaattacaaaatttatgttttttttcattagggtgtatttatcatgatccttttaatgttcacaaatgaactactaaaggcaggtaaatttgatggatgaacatgtactaagtaggatttattttagatgatactttagggccccggttcaaaagtgtggcccagggatcagcagcagcaacatctcttgaaaacttgttacaagtacatacttggggcccagcaatgtaygtttttacaagtgattttgatccatgcttaaatttgggaaatattgctttacgattttgagttatgagactgagctagaacaatttctcaaaaa

SEQ ID NO: 684113 - DNA, 1573 bp, Homo sapiens
tttaaacgctcactgtatcaaagagtctaaaatagttgtttcttggaggaggtttcagcatacctacttttccctaacagtctgttagaattcagtgtgcttgcttaaaatgaagacaataagtggatagaaaaaatatcacaggagtgtatttggaagtttctggaaattctctagggtgaaacttccaccattttagctcttaagctcataagggaatcagctctgtttcagtctggttacaatttttttaacctccctggtcctaccatctctacagctcatatttttgctatgtagaccagagaaacactatttatcaagaacattgaagaaattctgttaatcatatctgactattaaaatgggggaaaagaatggtgaaaaagacagctgtctttgcaagcacacatccgtttctggtgtgcagtggcagttaaagtcatctttcaaaggctctctgctgtctgttggtgccagtaggcaagataaaacaattttgtcagctaatcatcagtctgctccagatgatgcacagactggtctaagaataaatacgttaaaaaggaaagcaattagctttccatatgggatggcggagtttctgctttgtaaaatttccaagagtttaagacctgctgattcaaaagtattaagatgaactagaaagcttttcacgttcccatctgccaccattgtgcttttcactgttcctagatttaacatgatattaaattgaatcatggtagaacaaacctttacaagacttgatgcttgttaatatatctgacacacaataatgtagatagtttggaagacatgatgcaactcctgatgaaaatataaagaaatgcaccaaggtgacaatattatttggttatattaataattttgttattagtaaaatattactgttgatatcttctggagttactctagaaactttctacagtatccttgagacttttgatcccccaaatgaatgacataatatactgataataacaattctaattcmtaattatgtgttgatcaaggtaattctagctgttgtgacatataaaactcaaaatatcagtgagtttataaaatagacgtttatttcttgctcagataaagtttgagatgagttttcttgattggaaagtggcttttctctaagtggtgattcaggaacttaggctccttccatctttggctttgtgtccttcaatgtgttgcttccaaggtgcttactaccttcagcaagccaatctgtggatgggtaaaaagcatggtgggttgggcatggaaaagttcttactggctaggcctggtggtggcgcacatcacttctgctcacatgccattggctggaactctggcatataactacccagaaggctgggaaatgcagcctaacaatgttcccaagaaaaagaaatagatttggtcaacaattagtctctgccccaatgatctaagaatagatttgtgtaagctataaaaatgtacttcttaattattgcttatattgcatttcctgttttaagctgaggagatttgcctcacatatatacttacagtcataccc

SEQ ID NO: 684114 - DNA, 646 bp, Homo sapiens
acgccttcaacagaatgtaaaggttacraactgttttcaaaagcaattaaacatttaatttgtaagctctctacttatgctaacatctcccacactcattgtttttttgtctgagaccattattctgaatacctgataaaatttaatttctctctgcttctctccacacctaccctgaatattgtagtgctacgtttagctataaaggtagctttcttcattttttaattatcctatactgtacttctgtttccaaggaataatcaacccatttaaaaacatgccatttttcaacactaaaaagactactgtacctctgtagttgggctaggagataacttctcttcttctgactgggtgggcattttcaagcctccatattttttccaataaagccaacaaattgcacataatctacactgcatattaggtgggccccaagaataccactggtgagactgtgtagctaaagcagaagaaaaataagaaaaaacgaaaaatgctatttaatttgtaacatcaacacaaaataatcaaacattttaaaaatacttgtcatgcttagtttacaatgttattgttcccagcttacaagccaaacataatagtatatttgtttttttaatactcagaattcattaaacca

SEQ ID NO: 684115 - DNA, 423 bp, Homo sapiens
aagaccctcctaagtatttggaatagtatatgtgagtgataaactataaaccatgtttttaaaaaacttttgctttaaaaaacaatttccaaaaaaatggctaacatcaaaaaacgtcgtaaatcagtgcatccttttaagtcttccttatgttgtttttcctaagctgcctgtctctcggtrtgcacacccatgcaaaggaaaagccatggcgccaatgctttgcagagcgagaccctcttaaggagaacaaggactccggggggctgcgctagcctctgtctgaggaaaaccagggtaaactgcggaagaaagtgaggatgtatgtccagacaacgtccataaaggccatcctgaaatctcctttttaaatttatgaactttaaggactagaaacacaagcaaacgatagtagagatcaag

SEQ ID NO: 684116 - DNA, 630 bp, Homo sapiens
gaagcctcagttctaactcagtttcctcctgttttagcagtctaagatttggcaagccatgttctctctctgggctttagtcttccatttataaaacaaatggactgaataagatgatatttaaggtccttttcagctacaagagtccatgttccaagagaagataaaaattgcagcagcagcagcagcaatattcactgaagacttagcatgtgccagaatcttgctaggaaccatttacttaagattccattttgtatgaaatggcattaccggcattactacatcactttaaaaaaaaaaaaaactggaaagaagactggtttgattatgtttctttgtatggttacactctatttacaagaagaatctgaagtgatttacagtamaaatacataatgacaaataaagacattaagtaatccatgtaagaagggtagagcagaaattattttttaaataattaggcaacagagagagctcctgtctcaaaacaaaaacaacaaacaaacaaaaaagccccaaaatgaaagggtctgggtgtgtattcacaggagcagcaagagagagagatctactaaataatactggtggaaaggaagagttgaaccctagagataagggtgagca

SEQ ID NO: 684117 - DNA, 644 bp, Homo sapiens
ctgctcatcaaattaagtatgtataagattattcaaatgtagcattgcttgaagtagcagaatactacaaacaactcaaatattcgtcaatacagaatgggtgaaatgaacatgcaatacatgggggaagaccttttttccatatatagtgatatggaaagatttccataatttttttttttttgagatggagtctctctgtcaaccaggctgcagtgcagtggtgtcatctcagctcactgcaatctctgcctcccgagttcaagtggttctcacgcctcaatctcctcagtagctgggattacaggcttgcaccaccacgtccagctaatttttttatttttagtagagayggggtttcaccatgttggccaggctggtctgaaactcctcacctcaggtgatccgcctgcctcagcctctcaaaatgctgggattacaggcgtgagccaccgagcctggcctgattttcataatttattcttaaataaagaaagcaaaatacagaatagtgtatgtagtatgctaccttttgcatcagaaatgtggaggaaagggacttctggttacagcaaactaaataattagaccaatccttccactgagaacttgaaaagatagataaaatatttaaacaaaaacaa

SEQ ID NO: 684118 - DNA, 1722 bp, Homo sapiens
ggggacacagacattcagtccataacaataagttggcatccactcctctgctactccatcaggtcaaaatttagccactggtcatcactccttttttttggtccaggcaacaccttctgaaaataagctttttgtaatttttctatattactgataattaattataaagagagagctagaaagagccttaggaggcatatagtcacagcctcatattttagatatgagagactaagacttgaaaaaaaagtgaaacagctttcccagaatatccaatcrccatgggatggtcacaaaaagaaaaagtgatatatacagaccttgatgtattgtccctggacattattttccctactgaaataagtccaaaacatgtgtgtgtacacacacatgcccatgcatccatacctactgcaggtataaagagctaaatttaccactttaacagctgggattttacaagttgacttttcacaaggtgtttttgtggtttcttaaaatgtgttaggctctcttcttttttcttctcctgagattttaaaaatttaacatcaaatttaaacataaaaaggctgatgtggtaaagaccattactgcagaattactttacactggcaaactcaaatcatgggcagtgaattcgagcttgcattagtgtgacatcaaatcacctcctttgtgaaatagtgtttaaataatgtaatcagaagccaaatcggccacctgaaggccctgctgaaatcgcacaagtgggtgtttctctccatacctgattagagggaattcactttgaagtcggtgggaactgagaactggggccagccccacagtgacctggggatctaagcagcaccactcctaccactactcatggtatgggatgagttagtgagcaggtaatttagttcaaagatccatgatacgcatccccaacccatgagggaatgagctcctactggaaggcagatgcccattgagaacacaggtgtggcctagaggggttcaatggtcctcacacaggagttccatttcccaccaagcttcaactcaccttccttctctggtatcccctcagctcatcatcagcacaaccattcaccacacagaatgtgctgggaactgagttggacactctgttggagacctccctccagtggttgaccatctgataagagagccaaggcacgtacacaaaaggctaaataattacaaccctagcataaccaaagcaccagtgaagctagtgaagccataaataattatggagttcagagaagggtattgtggtaaattacaatgaactatgaggcccttttttcctttgacggaatctgaatccttttccacatttgattatatttcattatttagggcaggtttatggtccaccttcatttcaataagaaaggaggaagaaagcagaagaatctgaattataaaacacgagttgaacacctactgcaactacgtggtaggcactggaataaaaagacaattggaacatgatgcccagtgttgtaattgaacctcaccttaagggttatatcccagttgaaaggcaagtatgcatgagacccttagatggatcccaggaatgtcactggcaaactcgagcagaatcaaatagaggcctatgagcagagcagtgaggaagaacatggctacttaccccaaagaagtacaacagggccttgtaataagatgccatagatgtgggggctg

SEQ ID NO: 684119 - DNA, 1722 bp, Homo sapiens
ggggacacagacattcagtccataacaataagttggcatccactcctctgctactccatcaggtcaaaatttagccactggtcatcactccttttttttggtccaggcaacaccttctgaaaataagctttttgtaatttttctatattactgataattaattataaagagagagctagaaagagccttaggaggcatatagtcacagcctcatattttagatatgagagactaagacttgaaaaaaaagtgaaacagctttcccagaatatccaatcaccatgggatggtcacaaaaagaaaaagtgatatatacagaccttgatgtattgtccctggacattattttccctactgaaataagtccaaaacatgtgtgtgtacacacacatgcccatgcatccatacctactgcaggtataaagagctaaatttaccactttaacagctgggattttacaagttgacttttcacaaggtgtttttgtggtttcttaaaatgtgttaggctctcttcttttttcttctcctgagattttaaaaatttaacatcaaatttaaacataaaaaggctgatgtggtaaagaccattactgcagaattactttacactggcaaactcaaatcatgggcagtgaattcgagcttgcattagtgtgacatcaaatcacctcctttgtgaaatagtgtttaaataatgtaatcagaagccaaatcggccacctgaaggccctgctgaaatcgcacaagtgggtgtttctctccatacctgattagagggaattcactttgaagtcggtgggaactgagaactggggccagccccacagtgacctggggatctaagcagcaccactcctaccactactcatggtatgggatgagttagtgagcaggtaatttagttcaaagatccatgatacgcatccccaacccatgagggaatgagctcctactggaaggcagatgcccattgagaacacaggtgtggcctagaggggttcaatggtcctcacacaggagttccatttcccaccaagcttcaactcaccttccttctctggtatcccctcagctcatcatcagcacaaccattcaccacacagaatgtgctgggaactgagttggacactctgttggagacctccctccagtggttgaccatctgataagagagccaaggcacgtacacaaaaggctaaataattacaaccctagcataaccaaagcaccagtgaagctagtgaagccataaataattatggagttcagagaagggtattgtggtaaattacaatgaactatgaggcccttttttcctttgacggaatctgaatccttttccacatttgattatatttcattatttagggcaggtttatggyccaccttcatttcaataagaaaggaggaagaaagcagaagaatctgaattataaaacacgagttgaacacctactgcaactacgtggtaggcactggaataaaaagacaattggaacatgatgcccagtgttgtaattgaacctcaccttaagggttatatcccagttgaaaggcaagtatgcatgagacccttagatggatcccaggaatgtcactggcaaactcgagcagaatcaaatagaggcctatgagcagagcagtgaggaagaacatggctacttaccccaaagaagtacaacagggccttgtaataagatgccatagatgtgggggctg

SEQ ID NO: 684120 - DNA, 1722 bp, Homo sapiens
ggggacacagacattcagtccataacaataagttggcatccactcctctgctactccatcaggtcaaaatttagccactggtcatcactccttttttttggtccaggcaacaccttctgaaaataagctttttgtaatttttctatattactgataattaattataaagagagagctagaaagagccttaggaggcatatagtcacagcctcatattttagatatgagagactaagacttgaaaaaaaagtgaaacagctttcccagaatatccaatcaccatgggatggtcacaaaaagaaaaagtgatatatacagaccttgatgtattgtccctggacattattttccctactgaaataagtccaaaacatgtgtgtgtacacacacatgcccatgcatccatacctactgcaggtataaagagctaaatttaccactttaacagctgggattttacaagttgacttttcacaaggtgtttttgtggtttcttaaaatgtgttaggctctcttcttttttcttctcctgagattttaaaaatttaacatcaaatttaaacataaaaaggctgatgtggtaaagaccattactgcagaattactttacactggcaaactcaaatcatgggcagtgaattcgagcttgcattagtgtgacatcaaatcacctcctttgtgaaatagtgtttaaataatgtaatcagaagccaaatcggccacctgaaggccctgctgaaatcgcacaagtgggtgtttctctccatacctgattagagggaattcactttgaagtcggtgggaactgagaactggggccagccccacagtgacctggggatctaagcagcaccactcctaccactactcatggtatgggatgagttagtgagcaggtaatttagttcaaagatccatgatacgcatccccaacccatgagggaatgagctcctactggaaggcagatgcccattgagaacacaggtgtggcctagaggggttcaatggtcctcacacaggagttccatttcccaccaagcttcaactcaccttccttctctggtatcccctcagctcatcatcagcacaaccattcaccacacagaatgtgctgggaactgagttggacactctgttggagacctccctccagtggttgaccatctgataagagagccaaggcacgtacacaaaaggctaaataattacaaccctagcataaccaaagcaccagtgaagctagtgaagccataaataattatggagttcagagaagggtattgtggtaaattacaatgaactatgaggcccttttttcctttgacggaatctgaatccttttccacatttgattatatttcattatttagggcaggtttatggtccaccttcatttcaataagaaaggaggaagaaagcagaagaatctgaattataaaacacgagttgaacayctactgcaactacgtggtaggcactggaataaaaagacaattggaacatgatgcccagtgttgtaattgaacctcaccttaagggttatatcccagttgaaaggcaagtatgcatgagacccttagatggatcccaggaatgtcactggcaaactcgagcagaatcaaatagaggcctatgagcagagcagtgaggaagaacatggctacttaccccaaagaagtacaacagggccttgtaataagatgccatagatgtgggggctg

SEQ ID NO: 684121 - DNA, 1722 bp, Homo sapiens
ggggacacagacattcagtccataacaataagttggcatccactcctctgctactccatcaggtcaaaatttagccactggtcatcactccttttttttggtccaggcaacaccttctgaaaataagctttttgtaatttttctatattactgataattaattataaagagagagctagaaagagccttaggaggcatatagtcacagcctcatattttagatatgagagactaagacttgaaaaaaaagtgaaacagctttcccagaatatccaatcaccatgggatggtcacaaaaagaaaaagtgatatatacagaccttgatgtattgtccctggacattattttccctactgaaataagtccaaaacatgtgtgtgtacacacacatgcccatgcatccatacctactgcaggtataaagagctaaatttaccactttaacagctgggattttacaagttgacttttcacaaggtgtttttgtggtttcttaaaatgtgttaggctctcttcttttttcttctcctgagattttaaaaatttaacatcaaatttaaacataaaaaggctgatgtggtaaagaccattactgcagaattactttacactggcaaactcaaatcatgggcagtgaattcgagcttgcattagtgtgacatcaaatcacctcctttgtgaaatagtgtttaaataatgtaatcagaagccaaatcggccacctgaaggccctgctgaaatcgcacaagtgggtgtttctctccatacctgattagagggaattcactttgaagtcggtgggaactgagaactggggccagccccacagtgacctggggatctaagcagcaccactcctaccactactcatggtatgggatgagttagtgagcaggtaatttagttcaaagatccatgatacgcatccccaacccatgagggaatgagctcctactggaaggcagatgcccattgagaacacaggtgtggcctagaggggttcaatggtcctcacacaggagttccatttcccaccaagcttcaactcaccttccttctctggtatcccctcagctcatcatcagcacaaccattcaccacacagaatgtgctgggaactgagttggacactctgttggagacctccctccagtggttgaccatctgataagagagccaaggcacgtacacaaaaggctaaataattacaaccctagcataaccaaagcaccagtgaagctagtgaagccataaataattatggagttcagagaagggtattgtggtaaattacaatgaactatgaggcccttttttcctttgacggaatctgaatccttttccacatttgattatatttcattatttagggcaggtttatggtccaccttcatttcaataagaaaggaggaagaaagcagaagaatctgaattataaaacacgagttgaacacctactgcaactacgtggtaggcactggaataaaaagacaattggaacatgatgcccagtgttgtaaytgaacctcaccttaagggttatatcccagttgaaaggcaagtatgcatgagacccttagatggatcccaggaatgtcactggcaaactcgagcagaatcaaatagaggcctatgagcagagcagtgaggaagaacatggctacttaccccaaagaagtacaacagggccttgtaataagatgccatagatgtgggggctg

SEQ ID NO: 684122 - DNA, 2664 bp, Homo sapiens
taagaacaaatattatcactttgctcctctccttaaaaccctagagagctcccctcttcctacaagaaaaattccaagttccttgggataaaattgacacgttttcaagtcaactctcatagctttaaacactgcctctttcctcatttatgtattcttcccatgcagaattgccrtattcacttaccatatgcataattatgctccaagataattctctacactgtcctttaaaatgatacttccttctagcttttataatatttacaaacctctatttgtaccattttggcattttatttgtaactagtaagtgacaaatattgttagtgaacaggaatcctctctttctgggcttatggtacaatgtacttccccatatctttgatgtaggtatgaaccttgtgacttgaaacgcacagtgaacccttggaggaagtgacctaggcagaggcattaaattgcccgtgcccaactctccattttctctcttttctttgttgaggtaatagtggaatcacagtttgataaagaattgcaatcctgagccacctcatggaggacagatgccctagagagtaagcccaggcctttggcagagtgcatctcaaccgcttaaatttggaaattggttttttactagaacctcttgaatggaaccgttagtttacatttcttttctctacactgcagtgtcaaattattgagagcaactactgtgctcacaatgttttgtacaaaggaaaaaaaaaatagggaaatcaactgaatgatataattgcctaagtgtggctaacgggcatttatcctctgtttttcttcattggctgcaaaactcccgcagttttcgtctcctctgtccccacttgttcctgatgtgaaggcagcctgaccaaaaccaaggcaaaatccacagttcttcatttcctgagttgctactttagggtattatgtgttataaaatgaggtatatgaggaaccaattccacaagaatgactgtagcaatatatatgcatcttgaaaagaaaaaaaggtaaaattgaattcattttccatgaaaatttcatggacaactactgagaaaaaaagcaatttctggcagaaccattttaaaggcaaaaagctgtaggtgcaaataatccaaatagcaaatggatttgctctctcatcttgaaggtaaatttcatgttttcagcactaaaaatttattagtacaattttttcccctcttccttagctcaagtggacaccagtaaacctttgcataaagttttggactactgccaatgcacatacatctttgcttccctctctcctgattctgttcagctcgggattctttgcatagggagtttgggattcctctctcaagccactttcaagggtggaatttatttacctagtgatggtaattgggccttggtggtcttgtttataacccttaaattccagtcatcaatctacacctcatttagaagccttgtctactgtattttggcaatttgccaatgactaaaatgcacagtaaaaatttctacatgtgaaaatgagaaaaagcagtcttgaattaagttgtcaatcctaaagcacattctaatttgctctgaaaccttaatttaaaaatcacagagttgacttttcttcacctataaagtaaaactttatctgacgaatatttttcctaatgggatagagatatcaaaacttaaaaacaatcagcaattatttcttagatgtaaggaaaatcagataacctattacaatctaatgagcttcctgttaaaaataatattaagtcaaaaataaatgttgagatacccttatatgacttataacatcaaacactatgtacagtgactatatttttcatttgcaatccatatatttcaatagtgatataagtgaaaaaaattaaatttcactatacattgcactcgtgtgtacaccagaacttgaaattctacaacttataatagttctgctgggcacggtgactcatgtctgtaatcccagcatctaccccatctctactaaaaatacaaacattagctgggagtggtggcgtgctattcgggatgctgatgcaggagaatagcttgaaccccgaaggcggaggttgcagtgagccaagattgtgccaccattgcacaccagcctgggcgacagagcgagactctgtctcaaaaaaaaaaaagaaaaaaaaatctgtttatttgggtttatgatgaaattatcttaagtatgttttaaatctttattttaatttcattattcaatatttgcaatctagggaatgtgatgctgcttctttaactatagcagtttataggagaagataacttgaactgtcttataagacaagtccttagatgtttacaacttcagcttaattctaggggttgtacttggatttcaaaagacaccttatcatctttcagaagagagtagatttctcttctgtaaaggcagaatgaaaagcatacttttcaaatttgaaaaatatagtcaggttgatttaagtgacattttcttgctttaaattatattaaataggcatactctttttacgtttcatctgtagtaaagtgagagttagaaagaatggcaaagttctactcttcaaaagaccaaagcaccaactaagcctatgcatttttttttcc

SEQ ID NO: 684123 - DNA, 2664 bp, Homo sapiens
taagaacaaatattatcactttgctcctctccttaaaaccctagagagctcccctcttcctacaagaaaaattccaagttccttgggataaaattgacacgttttcaagtcaactctcatagctttaaacactgcctctttcctcatttatgtattcttcccatgcagaattgccgtattcacttaccatatgcataattatgctccaagataattctctacactgtcctttaaaatgatacttccttctagcttttataatatttacaaacctctatttgtaccattttggcattttatttgtaactagtaagtgacaaatattgttagtgaacaggaatcctctctttctgggcttatggtacaatgtacttccccatatctttgatgtaggtatgaaccttgtgacttgaaacgcacagtgaacccttggaggaagtgacctaggcagaggcattaaattgcccgtgcccaactctccattttctctcttttctttgttgaggtaatagtggaatcacagtttgataaagaattgcaatcctgagccacctcatggaggacagatgccctagagagtaagcccaggcctttggcagagtgcatctcaaccgcttaaatttggaaattggttttttactagaacctcttgaatggaaccgttagtttacatttcttttctctacactgcagtgtcaaattattgagagcaactactgtgctcacaatgttttgtacaaaggaaaaaaaaaatagggaaatcaactgaatgatataattgcctaagtgtggctaacgggcatttatcctctgtttttcttcattggctgcaaaactcccgcagttttcrtctcctctgtccccacttgttcctgatgtgaaggcagcctgaccaaaaccaaggcaaaatccacagttcttcatttcctgagttgctactttagggtattatgtgttataaaatgaggtatatgaggaaccaattccacaagaatgactgtagcaatatatatgcatcttgaaaagaaaaaaaggtaaaattgaattcattttccatgaaaatttcatggacaactactgagaaaaaaagcaatttctggcagaaccattttaaaggcaaaaagctgtaggtgcaaataatccaaatagcaaatggatttgctctctcatcttgaaggtaaatttcatgttttcagcactaaaaatttattagtacaattttttcccctcttccttagctcaagtggacaccagtaaacctttgcataaagttttggactactgccaatgcacatacatctttgcttccctctctcctgattctgttcagctcgggattctttgcatagggagtttgggattcctctctcaagccactttcaagggtggaatttatttacctagtgatggtaattgggccttggtggtcttgtttataacccttaaattccagtcatcaatctacacctcatttagaagccttgtctactgtattttggcaatttgccaatgactaaaatgcacagtaaaaatttctacatgtgaaaatgagaaaaagcagtcttgaattaagttgtcaatcctaaagcacattctaatttgctctgaaaccttaatttaaaaatcacagagttgacttttcttcacctataaagtaaaactttatctgacgaatatttttcctaatgggatagagatatcaaaacttaaaaacaatcagcaattatttcttagatgtaaggaaaatcagataacctattacaatctaatgagcttcctgttaaaaataatattaagtcaaaaataaatgttgagatacccttatatgacttataacatcaaacactatgtacagtgactatatttttcatttgcaatccatatatttcaatagtgatataagtgaaaaaaattaaatttcactatacattgcactcgtgtgtacaccagaacttgaaattctacaacttataatagttctgctgggcacggtgactcatgtctgtaatcccagcatctaccccatctctactaaaaatacaaacattagctgggagtggtggcgtgctattcgggatgctgatgcaggagaatagcttgaaccccgaaggcggaggttgcagtgagccaagattgtgccaccattgcacaccagcctgggcgacagagcgagactctgtctcaaaaaaaaaaaagaaaaaaaaatctgtttatttgggtttatgatgaaattatcttaagtatgttttaaatctttattttaatttcattattcaatatttgcaatctagggaatgtgatgctgcttctttaactatagcagtttataggagaagataacttgaactgtcttataagacaagtccttagatgtttacaacttcagcttaattctaggggttgtacttggatttcaaaagacaccttatcatctttcagaagagagtagatttctcttctgtaaaggcagaatgaaaagcatacttttcaaatttgaaaaatatagtcaggttgatttaagtgacattttcttgctttaaattatattaaataggcatactctttttacgtttcatctgtagtaaagtgagagttagaaagaatggcaaagttctactcttcaaaagaccaaagcaccaactaagcctatgcatttttttttcc

SEQ ID NO: 684124 - DNA, 623 bp, Homo sapiens
tgctggggggtgcctcccagttaggctgctcgggggtcaggggtcagggacccacttgaggaggcagtctgcccgttctcagatctccagctgcatactgggagaaccactgctctcttcaaagcaccccttgcgcttcccgagtgaggcaatgcctcaccctgcttcagctcgcgtacagtgcgcgcacccactgacctgcscccactgtctggcactccctagtgagatgaacccgatacctcagatggaaatgcagaaatcacctgtcttctgcgtcgctcacgctgggagctgtagaccagagctgttcctattcggccatcttggctcctcccccgtaattaaaatatttttaaacaattgagagatatacaataacaatgtaaacaataattgtctctcaatggtgggattttgtggcttttatttatacttttctttattttcccaatttctataacagatacgatatttgaaatcaaaataaatatatactaaaatgaaataagttatcttcaaacacacccacttatatatacaaacatacataaatccatcatataagtactagtctagacatttaaaacatccctacattgtagatataaacaaaaaaagaa

SEQ ID NO: 684125 - DNA, 623 bp, Homo sapiens
tgctggggggtgcctcccagttaggctgctcgggggtcaggggtcagggacccacttgaggaggcagtctgcccgttctcagatctccagctgcatactgggagaaccactgctctcttcaaagcaccccttgcgcttcccgagtgaggcaatgcctcaccctgcttcagctcgcgtacagtgcgcgcacccactgacctgcccccactgtctggcactccctagtgagatgaacccgatacctcagatggaaatgcagaaatcacctgtcttctgcgtcgctcacgctgggagctgtagaccrgagctgttcctattcggccatcttggctcctcccccgtaattaaaatatttttaaacaattgagagatatacaataacaatgtaaacaataattgtctctcaatggtgggattttgtggcttttatttatacttttctttattttcccaatttctataacagatacgatatttgaaatcaaaataaatatatactaaaatgaaataagttatcttcaaacacacccacttatatatacaaacatacataaatccatcatataagtactagtctagacatttaaaacatccctacattgtagatataaacaaaaaaagaa

SEQ ID NO: 684126 - DNA, 623 bp, Homo sapiens
tgctggggggtgcctcccagttaggctgctcgggggtcaggggtcagggacccacttgaggaggcagtctgcccgttctcagatctccagctgcatactgggagaaccactgctctcttcaaagcaccccttgcgcttcccgagtgaggcaatgcctcaccctgcttcagctcgcgtacagtgcgcgcacccactgacctgcccccactgtctggcactccctagtgagatgaacccgatacctcagatggaaatgcagaaatcacctgtcttctgcgtcgctcacgctgggagctgtagaccagagctgttcctattcggccatcttggctcctcccccgtaattaaaatatttttaaacaattgagagatatacaataacaatgtaaacaataattgtctctcaatggtgggattttgtggcttttatttatacttttctttattttcccaatttctataacagatacgatatttgaaatcaaaataaatatatactaaaatgaaataagttatcttcaaacacacmcacttatatatacaaacatacataaatccatcatataagtactagtctagacatttaaaacatccctacattgtagatataaacaaaaaaagaa

SEQ ID NO: 684127 - DNA, 716 bp, Homo sapiens
tttcatgggtcatttcatgtaatcctcacagcattccaatgaaattttctcttgccattagcaccttacagaagaagaactgagtttttggaggggttaggtaacatagagattcatcactagtatgtggcacaactacactaaaattcaactgtctaacagtgtagcccatagtctgggccattgtgtttattatatttcttttcttgaaatctttcattttmtttgtttgggccggtaaaacctcatcagtttgctctgcatgtgagtttaaagacaagagtggtattttaaaatgtgaagagatgctcttccagaggcacacaactattactgtttgtgtgtcttcatgttatagatgctagtccagctccatcatctgtacttagctttagctgttcatttctcttgggacataaatacctgtttaaaataaagactgcaatgattagagacttaaatgagattgaggagaaattttctctacatagaaaaactacaagttttctccttcaaaaatttactgagcatcaattacccaaaatgtagtctgctaattgccacaggggatgcaaatttatttctaatctatcagcaattatacagaatttaagtctgcatgcttctccaacacaacttagttgaccaaacttcccctgctcaaactcttcttgaataatctcattcacatatgtggtttcagctacttccattga

SEQ ID NO: 684128 - DNA, 716 bp, Homo sapiens
tttcatgggtcatttcatgtaatcctcacagcattccaatgaaattttctcttgccattagcaccttacagaagaagaactgagtttttggaggggttaggtaacatagagattcatcactagtatgtggcacaactacactaaaattcaactgtctaacagtgtagcccatagtctgggccattgtgtttattatatttcttttcttgaaatctttcattttctttgtttgggccggtaaaacctcatcagtttgctctgcatgtgagtttaaagacaagagtggtattttaaaatgtgaagagatgctcttccagaggcacacaactattactgtttgtgtgtcttcatgttatagatgctagtccagctccatcatctgtacttagctttagctgttcatttctcttgggacataaatacctgtttaaaataaagactgcaatgattagagacttaaatgagattgaggagaaattttctctacatagaaaaactacaagttttctccttcaaaaatttrctgagcatcaattacccaaaatgtagtctgctaattgccacaggggatgcaaatttatttctaatctatcagcaattatacagaatttaagtctgcatgcttctccaacacaacttagttgaccaaacttcccctgctcaaactcttcttgaataatctcattcacatatgtggtttcagctacttccattga

SEQ ID NO: 684129 - DNA, 1950 bp, Homo sapiens
tcctggaaggaaggttctgctcacaaggatactcactgtagaattgttcactgcagtaaaaagttggaaactacctactgggtcctgaatgaaataacaattaattaaatgaaaatggtggtttggaagtaatttaagttagtgttaagcaccatccataggctccttttctttacctcacagggatagccctatttccagccagctttctagaaactctttttttcaatttaataagttaattgtatgttttttgttctgaacattatctttagagagtattcctatctctgtttatttctcatccaacaaaaaactgacaaaaccacatgtgtgcatatggtcaaggtttttaaaaattataaatttaacatggattcatttggaaaacaaaagcataaagaagacatcgaaatctgtgatttactcctcatccagatgtatagctagtattggcttgtcccgatagcctttaaatattcttttctattgctcaaatttctcttctcctttggaattttgctttccatgcctattcaggtgtgaatcatttgccctctgatctctccgtgttatggatcaattccaccagtctttttcttctgcctgagagactttcacctctttttaataatactcaataaggctgtgtttattttcttcttccagtgaactttttttttggttctggggcaccaactgaagattcaataattgttttctggatcagaaatatgaataataaaattcctgagataatcatgaagtttcatgtggtctcttgtgtggagctgaacatctataggattaatggactgacttaatcaagctactaatgggctccttttcctttaagaaaccatttttagttttgtaaatttatgcaaacctatgtcagtgaggttcatttacctatgatttctaaacaacaataacattgtggagtggtagtaatattgagtattatgggaacttattgaaacttctatggcagacatacaaatgtgccagctttcatacagtgaatggaagtggattgaaagctatgacactctgtttagccataaggagacagaatggcagagtagaaagaatgttgaactaaaaataaaggaaattaagttctaatctggattctgacacaattgtttgacctcatctgcaaaatcataatgttcatccaaatgatttccaaagtcccttctagtaaagaaattccatatattatcatgctgcttttctactaaacacagaagagatgagtttgggtttcaaggaagtgtttcctgacctaaagtataacaagacaccacatattttgctaagggaggtagagaattcttcacaagagagtttttaaaaaaggaaaaatcagctccctaaagtagggtatgtgcaatcttccaaaggagcatgagattgaggcactaaaggaacttgcaatgtctccaaccagaagattctgaattcacttgcaacttcccacagtaacaaatgaaaatcatactctagaacactgggtttgctgggtaaagacacttagtgtagcaagctccacttataatgggagcctctgtctctcctctgcctgatgctcttcaggcagtagtgtctatatttattatttactaaaatcatggatgacagttctctgaattttctgcctggtcattcagttggatatctataaaaaacatagtgggagaaaatatttattaaaaacttacaaggtaggcaatttgctacattatttgctcatctaattctcataactacataaagcaacatgatacagtgatgccttagtcttctcacctataaaagggagaaaagmaatggtgaagttttgcgagaataaatgaaataatacaaagcactgtacctaataagtatctttgatgtgtgactgctctatattaacataatgatgagcacatgataagtgtttaa

SEQ ID NO: 684130 - DNA, 606 bp, Homo sapiens
tttgtatgtcttctttggaaaaatgtttattcagatcctttgtccattttttagttaggttatttggttttttttgcaattgaattgtttgagttgcttatatattttggatattaacytcttatcagttatatgttctgcaaatattttctcccattcaatagattgtcttttcaatctgttgtttcctttgctatgcagaatctttttagttaaattcaaacccattagtctgtttttgcttttgttacaaattatgttgtgcttatgccaaataatacataataatgccagaaaatacaatggcgttcttgactaccaatcccaccccaccatcaccatcaccactgccctaatttcattcctgtccctggaggttaaccactataatttctggcatatacctttctggacatttttaagtgtatttaaaagatatatgtatccataaatatataattatatggttatatcttttacatgaatagtgtcatgtcatacacatttttcttcaactttccttatttgtttaaaaatctgtcttggaagtctttcaatggcagtacatacaggcctattgcattccttttaactgctgtgtggcta

SEQ ID NO: 684131 - DNA, 637 bp, Homo sapiens
tgattaaccccaattctgggaaaacctctaagatttccagtttaaatcctgcccttaggtcacacaaccttgatgttattatgcttaccataagtcctgcctttaaataattgttttacatatcccttctgaatcatgtataccctttccctatggtatataagccctgggtctagggagtaatggcgtagagatccaccatcttgtccagccattgcccaagatataaacatggcttctgtgtgcaagtccctatgaaatatttctttctgagaaggtggatttgtcagcctttttctttgacttctcagtttcctcagaccttgggggtaggtttgcgtagacctgcccactgcagaacatgtgtctgtgtgtgtgtgtgtgtgtgtgtgtgtgtgtgtgtgtgtgattcgacagtactctaagrgtggttaccaaaatttaaactcttgtgaatgcatatttttcatgaatgtttttgccagttggaccatatttaaattcagccaatgagaattcagtaatatcctgaattgagtcagcaattgattaaaatccaattcaaatggatttgcgttctattcaaatgttgattacatctctcagaatttggaaactaaactgtagtggtaattca

SEQ ID NO: 684132 - DNA, 640 bp, Homo sapiens
aacttggaatcagataatatggaaatcttcaaaagatatttctgtaagataagaaacagatggctaattgagaatcctggaagcaggtaattaaaakaacatcggcccaattctttcccctctatgaagctctcctgacttacttttcatgaatctgttttttttccaagatcctatagacaacaaattgtctgtacgactcattacattgctatctaaattgtaacctgctttgggagtctatggtctgtctttcacctgagatgtaagaaatctaagatcttgaaccatgttttaagcttgctctgcaggccttttatactgccaacttgaataccgagcaattacagacaataaaataatattattaaactcaactgaatgggttggtagtggttatttgtggtcctgaatttgagtaaagcaatactttttttttttccttcagtccctgaaagctcaggtagactatgtggttttccttgcctgagaacttaaaggtccagaaagaccactgactctgagagcagcaaaaagagaatgctttttctactctccaccctcaaaatgaacatcaaaagaaaaacaaggtcatgggaagaggcaaggcaggaagggatgcaatgcttatgtggtcaga

SEQ ID NO: 684133 - DNA, 640 bp, Homo sapiens
aacttggaatcagataatatggaaatcttcaaaagatatttctgtaagataagaaacagatggctaattgagaatcctggaagcaggtaattaaaataacatcggcccaattctttcccctctatgaagctctcctgacttacttttcatgaatctgttttttttccaagatcctatagacaacaaattgtctgtacgactcattacattgctatctaaattgtaacctgctttgggagtctatggtctgtctttcacctgagatgtaagaaatctaagatcttgaaccatgttttaagcttgctctgcaggccttttatactgccaacttgaataccgagcaattacagacaataaaataatattattaaactcaactgaatgggttggtagtggttatttgtggtcctgaatttgagtaaagcaatactttttttttttccttcagtccctgaaagctcaggtagactatgtggttttccttkcctgagaacttaaaggtccagaaagaccactgactctgagagcagcaaaaagagaatgctttttctactctccaccctcaaaatgaacatcaaaagaaaaacaaggtcatgggaagaggcaaggcaggaagggatgcaatgcttatgtggtcaga

SEQ ID NO: 684134 - DNA, 3054 bp, Homo sapiens
ggaatgagtcaaaaaatacttcctcaaaataagttttctcctcagctatgcaagctcaccctggctttatttggggcataattactagagaccagccaaagtctaggtcattggcacaatggaccccgttagcagcaaaccagggaccctgaactaatggcaaggaacgtagcctgcattgcactattaatatgtgcctgtcggaaaggctttattgttctaggtttttcatcagatcttggattgatgtatggctttgagactagaacaaatgctctagagggcagcacagagtcctaaatgcccccagtaagagggaccagtttgagcagagagagctttgcactggcttcctggagttttataaagccaaacctcagtgacgaggcaggctgcgggcttgragaagagaacacaatctgttctgagatgactggcgcttcaggcacatgatgcctgtggctggtgcgtgttaattcatgcgcagagaggtggtggtggtggttgttccccagccatgtttttctaattataatgaaaacaaacacacactcacacacatacacaccaaggaaattcctgttgctatacagggaatacttaagttatacagctaatgcctttcagggccccttctccagcttggatgtgccagcctactatgtcattctccagggtttctccatcctgtttgaaggtgatactgatttctgatgtttacttgcttatttgctgcattttttcttttcttttcttcctttgttttttttttttaattcacagaacaggcagtggtgacatgcatgacaggcatttgggatcagatgttgctgatccagaagcctaggtgtggccattttgtcatggcaactgttaagcaagtaaatagggtagagtagtcatctgacttatctccagcgatgttcagtttgttttgaatttctactctgtgacacttctgctctgaagccaagcatagatagatggtacctttcgttcaactcccaagttttcatttctctcaaatgaagttaagaggtttttaaaatagaaacacatcgatgtgagccattttcagactggatgggtttcctgaaccttgtctttttaatgctttacttctgctcttttagatcaatttctaagcgccaagaagagctattactcctttctcctagcagagaattctctaagatagaaaatgacacatgtagtcattgtataaattcttttattttcctgtaagcatcttgaccctctactatttgcagctgtttctggggaggagtagtttggataaccaacaaaccttgccacttcttcagtgggactcaaggcagcagaagaagactactgtctaaggatctgttagcttttacccagggtcctatgtctcttcatatgctgtgctttaaaaaaaaaaaaaataagtgaaagggcgtaagctgtgtttgagtgaggaagaaaaccttggaacttatttctctggtctgcagagggccgagctgctacctctgactgcagacttaagacagcccaatattggccaactactttactggccattgtgaggccatggtcaacatagagcataacatcttcccattgatgttcaaactgagaattgcctgagtgtggtatcccctgccataaggtgagctggaatacaccctcataatctgttaaaggccaaaattaaaatgtgatgttttcctctagtaggcaatggaaagagggaaaaaagagtagaggcactaggaagtttcagagaagtcaaaacattctggtccaaatggagttttaagcagagggagttttaccccgagaggacatttggcaatgctgaagacatttttgattgtcacgactggaggagtagaaggtgctgctgacatctaatgatctagaggccaggggtgctgctaaaatcctacagtgcacagggcagctcccacaacaaagaattatctgacccacaatgtcaatatagagacattgagaatcttctgacccacaagattgagaaatgctggtctagtgactagagtctcctgaattaagcagcctagattctaccctgtcttgactactagctgtatgagcttgaggataccccaaacctctatgaccttagtgtctgcatacactccatgcactggtatttctatatcctagggggtggagtagttgggtgagttatacttcctgaaatattaggctatagctaaggatcaaataggtttccagagtctgtaggccattagaaagttcagtgagccagctcatgcctgtaatcccagcactttgggaggctgaggcaggcagatcacgaggtcaggagatcgagaccatcctggctaacacggtgaaaccctgtctctactaaaaatacaaaaaaaaatagctgggcatggtggcgggtgcctgtagtcccagctactggggaggctgaggcaggagaatggcttgaacctgggaggcagagcttgcagtgagccgagattcgtgccactgcactccagcctgggcaacagagcgagactctgtctcaaaaaaaaaaaaaaaacagaacaaggaaaaaaagagaaagttcagagaatagccggtcacagtggctcatgcccgtaatcccagcactttgggaggctgaggtgggcggatcatgaggtcaggagatcgagaccatcctggctgacacggtgaaaacccatctctactaaaaatatattaaaaactagccgggcatggtggtgggtgcctatagtcccagctactcaggaggctgaggcaggagaatggcatgaacccaggaggcagagcttgcagtgagccaagatcgtgccactgcactccagcctgggggacagagcaagactcggtctcaaaaaaaaaaaaaaaatagcagttcagagaatagaattatttcttctggagattaagataggtttaggactggtctgaataaggcaccatgggattacggtgactaactgtccctctttgcctagtactgaagagtttcctgggacatgaaattgtcagtgctgaaactgg

SEQ ID NO: 684135 - DNA, 3054 bp, Homo sapiens
ggaatgagtcaaaaaatacttcctcaaaataagttttctcctcagctatgcaagctcaccctggctttatttggggcataattactagagaccagccaaagtctaggtcattggcacaatggaccccgttagcagcaaaccagggaccctgaactaatggcaaggaacgtagcctgcattgcactattaatatgtgcctgtcggaaaggctttattgttctaggtttttcatcagatcttggattgatgtatggctttgagactagaacaaatgctctagagggcagcacagagtcctaaatgcccccagtaagagggaccagtttgagcagagagagctttgcactggcttcctggagttttataaagccaaacctcagtgacgaggcaggctgcgggcttggagaagagaacacaatctgttctgagatgactggcgcttcaggcacatgatgcctgtggctggtgcgtgttaattcatgcgcagagaggtggtggtggtggttgttccccagccatgtttttctaattataatgaaaacaaacacacactcacacacatacacaccaaggaaattcctgttgctatacagggaatacttaagttatacagctaatgcctttcagggccccttctccagcttggatgtgccagcctactatgtcattctccagggtttctccatcctgtttgaaggtgatactgatttctgatgtttacttgcttatttgctgcrttttttcttttcttttcttcctttgttttttttttttaattcacagaacaggcagtggtgacatgcatgacaggcatttgggatcagatgttgctgatccagaagcctaggtgtggccattttgtcatggcaactgttaagcaagtaaatagggtagagtagtcatctgacttatctccagcgatgttcagtttgttttgaatttctactctgtgacacttctgctctgaagccaagcatagatagatggtacctttcgttcaactcccaagttttcatttctctcaaatgaagttaagaggtttttaaaatagaaacacatcgatgtgagccattttcagactggatgggtttcctgaaccttgtctttttaatgctttacttctgctcttttagatcaatttctaagcgccaagaagagctattactcctttctcctagcagagaattctctaagatagaaaatgacacatgtagtcattgtataaattcttttattttcctgtaagcatcttgaccctctactatttgcagctgtttctggggaggagtagtttggataaccaacaaaccttgccacttcttcagtgggactcaaggcagcagaagaagactactgtctaaggatctgttagcttttacccagggtcctatgtctcttcatatgctgtgctttaaaaaaaaaaaaaataagtgaaagggcgtaagctgtgtttgagtgaggaagaaaaccttggaacttatttctctggtctgcagagggccgagctgctacctctgactgcagacttaagacagcccaatattggccaactactttactggccattgtgaggccatggtcaacatagagcataacatcttcccattgatgttcaaactgagaattgcctgagtgtggtatcccctgccataaggtgagctggaatacaccctcataatctgttaaaggccaaaattaaaatgtgatgttttcctctagtaggcaatggaaagagggaaaaaagagtagaggcactaggaagtttcagagaagtcaaaacattctggtccaaatggagttttaagcagagggagttttaccccgagaggacatttggcaatgctgaagacatttttgattgtcacgactggaggagtagaaggtgctgctgacatctaatgatctagaggccaggggtgctgctaaaatcctacagtgcacagggcagctcccacaacaaagaattatctgacccacaatgtcaatatagagacattgagaatcttctgacccacaagattgagaaatgctggtctagtgactagagtctcctgaattaagcagcctagattctaccctgtcttgactactagctgtatgagcttgaggataccccaaacctctatgaccttagtgtctgcatacactccatgcactggtatttctatatcctagggggtggagtagttgggtgagttatacttcctgaaatattaggctatagctaaggatcaaataggtttccagagtctgtaggccattagaaagttcagtgagccagctcatgcctgtaatcccagcactttgggaggctgaggcaggcagatcacgaggtcaggagatcgagaccatcctggctaacacggtgaaaccctgtctctactaaaaatacaaaaaaaaatagctgggcatggtggcgggtgcctgtagtcccagctactggggaggctgaggcaggagaatggcttgaacctgggaggcagagcttgcagtgagccgagattcgtgccactgcactccagcctgggcaacagagcgagactctgtctcaaaaaaaaaaaaaaaacagaacaaggaaaaaaagagaaagttcagagaatagccggtcacagtggctcatgcccgtaatcccagcactttgggaggctgaggtgggcggatcatgaggtcaggagatcgagaccatcctggctgacacggtgaaaacccatctctactaaaaatatattaaaaactagccgggcatggtggtgggtgcctatagtcccagctactcaggaggctgaggcaggagaatggcatgaacccaggaggcagagcttgcagtgagccaagatcgtgccactgcactccagcctgggggacagagcaagactcggtctcaaaaaaaaaaaaaaaatagcagttcagagaatagaattatttcttctggagattaagataggtttaggactggtctgaataaggcaccatgggattacggtgactaactgtccctctttgcctagtactgaagagtttcctgggacatgaaattgtcagtgctgaaactgg

SEQ ID NO: 684136 - DNA, 668 bp, Homo sapiens
aggtcccagcagattacagaaaccttgattctttccatccaggcatgctgtgctctgcccaaatatgcccctgcttgccaccataccttgcaagccagggatgccatgctgctgcagccactcatgcagggtgcgggtggcactccagtggctgggagtaggacagcactctcccactaccagtgctgctacgtggatgcccgaggattcaaaccactgtagatggaaagagattgtgagaagcctcaggccaagttatttctttgcagcattttcccgattgtgtggccacagaccctatattcagccacattgaatggccttcaatataccaaacttttggtgcttttgcataggtatttccatttaccaacaacgctctctcctatacgaaacacaacccacaggcccagggtgccccgatgatcactgaaaatgacattttcctttttatttatttattatttattttttttgagacagagtctcactctgtcacccaggctgcaatgcagtggcgacatctaagctcactgcaacctctgcctcccggattcaagcaattctcttgctttagcctcccragtagctgggactacaggcgcccgccaccacacccggctaattttttgtatttttagtagagacggggtttcaccatgttagcc

SEQ ID NO: 684137 - DNA, 641 bp, Homo sapiens
atactttggatattggggaccccttgtggacaattcagacagagcgagggctctctgagattgcctgtcaaaagcaagtaaccaaaattcacacatgaaaaactgaatggaaagccacacagatgtggcactcacgtcgttcaggaaaagcagtttctctgctgttgtcatgtgagacaatcaaattagtctataagtttaatacaatcctaataaaatcttaatagggttttaaaattggaattggagaattctgattctcttttggaagagaaatgttcaataacagccaaaaaaaaaaaatctttaaaaagatyatgagtaggaattttccctgccatatatgaaaatgtagatctaaatatacagaaagtttataaatataaatcgattttgcaatataaatgtagcttatgatagtggtggcatttaaggtctcgaaggaagagtggttttttcaataaattgtatgaaataattggctatccactgaagggaaaaataacattagattgaatcttctaccccatcacatcaaacacaggtggtaaaacgattaaacatttagagaaaaaagttgaaatattaaatatttaaactatattttattaatattggggtagtaaatgccttcctcaaca

SEQ ID NO: 684138 - DNA, 641 bp, Homo sapiens
atactttggatattggggaccccttgtggacaattcagacagagcgagggctctctgagattgcctgtcaaaagcaagtaaccaaaattcacacatgaaaaactgaatggaaagccacacagatgtggcactcacgtcgttcaggaaaagcagtttctctgctgttgtcatgtgagacaatcaaattagtctataagtttaatacaatcctaataaaatcttaatagggttttaaaattggaattggagaattctgattctcttttggaagagaaatgttcaataacagccaaaaaaaaaaaatctttaaaaagatcatgagtaggaattttccctgccatatatgaaaatgtagatctaaatatacagaaagtttataaatataaatcgattttgcaatataaatgtagcttatgatagtggtggcatttaaggtctcgaaggaagagtggttttttcaataaattgtatgaaataattggctatccactgaaggraaaaataacattagattgaatcttctaccccatcacatcaaacacaggtggtaaaacgattaaacatttagagaaaaaagttgaaatattaaatatttaaactatattttattaatattggggtagtaaatgccttcctcaaca

SEQ ID NO: 684139 - DNA, 657 bp, Homo sapiens
ccagctattgaaatagctacatctcaatgttggagtagaatctttgctctgtagtccctcagttcccctagagaagagataggtctaccatgggtttcaggtgtatgatactcaacattatgaatggggatagaggtgggagtataagtgagggaggtaatttttcaatatagaaatttatttaacaacattgtttttaaattccatatatataccttctggtttgcatgacatttataaattgcaagcctttcctgggactgattcaatccatawctcagttgtcttctccctgtactctagtttgtggcattctctattctgccccaattacctctcccccatctgctttctcttttctaaatatatactgctatatcttatcagacaaggaatagtcagtcaccagctctttccattgttgcagatttagatcagttttatttctttagtttcactgccatagtttcataagaaaataatataatgtatgtaatcagtatcccattgtaaacctaaagtcatcctaatttcttctttatagtttcaacaaaaataaagttagcaattaaaatcatctgtctcttcaacaagaagatatttcatactttaaaaacaaacagataacaataaaaatacttgctctaagaaaaacat

SEQ ID NO: 684140 - DNA, 659 bp, Homo sapiens
gtccatgaattggttgctaccagtcaatgaagagataaattacttgcatcagagtgtaaatcaatacattgctttagctattaataaaattttgctaaaaaatcaaatcctgtcattgacctaaaaagtatctctagatttaaattcttgtgcatgcttatcttgcctgtggataagtaacagtttgtagactggtgctttgagttgcattgatctagactactatgattgatgttgcagacatgaataaataacaaagaaaagtaagaaaatatgagcaaaaatatggacaagttatggaacgtgaaaagatactgagataaaagtatcaaaaagaacaacatcactgttctgaatgtgtaacaaatgtttaattctgtcctaggtataaaggaggatgcatattattctattgaacagtaaatactccttatatcctaattagaattttcttagttttggagaattgtaaaaacataagtaaagcaggaaacaraaaacaacttagagactaatatgtgatctagaaagcgttaaattgtttgtaccaggcttcctatctacgcaaatctttagaaaagacaagtagttctacacaggcaattacttttatactgtaatttgatgggtagaagcttaacattttgtaattagcccta

SEQ ID NO: 684141 - DNA, 612 bp, Homo sapiens
agataatttagtgcagtatgcagtgaaggctggctcacagtaaattctcaaaattgttagctatgatgagggtgatcatgttatgactcctcaagtctatgtcagcagctacaatggctcgctctctctctccctctctctttctttcataaagatagggtctgctgtgttatccaacagtgcagtggcatgatcgtagctcactatagcctcaaactcctgggctcaagcgatcctcccacctcagtctcccaagtagttaggattacaggtgtcaaccaccatgcctaggtgaaagggttttctatgtgagactttagccaaagmaggcatacaagaacaccgttgagctgtaataatggtgaacattatgaacaatatttcttgggaaattctatttaattccttcatccccattacagtgaatttgcttagaatctttattcaacagactattgcttgaaaataaatgagttattaaatggaaaaatctcttcttgtgaaaaattttctctaaaatcctattagtcctaactagataatacattccttttgacatcttacatgtctgctattaataatctcaattcgtaagtctaactaaccagttga

SEQ ID NO: 684142 - DNA, 655 bp, Homo sapiens
ccaggggttataaactcaagtctgttgtcctaggttattgctataataatcataatttgtccctgccccagaaaytctgcatctactttcaggataacatgaataaatataggtgttcaaaacttatcagtccccaggtactatgctggtttgtaggcacatctcataacagtgatcaaggtgaagttcctgctctcatatagagtttacagtcaattgtggtcctgagaagcaaataatctattactacgtggtgtggtaaacgcatggcaggagatgttgtcagagatcagggaaatctaaactgagagctgatggtgaagagttagccagacgcctttgtctgaaaataagagaaaatcccaagccgacaaagcctcactatcttcacataacaagaaatcccaacaaaggatggctcagcaatgcagtaaggcccccgccccagctgtctttctgccccgctccatgtggcgatgatgcttgggctagctcccttcatggctgcaagacagctggagcttggcccacagtgggcagaacttctcatccaactctttttcaccaggatggcaaacctttctggaagcctccaccaggcttctctttatgtctcaagggacagaactgggtcacatgttcatgctcaaaccta

SEQ ID NO: 684143 - DNA, 703 bp, Homo sapiens
agctgaaagatcatagagtaatagaggtagatcaggtttttaataaccagaggcagttctgaaagaagagaattataaaatgacagacgctgctttatgtttaaaggcacaaaggtaaaaatttaggggagacaaggtaagtttactcagccgtaacagagactgcagaacactgagaaaatgcacatgcaaatataaagctcttgggggcatacccgagtgtctgtcttgagagccaaggtttagcccaggtaaaggcacccgatatgtatgtctagaatgaawgagtgaatgaatgaatggagaggcttggacttgaaatactatttgacaggagactactaaaggttgcttatcataggacacgtgtgacgaaaccatttctgatgaaaactcttgctttcaatacatagaatgaagtggaggagtacaagatataaagcgtcattagaaggctatgaaagtcatctggacataaagtaatcagggcctggactggggactcaagaactaaaaatcagaagtgcaatggaaaaaagtggtggttatacatcagtatacctactctgcttgttttatttactaagaatgtcacaagcatataagaaagtggtgttgcacattttagattcatttgttactgcattatgaaaaacaggatggcatttttaatctagtttatctgatcctgaattttaagaag

SEQ ID NO: 684144 - DNA, 1336 bp, Homo sapiens
aaggtctcacactctgtcgcccaggctggagtgcagtggtgcgatcttgcctcactgcagcctcaacctctgaggcttgatctgtcctccaacttcagcctcctgagtagctgggactacaggtgtgcgccaccaaaccaggctaagttttgtagcgacggcgtttcatcttgatgcccaggctggtctcgaactcctaggatcaagggatccacctggttcagcttcccaaaatgctgaaattacaggtgtgagccatcgaactttgtcaatttcatgttttctagcagaaagttctctttcacttttggtatcagggaaaattttatttattttttttttttgagacagagtttcactcttgttgcccaggttggaatgcaatggtgcgatcttgactcactgcaacctctgcctcccgggttcaagcgattctcctgcctcagactcccgagtagctgggattgcaggcacccgtcaccacacccggctaattttttgtatttttagtagaaacagggtttcatcatgttggccacgctggtcttgaactcctgacctcaggtgattcgcctgcctcagcctcccaaagtgctgggattacaggcttgagctactgcgctcagccaattttacattttttwaaaaaaatttatgtttacggttacacaagcacctaccagagtatctggcacacagtaggtgttcaatgaatgaaagaatgaatgaacattgaatcccttccttctggagagccggacttcctctgagctgcctgggttcaaggaacaaactcccagctcctggtgcttcctgctataactgcagtttttttttttttttttttttttgagacagagtcttgctcttgttgcccaagctggagtgcaatggtgttatcttggctcactgcaacccctgcctcccaggttcaagcgattctcctgcctcagccttctgaatagctgggactacaggcgcccaccaccacgtccggctaatttttgtatttttggtagagacgggggtttcaccatgttggtcaggctggccttgaactcctgacctcaggtgatccacctgccttggccttccaaagtgctgggattataggcatgaaccaccgcgcctggctgactgcagttttctgcggaggcactcggcctccccacctgctgctcctggcttttcctccaggactctgccagagggcagatgagaccaggaggcaacaggacctccaggagatgggaaggagccctcccctatcagagtggaggagaaacctggattggatgagcagagagccctctgtaaaggtccggaggccctggtg

SEQ ID NO: 684145 - DNA, 274 bp, Homo sapiens
tttgggccatttgctccttcctggcctcctctgtcctttctgggccattaacgtaatctgaggactttctccttacctggttaaaaccaccaaacctccttttctcgcatggggcccgttccacactcatcttcatctggggctggctccccgaccactgcttgtcctcatggcaacttggccctctcccaatgtctctggggtttagacttcagcccagcatatggggkgtgtgtgtgtgtgtgtgtgtgtgtgtgtgtgtgtgtgtgtgtgt

SEQ ID NO: 684146 - DNA, 2087 bp, Homo sapiens
ttcraaacttagatgtatttgtgttgtggtaaatatctgttccttttcttcttttgagacagagtcttaccttgtcacccaggctggagtgcagtggtgcaatcttggctcactgcaacttccacctcccgagttcaagtgattctcctgcctcagcctcccaagtagctagaattacaggcacccaccaccacagccagctaatttttgtatttttagtagacatggggtttcaccatattggccaggctggtctcgaactcctgacctcaggtgttccacccaccttggcctcccaaagtgctgggattacaggtgtgagccactgcgcctggccctgtttcttttcttaaagctgcccagactaacttgattttgccaaatgctggaaattaacatatattgctaagtgcatggagaagaacagtaaactgcttcaccttcttggcatacaaaggaatcacatctctgaatgtccagtcacatgtctacaagctcctgttaccaggaaagtcagtacctccatccatcttgagtcctccccacaccaggcaagtagattctgctgccatctttgcctctgctgctgccccccagtatcactgctgaaaactcgtcccgcagtctgcaggacacctgtggaccattgcggtgatgcccctactgttcatacttcaatggtagccctcgtttgggttcccagacctcagtttccttaggtcaccttcgcagacttgagagtctccccaaacctccataccagcagggtgggtgagccctgcaactcccagcctcagctcacattgtgccaggagtggtgcaaccctttcacaagaccgtggccagagccctcccacaaatctcctgacttaagatcttgacctggaagagacaaatggggtcttcattcttcccttccaggagactagtttgcttgtgccagaactcagctcaccagggagccagcacctgctaagccggtttgacaccaactcccacctggaaaatgggagctgattccccttcccttgtaaaatgaagaggccatccagcgattatgaccagaaaccagatctatgccaagatgtccttctgtccttctgtttgtttaaaaacgcagctgggagctttatcttctctattaaaagcaattgttgcagattacactgagttgagaggagtagatgatgagcccctgggaagaaaacaatttccatttggttacaaaaacatacaagcagactgctgagaagctgataccctcgttttgcttgtagaacatattttgtattagttctttcctttttcagagtgtattaatttgcatttgctcctttttagaatttggctaatgacttatgaattttttaaagaccaattctaagggagttttcccttaaaaaaaaaaaacacagcattgtgctatttcaagaccatctcagatgaatgaataaataaataaacatagctttaaatcctccaaacaaccaccccaaaaagaagctgtgggcccagcataaccagtcttcccacactagccacctgtgccctcttacacccgccctcatccccaagtgctctggcctgagggcaaacaaaaccgacagcttgcctttttctccatcagggtggaattctgaaaagaaatttgactgaagacaagatagagggaaacaaggaccctctaagaagcatgagaccagatggatttacaaagtatggtgtgagacgcctatggggcacactcactgctcaccccggcttagcacctctttctccctggaggccgcatctgctggggatgcattcctgattttgagcgttctctaccccagccaagtatttccagagtactggttccagcaaaaactcccatcagaagtccatggccagtgggtggccatggggtcagcagagcctcctgcctcaaacccacccacctcccagtacatgatgagaaggaagagccaggctgcctggaaggacctgttcccacttctccatgccgtcccactctggcccgctctgcagaagagccatttcctcccatgtgctactgattaagtttatcaattctctcttcttcc

SEQ ID NO: 684147 - DNA, 2087 bp, Homo sapiens
ttcaaaacttagatgtatttgtgttgtggtaaatatctgttccttttcttcttttgagacagagtcttaccttgtcacccaggctggagtgcagtggtgcaatcttggctcactgcaacttccacctcccgagttcaagtgattctcctgcctcagcctcccaagtagctagaattacaggcacccaccaccacagccagctaatttttgtatttttagtagacatggggtttcaccatattggccaggctggtctcgaactcctgacctcaggtgttccacccaccttggcctcccaaagtgctgggattacaggtgtgagccactgcgcctggccctgtttcttttcttaaagctgcccagactaacttgattttgccaaatgctggaaattaacatatattgctaagtgcatggagaagaacagtaaactgcttcaccttcttggcatacaaaggaatcacatctctgaatgtccagtcacatgtctacaagctcctgttaccaggaaagtcagtacctccatccatcttgagtcctccccacaccaggcaagtagattctgctgccatctttgcctctgctgctgccccccagtatcactgctgaaaactcgtcccgcagtctgcaggacacctgtggaccattgcggtgatgcccctactgttcatacttcaatggtagccctcgtttgggttcccagacctcagtttccttaggtcaccttcgcagacttgagagtctccccaaacctccataccagcagggtgggtgagccctgcaactcccagcctcagctcacattgtgccaggagtggtgcaaccctttcacaagaccgtggccagagccctcccacaaatctcctgacttaagatcttgacctggaagagacaaatggggtcttcattcttcccttccaggagactagtttgcttgtgccagaactcagctcaccagggagccagcacctgctaagccggtttgacaccaactcccacctggaaaatgggagctgattccccttcccttgtaaaatgaagaggccatccagcgattatgaccagaaaccagatctatgccaagatgtccttctgtccttctgtttgtttaaaaacgcagctgggagctttatcttctctattaaaagcaattgttgcagattacactgagttgagaggagtagatgatgagcccctgggaagaaaacaatttccatttggttacaaaaacatacaagcagactgctgagaagctgataccctcgttttgcttgtagaacatattttgtattagttctttcctttttcagagtgtattaatttgcatttgctcctttttagaatttggctaatgacttatgaattttttaaagaccaaytctaagggagttttcccttaaaaaaaaaaaacacagcattgtgctatttcaagaccatctcagatgaatgaataaataaataaacatagctttaaatcctccaaacaaccaccccaaaaagaagctgtgggcccagcataaccagtcttcccacactagccacctgtgccctcttacacccgccctcatccccaagtgctctggcctgagggcaaacaaaaccgacagcttgcctttttctccatcagggtggaattctgaaaagaaatttgactgaagacaagatagagggaaacaaggaccctctaagaagcatgagaccagatggatttacaaagtatggtgtgagacgcctatggggcacactcactgctcaccccggcttagcacctctttctccctggaggccgcatctgctggggatgcattcctgattttgagcgttctctaccccagccaagtatttccagagtactggttccagcaaaaactcccatcagaagtccatggccagtgggtggccatggggtcagcagagcctcctgcctcaaacccacccacctcccagtacatgatgagaaggaagagccaggctgcctggaaggacctgttcccacttctccatgccgtcccactctggcccgctctgcagaagagccatttcctcccatgtgctactgattaagtttatcaattctctcttcttcc

SEQ ID NO: 684148 - DNA, 2087 bp, Homo sapiens
ttcaaaacttagatgtatttgtgttgtggtaaatatctgttccttttcttcttttgagacagagtcttaccttgtcacccaggctggagtgcagtggtgcaatcttggctcactgcaacttccacctcccgagttcaagtgattctcctgcctcagcctcccaagtagctagaattacaggcacccaccaccacagccagctaatttttgtatttttagtagacatggggtttcaccatattggccaggctggtctcgaactcctgacctcaggtgttccacccaccttggcctcccaaagtgctgggattacaggtgtgagccactgcgcctggccctgtttcttttcttaaagctgcccagactaacttgattttgccaaatgctggaaattaacatatattgctaagtgcatggagaagaacagtaaactgcttcaccttcttggcatacaaaggaatcacatctctgaatgtccagtcacatgtctacaagctcctgttaccaggaaagtcagtacctccatccatcttgagtcctccccacaccaggcaagtagattctgctgccatctttgcctctgctgctgccccccagtatcactgctgaaaactcgtcccgcagtctgcaggacacctgtggaccattgcggtgatgcccctactgttcatacttcaatggtagccctcgtttgggttcccagacctcagtttccttaggtcaccttcgcagacttgagagtctccccaaacctccataccagcagggtgggtgagccctgcaactcccagcctcagctcacattgtgccaggagtggtgcaaccctttcacaagaccgtggccagagccctcccacaaatctcctgacttaagatcttgacctggaagagacaaatggggtcttcattcttcccttccaggagactagtttgcttgtgccagaactcagctcaccagggagccagcacctgctaagccggtttgacaccaactcccacctggaaaatgggagctgattccccttcccttgtaaaatgaagaggccatccagcgattatgaccagaaaccagatctatgccaagatgtccttctgtccttctgtttgtttaaaaacgcagctgggagctttatcttctctattaaaagcaattgttgcagattacactgagttgagaggagtagatgatgagcccctgggaagaaaacaatttccatttggttacaaaaacatacaagcagactgctgagaagctgataccctcgttttgcttgtagaacatattttgtattagttctttcctttttcagagtgtattaatttgcatttgctcctttttagaatttggctaatgacttatgaattttttaaagaccaattctaagggagttttcccttaaaaaaaaaaaamacagcattgtgctatttcaagaccatctcagatgaatgaataaataaataaacatagctttaaatcctccaaacaaccaccccaaaaagaagctgtgggcccagcataaccagtcttcccacactagccacctgtgccctcttacacccgccctcatccccaagtgctctggcctgagggcaaacaaaaccgacagcttgcctttttctccatcagggtggaattctgaaaagaaatttgactgaagacaagatagagggaaacaaggaccctctaagaagcatgagaccagatggatttacaaagtatggtgtgagacgcctatggggcacactcactgctcaccccggcttagcacctctttctccctggaggccgcatctgctggggatgcattcctgattttgagcgttctctaccccagccaagtatttccagagtactggttccagcaaaaactcccatcagaagtccatggccagtgggtggccatggggtcagcagagcctcctgcctcaaacccacccacctcccagtacatgatgagaaggaagagccaggctgcctggaaggacctgttcccacttctccatgccgtcccactctggcccgctctgcagaagagccatttcctcccatgtgctactgattaagtttatcaattctctcttcttcc

SEQ ID NO: 684149 - DNA, 2087 bp, Homo sapiens
ttcaaaacttagatgtatttgtgttgtggtaaatatctgttccttttcttcttttgagacagagtcttaccttgtcacccaggctggagtgcagtggtgcaatcttggctcactgcaacttccacctcccgagttcaagtgattctcctgcctcagcctcccaagtagctagaattacaggcacccaccaccacagccagctaatttttgtatttttagtagacatggggtttcaccatattggccaggctggtctcgaactcctgacctcaggtgttccacccaccttggcctcccaaagtgctgggattacaggtgtgagccactgcgcctggccctgtttcttttcttaaagctgcccagactaacttgattttgccaaatgctggaaattaacatatattgctaagtgcatggagaagaacagtaaactgcttcaccttcttggcatacaaaggaatcacatctctgaatgtccagtcacatgtctacaagctcctgttaccaggaaagtcagtacctccatccatcttgagtcctccccacaccaggcaagtagattctgctgccatctttgcctctgctgctgccccccagtatcactgctgaaaactcgtcccgcagtctgcaggacacctgtggaccattgcggtgatgcccctactgttcatacttcaatggtagccctcgtttgggttcccagacctcagtttccttaggtcaccttcgcagacttgagagtctccccaaacctccataccagcagggtgggtgagccctgcaactcccagcctcagctcacattgtgccaggagtggtgcaaccctttcacaagaccgtggccagagccctcccacaaatctcctgacttaagatcttgacctggaagagacaaatggggtcttcattcttcccttccaggagactagtttgcttgtgccagaactcagctcaccagggagccagcacctgctaagccggtttgacaccaactcccacctggaaaatgggagctgattccccttcccttgtaaaatgaagaggccatccagcgattatgaccagaaaccagatctatgccaagatgtccttctgtccttctgtttgtttaaaaacgcagctgggagctttatcttctctattaaaagcaattgttgcagattacactgagttgagaggagtagatgatgagcccctgggaagaaaacaatttccatttggttacaaaaacatacaagcagactgctgagaagctgataccctcgttttgcttgtagaacatattttgtattagttctttcctttttcagagtgtattaatttgcatttgctcctttttagaatttggctaatgacttatgaattttttaaagaccaattctaagggagttttcccttaaaaaaaaaaaacacagcattgtgctatttcaagaccatctcagatgaatgaataaataaataaacatagctttaaatcctccaaacaaccaccccaaaaagaagytgtgggcccagcataaccagtcttcccacactagccacctgtgccctcttacacccgccctcatccccaagtgctctggcctgagggcaaacaaaaccgacagcttgcctttttctccatcagggtggaattctgaaaagaaatttgactgaagacaagatagagggaaacaaggaccctctaagaagcatgagaccagatggatttacaaagtatggtgtgagacgcctatggggcacactcactgctcaccccggcttagcacctctttctccctggaggccgcatctgctggggatgcattcctgattttgagcgttctctaccccagccaagtatttccagagtactggttccagcaaaaactcccatcagaagtccatggccagtgggtggccatggggtcagcagagcctcctgcctcaaacccacccacctcccagtacatgatgagaaggaagagccaggctgcctggaaggacctgttcccacttctccatgccgtcccactctggcccgctctgcagaagagccatttcctcccatgtgctactgattaagtttatcaattctctcttcttcc

SEQ ID NO: 684150 - DNA, 1984 bp, Homo sapiens
tgaccatctagcttgagcaaatgaatggatggtaaggtattaaatgagatagtgggtgaaagggagcaaaaacaaggctcatttggggcagttaggaagacaatgagttcaattttaactgcattgtgaatgagccgtaaagtttcactctagacctgtttaagaaggatgggaatggcatcactggaaaattctgaggatccactgggtgacagatgcttggagtacaaaaggtgtatacaaaatgtaggtggagtaagagggcattgagatcaatttggcacattttacattttctcaagtggctgatccagtaggatggtattatatttaaatcaactcagttgaggaatacaagtactctgtgaaagtgttctaataagaatgctcagcatttaggtaggaaataatttcaacacttagcagtattcagtgctcacttcatgatcaagacacaggctctttgtttatgagtaaaatcagatgccctccatagtctggccctgacccttccttgatctttatcctttgacaagtcccttgacttcttcagtgtgacaataacaataataaattgtggccatacagcctatctctgtgggtattgaaaggcttgaataaatagtgtgtaaatacttagagtattgcagaactaatgcctggagtatagaactgaaaaatgcctcatatagtgcagaactgaaaagtgtaagttttttaagggtttatgttctttccccacaaaatatctcttctgcttgaagtactaaataacataaacctatgtcctttttttaaaaaaaaaaaaacgtttgcctaattcattcagcaactacttccttggcatctaccctgtgtatcctgtgtactgaatgatgttgcatgttatcaaggagccccaaacaatgtgaaacatattctctgtctgggaactacttcctatatagttagtaatatatgtcttgcaaagataaaacaaacaaacaaaagaataaaaggccatttatggaggttaaagaaaagtatggtgaaagaaatagtggatcacttctgtgacaagactgggttgctaccgtttagactgatcattgaacacatttctggttgcctacagcacctagcatataggactccttttctatagccactgctcatataaaagagccatgcttgtagttcctgagatctggtttaaattctgtttccattaatattagcatcacaactatgggcatatcccttaaccyctgaaaagaagttctagttctgaagtaaaggttacaattaggttggtgcaaaagtaatggtgaaaccacaattacttttgcaccaacctaatattatttatgacatggcattgctagataatgtgaagtccctattgtagtggctggcctataataaaaacccaataaggggtggttactagttgtaattttaaaaacccagcaatactcattttattacaaataaattttagaaatactacctaattaagtactgtgagttgtccagacttgtgagttggacaatattcttactttgtagtgaggaaaatacagcttgttgacattattttcagacaaagaagcaagaagttcaagagcttagagaaagaacaatgtccacagaatgactttggtaattgtgactcactaatcatacagattcaagagagatatatggatttcattggatatcattttcatatctgctaaacttatatgacactcagataaagtgaaaatcctttgagctcatgggcctttagatctagaataagagctatttctatagaaaaaatacagaattgaatgaaatgtaattctgtggtaggttaatacagactcttggttaatgtgaagatttggtaatgatatgactcaagtataaggatatcatccaaatgtctgcccattttaagttagaagggttttcttagatcctataataaacatgggaaggttcattggattccagataa

SEQ ID NO: 684151 - DNA, 616 bp, Homo sapiens
aaatacaagtagttgaaactctgcaaagtattatcttctaagctgaatatttttcaaaccacagttttcattttttctaatttaaaaaaattattttctcaatattgaaagcataacatttatgagaagcaaaaaagaaaatagaatatttatgttacttccctattattctctctcaatatttttatgtgaagctcagaatagacttttaccctctgtgagatgaatttaaaagtgcctcagaatgcagttgcccttattgtggttgtaatggagaaagtaagttttatatttaaaagttattttatgatttaaagagtgttaacattccacagtatattaagatggaagctatttgtcataccaaaaaaattggtttctagttatcaagagaaagcttcaagagcaacattccctacgcccctttaaaaactaaatgcaagtaatattcctcmaagttttactaacctatgcacacaaatgaactatcattaaatgtgatacttcacatatcgattgcccccatgtacatattagggcacccatagcataaccacaaaatttcctagaattatttattatttagaatttcttagaatattattaagctccagag

SEQ ID NO: 684152 - DNA, 596 bp, Homo sapiens
gttttccattttaaaaagggcatgcattcactttctagttcctcaggcccaacatgaatggctttactgctttctcttacctactttgcccatgcaggaatttatgttcgtttcttctagaatttattatttaaggtcatgaccaaccattatataaattccatgaaaagaaaatgctcagagtacttgggaacatgtttagttaggcataataaaaacaacttatatggagaaaaataaatgtcacaagcagaaacaccaaggagacagagaaactaacaaacaggtgactagtcctcaaatagaggcttaagcccacaaaacgtgtcctattaaaccttatgcaagaatatgttggactctagaccagaagcgcaatgtcacttgttagaaatatgaattggaatttagtgaattattccagttcaagctctttcttgggaaaggaaaaggacaaaatgttctgtacaaccaaagtaagaataaagtatattctgaaaatcaggagattaaaattcccaaaagggagcttcttggcagaaaatggtcaaagttatttaaagagtgactttgaattcacycattgaataaaacaa

SEQ ID NO: 684153 - DNA, 2839 bp, Homo sapiens
aatgaatttaaaaaataaaacctccctcctctctatatacatactgcagataagctcaaatcctccctcatagagaatcaagaagagggaggagtgaggaggggtgaacaggcaattgtgacctggcttcttccttatatggccacagacccaatgtatgggcacaaccaatgtttccaaggtgatgagtctagagaattctagaaaaaatgtccaacgaccgcctacacttatcatacttctacatgaacagaagcaattctcttaccaatattccttgatttatccaacaaacattattttggaaggaaggagtgtcatatttattgattatactatgttctaactcttctacctatgttacattttctgattgttacaacaaaattaagaagtaggtattatagtagacttgtcatttgaagacttaaccttggggattttagctatttttcagtaaccccaaaagtgtataacgtgtaatttttcaaaagcattcatttggccaggagtggtggctcacgcctgtaatctcagcactttgggaggccaaggcgggcagatcacgaggtcaggagatcaagaccatcctgactaacatggtgaaaccctgtctctactaaaagtacaaaaaattagccgggcgtggtggtgggcccctgtagttcaagctacttgggaggctgaggcaggagaatggtgtgaacccgggaggcagagcttgcagtgagccaagatcgtgccactgcactccagtctggacaacagtgcaaaactccgtctcaaaaaaaaaaaaaaaagcattcatttgatgcttgctgatgccaagttgaaagctgaagtagttgagcaagtcattaatcagggagtaagatggaattattctgagcacccctatttcagcttgagtttgtattctcacctctctattgtagctctccagaaatattcgggtagtattcttgcatttgagtattcccatgcctcaagattgttccttaaatatttcaagggtctattataatccatacgtaaaataatgtgacaatgttcactcaagaaaaatgtcaaactagtatttaagatcatttttttctggcctccaaaattcacgttcttcctttgctaaccactaagcttcccttaatgctggggataaaactgcagcaataatcactgtttcccataaatctacagtcccataaggaagggggtacctctcacagcagcacactrtgcttcaggcaggccgaagataactccagagtcaaccaggcaacaatgaagctttgttacaaaattaactccctcctaacgaccaaaaggataagaagagcaaatgcaaatcactcaattaaatcagtcaaacaaccagtttaataacaggtagagatttgtggcctgaggagaacatgaattaattatgaaaaattgacaaagaaaccaaaattaagaagcaatggcctaagttctgccaaactcagagatagtctatgactcagacagactggttcaccagcttcttggtaagttggaggagtttcataaaacttcattgttctagttcataataaggtggagcgtgaagtgttccagttgttttcagcaacaagtaaatcagtgcctttgggcatgggtgatacttggtcaatgactgaatctgttcctgcctccaaaatatctcagcttggtttcttcaaaccaattaactctgttttagtaagaggaggtttgctcataccttctttaatgagattaataatatcagtccttccataaaatcactaatgtataaaacaaccccaaatctccatcctcgattgactccagcagatatttatgagtttttcctgctgggtgtcacatatgctgtttgatatggatgtggacttcagttctgttcttttttccaagaaaaaatttcaaaacaacttttaaaaaaaatgacgtgggccctgtgctgcttagttagctgagatgcccttagataagaattgtaaccatttagaaggcacgtaggctagttaatcaatgaaattatcagtgtcttctcttaaagaaaatagtacacagaaaaggtaaaatctaactcaaattgcatataataattgctgaagacatttatatgacacttcagagctacagaataccttcacatccacgatttccctgaatccttagaagattgttgggagatagatgttattttctttttaacaggttgagtatcttgcctgaggtgacacaggtgctgcatgaccgcagccaactccacttatatgtaatttctttactgagagcaaacctgacctctgctaagtgaggtgctggggttacaaccatgaataagacaatgtctttcttcacattgtgtttgcagtgtgcatacacgcattgtcagtaaaatgtctaatacttgttggaatcagatagaaagcagtgtttttttgccaacagacaagaaaactccagtcagacatgattctggttcagcttgacctgacccgcttcagctttgtcctgggaagatcataaatcatgatgaaaacattgcccagtccttgttcccattacctctttgccagatccacacaagttgccaagggactgatttatcagattgttgttatgaggacggctaatgccacattcatcgtgccaggtagtatctgtacccaagatcctccctaggaaaaagcagcaagagttgaagttccgagaactaagaggaaactatgacctaaaagaggtcacctatgaccacgggtcagctaggtgtgaatgaaaaattattctgctgatttatgaagtggaaaatatgacaggaactagtgtttat

SEQ ID NO: 684154 - DNA, 617 bp, Homo sapiens
atcactcattttattctggggttagcacttttggaccatagttacagatatgaactgtggatagaaacggtctctaacttgtaactattattatttagtaacrtaaaatacaaaatacatggaagaggggagtaggtaacatattggggtacccagtatgttacctacccaaagggttaaaaggaaccccctaactgaaattatttaaaagctgaaagacctaaactccctatccaaactgttaatatattcataaccatattttaagggatggtgttggttttgtggtgttgatgattctattactgcttttaacaattcaaagacatactggtattaaatgaagttacagctttacccattgttagactaaccagagataagcacttggcattatttccatccttaggtcttcaagtagttatctcatcattagtttgtttccctgtgtttagaagggtgtgattttcacacactcctccagccaatgaaaacaccagtttttaataagcacgtgaaaactgtgactcttattttataaacgttgacactgacaggttgattcatgtctgagtatttgtttgatctttggaagttaaacttggaatttctacaat

SEQ ID NO: 684155 - DNA, 617 bp, Homo sapiens
atcactcattttattctggggttagcacttttggaccatagttacagatatgaactgtggatagaaacggtctctaacttgtaactattattatttagtaacgtaaaatacaaaatacatggaagaggggagtaggtaacatattggggtacccagtatgttacctacccaaagggttaaaaggaaycccctaactgaaattatttaaaagctgaaagacctaaactccctatccaaactgttaatatattcataaccatattttaagggatggtgttggttttgtggtgttgatgattctattactgcttttaacaattcaaagacatactggtattaaatgaagttacagctttacccattgttagactaaccagagataagcacttggcattatttccatccttaggtcttcaagtagttatctcatcattagtttgtttccctgtgtttagaagggtgtgattttcacacactcctccagccaatgaaaacaccagtttttaataagcacgtgaaaactgtgactcttattttataaacgttgacactgacaggttgattcatgtctgagtatttgtttgatctttggaagttaaacttggaatttctacaat

SEQ ID NO: 684156 - DNA, 614 bp, Homo sapiens
cagtcatcagacaaaaagaagtctaatctacaaacttcttagttctgtttttctgtgattattcatactacaaaaacaaaactttgaaatcagagacataataaatcctattatagtataagtactagtattttttaagtttcaaatgacctaataaatggttatggttaaagtgtaaggaaactttaaaccattgttatattactgctagagttctaaagcccaaacaataaagctgtcttgcctggaaattaatatcttcaataaactaatgaactgttttgtatcacaagataaaaacagtttcatttcaagactgaattcagagataattcatcagtactctattaattattacttaaattttgctttgtaagaagtctttatgtttccttccagggctataaaatccatttgtgtggcaaactatataataaatacatattkgctagagaagacctttgaaggattttttttatcactttcacatcttcttttaaagccaaaaacattacctttttagtgttgtcctatgggaatattttctaaactacagtttttttgttaaggttattgcaatatcaagactctactagatggcagtataattaata

SEQ ID NO: 684157 - DNA, 667 bp, Homo sapiens
ttctcactctgtctctgtgtctctttcttgctgattggctgatccttaaaatgcaatggtgtgtcacgtcaacaatatgaaagtaggtgaactcggtgtaccaagatataagttggggattcaggaggacatatatttgtattactttgataggaaaacatatttccaaaaatyattaccagcatcacatatgtatgcattttaggctttcataaatcactttagtgtctggattctcataactccctctccattaaatttctatgtaaattagattgaaatttgattaatcttttaataaaaaattgttgttttgttttaacctatacagaaaacctgacctcaataatatgtaaatagaaaagagaatcatattttatcccttttttttcagaaaattgtggatattcttctgatttaacactgtaccgaaactcaacaagtgacagtttaacaaggttagttgaaatgtggaatcttaaaccatatcagtaattgttttgtacaatctgttggtctatcttgcattttgaatgaatctttacaatattttgaattattacggatacaagttatccaaatgtctaatggttgctggagaactcaaactcgatcatagacagcaaatattcttggttcctttccttgaagtggcacccttgcttca

SEQ ID NO: 684158 - DNA, 1615 bp, Homo sapiens
cggagtggcaaggtttaagaagaacatatgggattggagatattttggggccatctttcaaaatacaatctgctgcagatcccaaatcacaaaagagggagacaactatatgtagctaccagtaggagggctactctagaggatgcttgagaattattgctttcatcaatctgagacaaaattcacacacatgagctagaatatcatttccaaatgataggttggtaggatttgggggaattttatggagtagagaaaaccaaacttagatgataattaacaataaatattgtctgtatctttatggcttaggaaagtttcatgtctgtaaccaggaactcactactttttatttttgttttgaacatttcttctcaattcattccttgcatgagattttgtccccattttgaccatcatacttgtttgcattctcctgcttttgtctttaatgctttaatttggggatatatatccatatgtctatggatacatgtatatggatatgtatgatttggggatatatatccatatgtatatacatatgtatgtgtatagagatagacagatgatagatagatagatagatagatagtagattcttctctacttgcaatggggtgatgtcctgataaacccaccaaaagctgaaaacattatcaactgaaaaattatggttatttagccttgtgcccatgggctaaagaaaaactgtggctcatccagaatcataagagcttatcctaacctggaaaagatcaaaattcgaaattcaaagtacagtttctactgaatgtgtattgcttgcaccatcgtgaaaacaataaatcayatggcaaaccctcataagttggagacgttctgtgtgtacacgtgcgtgtgtgtagtttgttcgtttgcttttttttttttttctgttttcctgataactttagtttctatggacagcatatttagttctcacctgctcatgctgcctcaggttttctgatgatagggtgaagaagaaaatgcctctgtggcctaagttctgacccctctattaagtccaaaagcccaaaaccgtatttctggacttccaaaagtccagaaataaagatacaaagaagaaattctgagcgggcaaaatgggtactgcattgttgaataaataaagggaaagttctaagcagagtttaaattaactaacaatttttttgagacaagaccacattttggaaattttagaaaattgttttaagaaagaacatgttatggtatttattttgtattgaaaatagaataacagaaaagcttagaggcagaggttagaatctatagaaaattctttagggccgggcgcggtggctcacgtctgtaatcccagcactttgggaggccgaggcgggcggatcacgaggtcaggaaatcgagaccatcctggctaacacggtgaaatcccgtctctgctaaaaatgaaaaaaaattagccaggcgtggtggcgggcacctgtagtcccagctactcgggaggctgaggcaggagaatggcatgaacccccgggggacggagcctgcagtaagccgaaatcgcgccactgcactccagcctgggcgacagcaagactccgtctca

SEQ ID NO: 684159 - DNA, 1615 bp, Homo sapiens
cggagtggcaaggtttaagaagaacatatgggattggagatattttggggccatctttcaaaatacaatctgctgcagatcccaaatcacaaaagagggagacaactatatgtagctaccagtaggagggctactctagaggatgcttgagaattattgctttcatcaatctgagacaaaattcacacacatgagctagaatatcatttccaaatgataggttggtaggatttgggggaattttatggagtagagaaaaccaaacttagatgataattaacaataaatattgtctgtatctttatggcttaggaaagtttcatgtctgtaaccaggaactcactactttttatttttgttttgaacatttcttctcaattcattccttgcatgagattttgtccccattttgaccatcatacttgtttgcattctcctgcttttgtctttaatgctttaatttggggatatatatccatatgtctatggatacatgtatatggatatgtatgatttggggatatatatccatatgtatatacatatgtatgtgtatagagatagacagatgatagatagatagatagatagatagtagattcttctctacttgcaatggggtgatgtcctgataaacccaccaaaagctgaaaacattatcaactgaaaaattatggttatttagccttgtgcccatgggctaaagaaaaactgtggctcatccagaatcataagagcttatcctaacctggaaaagatcaaaattcgaaattcaaagtacagtttctactgaatgtgtattgcttgcaccatcgtgaaaacaataaatcacatggcaaaccctcataagttggagacgttctgtgtgtacacgtgcgtgtgtgtagtttgttcgtttgcttttttttttttttctgttttcctgataactttagtttctatggacagcatatttagttctcacctgctcatgctgcctcaggttttctgatgatagggtgaagaagaaaatgcctctgtggcctaagttctgacccctctattaagtccaaaagyccaaaaccgtatttctggacttccaaaagtccagaaataaagatacaaagaagaaattctgagcgggcaaaatgggtactgcattgttgaataaataaagggaaagttctaagcagagtttaaattaactaacaatttttttgagacaagaccacattttggaaattttagaaaattgttttaagaaagaacatgttatggtatttattttgtattgaaaatagaataacagaaaagcttagaggcagaggttagaatctatagaaaattctttagggccgggcgcggtggctcacgtctgtaatcccagcactttgggaggccgaggcgggcggatcacgaggtcaggaaatcgagaccatcctggctaacacggtgaaatcccgtctctgctaaaaatgaaaaaaaattagccaggcgtggtggcgggcacctgtagtcccagctactcgggaggctgaggcaggagaatggcatgaacccccgggggacggagcctgcagtaagccgaaatcgcgccactgcactccagcctgggcgacagcaagactccgtctca

SEQ ID NO: 684160 - DNA, 1615 bp, Homo sapiens
cggagtggcaaggtttaagaagaacatatgggattggagatattttggggccatctttcaaaatacaatctgctgcagatcccaaatcacaaaagagggagacaactatatgtagctaccagtaggagggctactctagaggatgcttgagaattattgctttcatcaatctgagacaaaattcacacacatgagctagaatatcatttccaaatgataggttggtaggatttgggggaattttatggagtagagaaaaccaaacttagatgataattaacaataaatattgtctgtatctttatggcttaggaaagtttcatgtctgtaaccaggaactcactactttttatttttgttttgaacatttcttctcaattcattccttgcatgagattttgtccccattttgaccatcatacttgtttgcattctcctgcttttgtctttaatgctttaatttggggatatatatccatatgtctatggatacatgtatatggatatgtatgatttggggatatatatccatatgtatatacatatgtatgtgtatagagatagacagatgatagatagatagatagatagatagtagattcttctctacttgcaatggggtgatgtcctgataaacccaccaaaagctgaaaacattatcaactgaaaaattatggttatttagccttgtgcccatgggctaaagaaaaactgtggctcatccagaatcataagagcttatcctaacctggaaaagatcaaaattcgaaattcaaagtacagtttctactgaatgtgtattgcttgcaccatcgtgaaaacaataaatcacatggcaaaccctcataagttggagacgttctgtgtgtacacgtgcgtgtgtgtagtttgttcgtttgcttttttttttttttctgttttcctgataactttagtttctatggacagcatatttagttctcacctgctcatgctgcctcaggttttctgatgatagggtgaagaagaaaatgcctctgtggcctaagttctgacccctctattaagtccaaaagcccaaaacygtatttctggacttccaaaagtccagaaataaagatacaaagaagaaattctgagcgggcaaaatgggtactgcattgttgaataaataaagggaaagttctaagcagagtttaaattaactaacaatttttttgagacaagaccacattttggaaattttagaaaattgttttaagaaagaacatgttatggtatttattttgtattgaaaatagaataacagaaaagcttagaggcagaggttagaatctatagaaaattctttagggccgggcgcggtggctcacgtctgtaatcccagcactttgggaggccgaggcgggcggatcacgaggtcaggaaatcgagaccatcctggctaacacggtgaaatcccgtctctgctaaaaatgaaaaaaaattagccaggcgtggtggcgggcacctgtagtcccagctactcgggaggctgaggcaggagaatggcatgaacccccgggggacggagcctgcagtaagccgaaatcgcgccactgcactccagcctgggcgacagcaagactccgtctca

SEQ ID NO: 684161 - DNA, 703 bp, Homo sapiens
aaatggggatgagggtgcaggtagctacctttttcacaaccgctgacatttgaccaaatgcagtgtgtatttcactaagactcaacttttggttcactcagaccaggcccaaccaatcaaacttgcctccctgagacttgcatcatagtctgtgatcctaagaaacaggcagattggaagcaatarctttgaaagcccagatgcaagagcttatggttttcagtggcaacatccagtctccagggttgaagctacaatattgtttgttcatcagcagtgatggcagagtcttcccttgctggctctgtagtatttactggctgtggttctatattcctgcctcatatctaaacctggttacctagcattctctacaattctatgaactactcaataccctttcaacaatttgtttttagtttaaacaaactgcagtcagtttttttattgcttcctatttctgttatttcttcctattaagaccctagctgatgaaaacactacgtgtaggtgtgcctttgcgtgtgtgcatgtgtgtgcatgtgtgtgtgtaggtatacaactgtattagtgtgttttcacattgctgataaagacatactcaagactggggagaaaaagaagttcaattgaacttacagttctacatggctggggaattctcagaatcatggcaacagcaagagaaagaagaggaagatgc

SEQ ID NO: 684162 - DNA, 2810 bp, Homo sapiens
tggttaatgkgatatggtaatacgcagagtcagtgattacctggccttatatttcctctgggttttttgctgttgatactatcacctgcatctttttattgcaagtatttggggcatggagccagtttccctttcagtacataaagctgatctgagcatccagaaaccgtaacaatcagcactttttagaaaatgaaaccatttgcaaggtcctgaatgatagatggcaatggggaaatgcattttattgtgctttcaaagtaaaatttcagcagtaactttgcttataaatatggtgactatacttacctgtttgcctaggaaggttctgggtaataccagatgccttgctgtaattattgagagaattcactttgagcctcaaattttccctgtgtgattgtaaattgtatggtcaccacacttatttttagcaccttttttggaattcaataagcagacagattctagcagcctgggaggaattacatgtaaatatttacagccctccagaagcagcgtggcagaaaagatgtagcatacacaaaaaggctcaatcaagagaatgatgggtcaaggatagtagggtagttgatagaagaataagcaaagaaagcagaaacaggagattttatatactggaaagagtaaaaaagtaccatggtacaagaaggaataacagtgttaaaaaaaaaaaaacggaatgtcagcaaaatttgggtgtagcaattacataagctactgtttattgaacatctactatgtgccagaaactaggcttaatgatttatgtacaaaaatacattaaaactcctcaaaaacccaggaaagactttctgtccacggtttatacataaaaatggaaacagagttaagtaagctgctaaatgagttagattgtgagaccagttttgaagccagatccgcttggctttcaaaattctgtactcttaaatattatattctatgacttttttccaagctctaagattgacgacttctgattccaagaccttatgctttatgttgcatgaagactggcaaaatctctcaggatttgtaagaatcccagagagagagagagagagaaatggcaggtaactactttttccaaggcataaaagcgacagggacaagactagaactgggcacaagtggttttaatttaataataataaaacttctacataatgataaaagatactcattcctcagcaacaaatgataaaaagaaaggaatatacatatatatattttttatatatattaaataaatatatttaatcatgacttcagaattttgttgacattttcatacaacaggcaatggtatggagaatttctatttactcataaattttatatttgttttttaatattggttttatatttattttatacattgttttaaaaattatgtttatgattaatatttttcaatagagtaaaaacataaattctctcatggtcatttattccttcatcactgtaaatggtgaaatgtcaatcagtgaaaattgtctttgaagttgtctcatattcccaggactcatttggtatctgccttcactcagtttctagttaatttagtgaacttcccttgctctgttaaatccatagctgccttcttagtaatatgaaaatcacctgccaccagtatctctactttaaaattccctctaaataaaactcagaattttgtcatgaagaaaagattgtggaataaaaatatacagctctagaacagttttgaggatgaaggatgctctcactgaagaaaatcacacctctacttaacaagcaggaatacttattaacctcctaccatctttggagcatgtagaaatgatcatagcatctactgcagtgtgttggttaatattgagtgtcaacttgattggattgaaggatgcaaagtattgttcctccgtgtgtctgtgagggtgttggcaaaggaaattaacatttgagtcagtggactaagagaggtagacccaccctcaatctagataggcaccatctaatcagctgctagcatggctgggataaaagcaggcagaggaacatggaaggactagactggctaggtctggcctccatctttctcccatgctggatgctttctgcccttcaacattagactccaagttcttcagcttttggactcttggacctacaccagtggtttgccaggggttcccaggctcccagccacagactgaagtctgcattgtcatcttctcttcttttgaggttttaggacttggcctggcatcgttgctcctcagcttacaggcgacctattgtgggacttcacctggtgattgtgtgagtcaatgcagcttaataaactccctttcatatatccattaatcctattagtcctgtccctctagagaaccctgattaatacatgcagaaacatttcctttcctctaaaagtttagaaatcacattatctaaaattatcagccattaaggcgtactgctgactattttggtgcagtctttagtcttcttatatgtgaccaaaccattcctattttttttcttttgtttgtttctacaaatgattactgaacaaaccttgtcaagtctatctcattcaacaccatcaccatgcttgccagaagcactgcaacaacccctccattggtcttcctgcttttatattctcttctttgaagtcagcaaactttctataaaagaccagatactaaacatttttggttttgcagcccatccattccctatcacagctactcaaatctgctgtaatagcaagaaagcagccttccatcatggaaatt

SEQ ID NO: 684163 - DNA, 584 bp, Homo sapiens
actacagtggtttcagagcatctttaaacaatttgcgatttatgcaaatttttgtgtatagtatatttttggtcagaaattacatggcttccaytatattctcaaagttatctcagaaccttcacaatgagccactatttcaatgttctggaagttctagttattccatactattcttaaatatggtgtttgaattactaatataacatgacaaatcctgttataatttctgtccctcagaagtgatcataatgtagtttctctcttgtaagatatatttataagtaaactagattatatgtttgacttgaatatggaaatgaataggaagtatgaaggacagccaattttgtatcaattatattgtttcttggttcacaggatagatgatgaaacacgccgaataacaaatgcttcaaattactacactatctcttttttacttgacatatgtcatatggctgcccagagtgccactttactttccaaaagaatactacaacacaaaaataattgcatcagtaattgggaatatacattacatctactttgctttttgaaagtcaaaacatggttaaattaca

SEQ ID NO: 684164 - DNA, 670 bp, Homo sapiens
ttttgaattatactggatttgttttgataatattttgctaatattttttgtatatctacataaaggattttgattcatagttttccttgcatgtaaaatatttgtctggttttgttatcagcacaatgcagacctgctagaatgagttgagaaggatatttacttattaacagtaaattacttatttctttaagttttaaagattttgtagtatgtgttatttattcttaaatgtgtcacagaatccatttggcctagaattttctttgggggaaggtctctgtttaagattcaatttcgtagtctttctttagtaaattctcattatttgtgcttccaagaaatttgtatttttcatcttaattttcaccttatttttgtaattatatatagcagaaaatcaacttaagtaactcaaaacagatgttatgttttaattaattttttctgtccataagtgtggatgacctctattgacatttactaatttttttaaaaaatgtttctgttgtgttttatcctccactaatcctgttgcatgaaattttattatatttttaagtaagttatttctcagatatcatttgcttctttttatatttataaatgtcttctaatggttcttagcttttcatatatcaattctgttttatagacctttwttagagtt

SEQ ID NO: 684165 - DNA, 1929 bp, Homo sapiens
tttcttaggcaggttgctatttctctgttccagtagttttcaaccctagctatatatcagaattatcagtacattaggaaatgcaattttaaccatggcctccgtggtaatatggagtccttgaagttaaattgatttcacttcccaatccactaaccaccacataatgtgcaagggtactttagggagagggctatttggggaccatgcaacatttgttccattctttccccttgacttttatgacaggtgctcatttttttaaaaaaaagagtaagggagtgaagaacactaatactctttgagaaataattggaagtaaactagaagatgtgccaagtaccctccaaagaacaaggaggtaaggaatccacaggaagaaaaaaaggcttaagaaggcatgcaagcaacaatcatacctgcagtggtatttttttcactgagggaggctgaaaggcagaaattttattccactgttaccaattctagaagttactacttctgtaactgccacactgcctcacttaggacctgcttggagtgcccataaatagggagcaaatgaattaataactcttagcaacttctaaaagaaaacccttattgagctgatttgctccacaaaattgaagacattaggaggcaggatgggatttttttcctttctcctttcctttctaaagagttgagaaattcattgtattgtgagtatctctgtattgttgacaagaagcaaatttagtaggaacacaaggcaaagagttacatgcccagaggagcttcttcctagagctaagcagagaaaagattattatcctgtacaagctcttccttataagagaaaatttattttctgtagattagatacatcatcataaattctcttgatagaagctgttgggtaaagaataatgagggtcagctgggcacaatggctcacacctgtaatcccagcactttgggaggccaaggcaggtagattatttgaggtcaggagtttgagaccagcctggccaacatggtgaaaccccctctctactaaaaatacaaaacttagttgggtgtagtgatgtgcacctgtaatcccagctactcaggaggctgaggcaggagaatcacttgaacctgggaggcagaggctgcagtgagccaagatcgtaccattgcactccagcctaggtgacagagggagactccatctcaaaataaataaataaataaataaataaataaataaagaataatgagagtcatcctaacctaggggcaaatttaacatgggccttattcacagaatgaagaacaagccaaggagttagatgaatagactagtcaggggagttaccaggraaaatgtcactggaagtgttgcaaatagaatactaggacctgtgttatgagatctcatctatcccatggtttctaggcaggtgtatatgctgataattcccaaacctgtatttccaacctcatctctctcctaaactccagacctataaatccaactgcctttttatggaagagttcttgaatatttcaaagatctttcacattcaatgtatatccaacagacttaattatctttcccttcactaattctagttgttatacagtgaatgagaccaccatccacccaatagccacatctagaaaactggatgtcatggctgggcgtggtggctcatgcctgtaatcccagcactttgggaggccagggtggttggatcacctgaggtcaggagctcaagaccagtctggccaacgtgttgaaaccccgtctccactaaaaatacaaaaaaattagccaggcttggtggtgggcgcctgtaatcccagctacttgggaggctgaagcaggagaattgcttgaacccgggaggcggaggttgcagtgagccaagatcgcgctattgcactccagcctgggca

SEQ ID NO: 684166 - DNA, 1929 bp, Homo sapiens
tttcttaggcaggttgctatttctctgttccagtagttttcaaccctagctatatatcagaattatcagtacattaggaaatgcaattttaaccatggcctccgtggtaatatggagtccttgaagttaaattgatttcacttcccaatccactaaccaccacataatgtgcaagggtactttagggagagggctatttggggaccatgcaacatttgttccattctttccccttgacttttatgacaggtgctcatttttttaaaaaaaagagtaagggagtgaagaacactaatactctttgagaaataattggaagtaaactagaagatgtgccaagtaccctccaaagaacaaggaggtaaggaatccacaggaagaaaaaaaggcttaagaaggcatgcaagcaacaatcatacctgcagtggtatttttttcactgagggaggctgaaaggcagaaattttattccactgttaccaattctagaagttactacttctgtaactgccacactgcctcacttaggacctgcttggagtgcccataaatagggagcaaatgaattaataactcttagcaacttctaaaagaaaacccttattgagctgatttgctccacaaaattgaagacattaggaggcaggatgggatttttttcctttctcctttcctttctaaagagttgagaaattcattgtattgtgagtatctctgtattgttgacaagaagcaaatttagtaggaacacaaggcaaagagttacatgcccagaggagcttcttcctagagctaagcagagaaaagattattatcctgtacaagctcttccttataagagaaaatttattttctgtagattagatacatcatcataaattctcttgatagaagctgttgggtaaagaataatgagggtcagctgggcacaatggctcacacctgtaatcccagcactttgggaggccaaggcaggtagattatttgaggtcaggagtttgagaccagcctggccaacatggtgaaaccccctctctactaaaaatacaaaacttagttgggtgtagtgatgtgcacctgtaatcccagctactcaggaggctgaggcaggagaatcacttgaacctgggaggcagaggctgcagtgagccaagatcgtaccattgcactccagcctaggtgacagagggagactccatctcaaaataaataaataaataaataaataaataaataaagaataatgagagtcatcctaacctaggggcaaatttaacatgggccttattcacagaatgaagaacaagccaaggagttagatgaatagactagtcaggggagttaccaggaaaaatgtcactggaagtgttgcaaatagaatactaggacctgtgttatgagatctcatctatcccatggtttctaggcaggtgtatatgctgataattcccaaacctgtatttccaacctcatctctctcctaaactccagacctataaatccaactgcctttttatggaagagttcttgaatatttcaaagatctttcacattcaatgtatatccaacagacttaattatctttcccttcactaattctagttgttatacagtgaatgagaccaccatccacccaatagccacatctagaaaactggatgtcatggctgggcgtggtggctcatgcctgtaatcccagcactttgggasgccagggtggttggatcacctgaggtcaggagctcaagaccagtctggccaacgtgttgaaaccccgtctccactaaaaatacaaaaaaattagccaggcttggtggtgggcgcctgtaatcccagctacttgggaggctgaagcaggagaattgcttgaacccgggaggcggaggttgcagtgagccaagatcgcgctattgcactccagcctgggca

SEQ ID NO: 684167 - DNA, 615 bp, Homo sapiens
tgcgagtatcaacttgtggcatgtgaatgccacaacttaatatgtatttaagaaaatatgtttaatagaaaataggtttaaaatgaaaatatgtatgtttccatatatagagagagatggaagaatatatattttcttttttaaactaatgccatagttyaattatttaagccagacagctaaaactgcttctttttgtccaagtatatggctcacccctgtaacccagtactctttggaaggctgaggcaggaggatggcttgagtccaggaattcaacaccagcctgggcaacatagtgacaccctgtcactacacacctttttctgttcatacttctatttaacaagtgatgctggaccatgatgttcccagcattttattttttaatttcatcctaagatctgctcttatcccccattaagaaggattggtagaatgttctctttcctaatgacagaagtatgaaataacttgttcatcaggagagtttattattgatattgttaatatttaaatacacattccataaattggaatattttgttgtacagtctgagatttaacacatgtatagaattatattaacacaccttctctcagtatatagaacaa

SEQ ID NO: 684168 - DNA, 962 bp, Homo sapiens
tgttaagcttttgggttggagttacaaaaatttaagagcctgacatattttagcactgatgaagtattatccaacttttatgcttataaatactattaaaaagcaaagctaagcttttttttctttctgaaaaagcgattttgagtatgttgaaataatatgagggatgttgcttggaatagtgtgagggcaagaagaatcctctattggaatataacattagggagaaaaaatctgataaggctactgaaggttgcttcattttaagcacattgcatttttatgtccttactggatgagtttgtaaaggaaaattatatattttcctctaaatagactagcatggcatttagttttttcaaaaatatctaatatctttgtcaccatatgctgacaaagacacgactattttaactaaacttctctatttcacgtatttgtgttgttttcatctgagttagacaggaataaaaaccaaactttgggagattcatttttggaatgcctgtgtgcagggctttggtgaaccagcttctcaataaaacaaccataactggtgaaaataatgggtaaaaaacataaagtatctggaaattgtcctaaaggcatacagcaaataaagaaacatttactcaagaaaatcygcaaaatctcgtaagacaataagagcatgtagtacctgtgtcataatctgttcttttccttccccagctcagcataatagaagctttactgtaggagcccatggccaagaagatggggcatgctctccccaaggtcccaagcaagggctatagcactgtattactttcctagggtgactgtaacaaataccacaaacttagtggcttcaaaaaaatataaatttatcactataaatacagttctggatgccagagttcaaaactgagggatgggcaaagctgcacttcctctaaaagctccaaggataaatctattcc

SEQ ID NO: 684169 - DNA, 638 bp, Homo sapiens
aaaagcagaaacacaaaatgataacactttactgtaacagaactaaaaaaaaatgcccatcgagacatttttcagsctctatatgacttaccaaaacattagtgtatttagttttctttgtaacatctaactcttttaaagcttatttttaaagtcagaaatgtttgcttcaggaataatttctctccttactctgttttcaggcattatatgtattagtctctcaaaaccttgaaaagagaggtattctgaagaaatatgtcttttctaatatattcatatataattcattttctctcttttatatatccaaatttttattggtataggtttctttaatagggagactatacatatttccaaaaagccttaagaaattaataaaattaaggagaaattactaacaaaatttcaattttcttttaattttttgaaacaatattctacgttaaacctacataaaagtgaatcatagagaattggcataattcatatttttattttgaaatcttttattgaaaaatagaaattgtatatattcaaggcatataatgtgaagatttgatatacatagacgttgtgaaatgattgccacaaccacattagttaacacatcaacttatgctgtacattagctt

SEQ ID NO: 684170 - DNA, 623 bp, Homo sapiens
ctttgacaataccccaaacattgtgtaggaaaagaatgttttggatacttggtacttaggtttgctaagttttgggtaacttctgtttcctaataaagcatgaactaatcaatttggatgcactgggataatgactttatcgctattaaaatgaaccctattccaggttcagagatcatagaccacagaggtgtcaaagcacagtcctatctatccagctaacaacttgcccccatactctcttcccagtgtatgtttctagtttactcaactatttttgttgtgcagcctttttcctggcagctctataatttttgtaaatgagtttctgatgccttgaaagaccatatttccctgctactggctgttgaattcgttttagtcaacaggsaactattattcactggtggtctcttcatctgttttctaaatgttctctcttctttcaacagtaaggtctcagtctcctgacatacaataggcattcaatgtacatatttgttgaataaattaattacctaaagtgaatattttatgtaaatgcctttcacgtgggcccctatggctatcaaccttcacggcttcattaacttccgaaagctgaagactctctgcagactcga

SEQ ID NO: 684171 - DNA, 562 bp, Homo sapiens
tagcagagagagcaaatgagcctgaacagctgggatatataattcaatcactctgactccctagaaggtacctctcagagatcatctgagtccagtcttccagttgacaccactcagcacacattagcccagtatccagcatcactgtagggaacacatctggctagcagtctgggagagctgctattccacctgggccaaatctgatcacactagccctttgttaaaaacctcccacagctctccactggcctctacaaggccccctggcacccatgtgcctactttcctgtgcagtctaattgtccccatcacycccaccttgtctccacaaccatccacagccaaggctttgctcctccaaggatacaaggtttgttgctccccagttaccctatggatttcacttcgatgcctttgcctgggctgctctctctgcctagaatgcctttcctctctggtctactgattaaaatcctttgcatactccaagacttccagatcagatattaccttctttgtataaaacctcccctgggccaggcaaggtggctcacacctg

SEQ ID NO: 684172 - DNA, 410 bp, Homo sapiens
tgtaacatatttttagattccagggactgtccatatttatctttgggggcctttattctggccaccacagatgcactcactctttggatgctagtggtcaagtctggtacaagctttttaatgtgttcagcatgatttagccactttctatatccgtgcagagacatgggtgatggcattaaatccttaacggcataaataaagggatagtacaaacagtgtcatttatcttgtggttaaaagtcagaataaggttcaacttctggtatggctatatactgggatggacatggcrcccatcttgaatatgtggatcttgggaaaatgactctcatattttctttgataaaatgggactaataaaactcaatgggagataatcaaaaggataatgatgtactcatttacta

SEQ ID NO: 684173 - DNA, 1517 bp, Homo sapiens
ttgaacagttttaagatacactgaactctgcagaatgcatctaccaaataaaataaatcaaaggcttattgattcttgcatgattcataactttatcatgatttctgacataacaacaacagtgctactcccagtactggagtcgttaatacaacccaactccatccgggtgcatttgtagctgctgagttctatttatcccctaaaactgttccaaaatctcctctggtgtggtcatgcttgagcatttgtacactggaaaacatctttcatttatttctcttttatattacagttagagcattatgttaacttacaatataatgtgtgtaggtagttgtgttacctttgaatttcacctcaagggagtgtaaggggttgttaacatagttgttataaaatgagcattgggtgtgatggagttgagaactgctgtaataagtattaagacttattccacagttctgtttgccaaagaagttttgcaaataaaaaacttaaaactgaacttggctggatttgggggaggctatgagaagctagaaacatagttgccttgacaagaaaactgacaacctgtattctgaattacagataatcctaaaatcaaaacaaagttgaaaaacaaaacaactctctccaaactaaaggccggctaagcactttcaaacttctagtcttgtgatttcacagaataggacaagatgtattaaactgtactattattttactgtaaactgcagaccttttgatgaaggttaaaaaaaaattcaggtgtttacttttttaaatataaaatggttgggggctgggaattaataaaagtagactataattgcaattatgcacttgaatgtactctgtaactaaaaataatgagttttcgtcaagggtaacatttttcagtacaactktgtctcaacattttcctgagaactgaatgtgagctggctgaatatggaggatgatcatttctgtgatcttttcttactgaaaaactgtttagataccacatcgaagtcattacacaaggaaacacaattattttaaataatctgacatggccaaatatcagttaaatctagactcagacactttatgcaatggattattttggtgcgttaaaaagtactttaaaatagaattcaaattatttaagtcctgattacataactgtgggcattcctaatacatgaaaacattctgaaataaccagatcttagcaccaggtttgcaatactacttaaaacaaatatttttaaataaaagtttcaaattaaaatatttcccaatcactaaattaggcatgacatttttaaaagagcatattcatttttgcaccattttctacataagatgtaaaattttttttaagtcaagtttttatctttttctaaagtatagtcaagaacagtggattaagtcttatgaagatttctgttagtcaaatagttttgttatttagaacaaacacatatgtaagaatttaagtatttataaaaatagaaattatgcta

SEQ ID NO: 684174 - DNA, 588 bp, Homo sapiens
gtgtccaatcctatctcataaatttctagataagactgaatatttgtgacccctcccccactgccccccaattcatatgttgaaatcctaacctccagtgtggttgtatttggaaacagagcctctaaggaagcaattaaggttaaatgaaattataagattagtactctggcctgatggaattaatgtccctacaagaagagactccagagaggttgctcttttgtgatatggtcataaattgtttacagtctccatgcttgaggacaaagcagccttctacaaaccaggagaggagtcctcatgagaaaccaaccctgctggaccttgatctgggacttccagccttcagactgtgaaaaataaataaatttctgttgtttaagccacctggtctgtagtattttgttatggcagcctgagctggctaatacaggacmtaaacttaagaactgaagatggctctaatacttatgatgtatgtgttggagtaataatggaacatctaaacagaaacctgtcaattaattcatttgggtaattaaataatattgattgagtcactgattgagtgaaggagacaatgca

SEQ ID NO: 684175 - DNA, 609 bp, Homo sapiens
ccatgggactccagcctgggcaacaagagcaaaactccgtctaaaaaaaaaaaaaaaaaamagagaaataggaagatcttgtcaatcttattttcatgaagacaaagtaaactgtgttttctctttgtgttcattcaaaatttaaaatctctttctttttattatatctggattttaaaaggtcaatattcagtaagaggaggaagatttggccatattttatgaaacccttgagagaaagagagagaacaagaaagaaattttccaagcggttgtacggatgaggtattattgtgtggtgtgcctgcttgcagctggtagtaatcactccccaacatcatatagttatttcccagtatcagatgtgaacacatgtgagcctttcccttcaagggcactttttgttcatgttctcgaatataggttatcactgtgatcctaacccacttttattagagtctgtttttaatcaaatgaaaggactttattggacttttcttgtgggtaaaagaaatgaacccattgaaaaaaatactaataaatttcttcagtaattcatttagttatttttctaaatttttggaaatatggcttcggtaatgtgtctct

SEQ ID NO: 684176 - DNA, 609 bp, Homo sapiens
ccatgggactccagcctgggcaacaagagcaaaactccgtctaaaaaaaaaaaaaaaaaaaagagaaataggaagatcttgtcaatcttattttcatgaagacaaagtaaactgtgttttctctttgtgttcattcaaaatttaaaatctctttctttttattatatctggattttaaaaggtcaatattcagtaagaggaggaagatttggccatattttatgaaacccttgagagaaagagagagaacaagaaagaaattttccaagcggttgtacggatraggtattattgtgtggtgtgcctgcttgcagctggtagtaatcactccccaacatcatatagttatttcccagtatcagatgtgaacacatgtgagcctttcccttcaagggcactttttgttcatgttctcgaatataggttatcactgtgatcctaacccacttttattagagtctgtttttaatcaaatgaaaggactttattggacttttcttgtgggtaaaagaaatgaacccattgaaaaaaatactaataaatttcttcagtaattcatttagttatttttctaaatttttggaaatatggcttcggtaatgtgtctct

SEQ ID NO: 684177 - DNA, 673 bp, Homo sapiens
atttcaatatataatcagcatgaaatatagtagtgacatattttagaaaaaaatttttaggccaggcgcggtggctcatgcctgtaatcccggcactttgggaggccgaggcgggtggatcatgaggtcaggagttcaagactagcctggccaagatggtgaaaccctgtctctaccaaaaatacaaaaattggcgggcatggtggcaggcacctgtaatcccagctacctgggaggctgaggcaggagaatcgcttgaacctgggggacggaggttgcagtgagccgagatcgcgccactgtactccagcctgggcaacagagtgagacatcgtcaccaaaaaaaaaaaaaaaaaawtagcaatgatattgaaatccaaatcagatttttattttatattaagccatatttctagtggcttaatgttctcaatagccacatgtgcctcatggcactctgttggacaaatgtctctccatatcatgaagatggcaggcaatgctgtacaaatcaatttgtaaatatgatatgaatctgcattgcctggatttatagttcagcttccctagtaccaggttaacaatctctgtggccttggggatatgagatattactattattgctataaagattttgtaagttaatattggaaaatattttggacctagaaca

SEQ ID NO: 684178 - DNA, 676 bp, Homo sapiens
atttctttttcctcaacattccagatgtaaatacccttctttgtattcattatgctaaacacaactaacagtcttggaaatatagatataatataaatattatatgtagatatatttatatgttaatataaataatttagaagactctgaaaggyagcaataaaaagactgactggctagaaccttgaggctaaaaaaaaacacgatggtgtttcctgagttttctttttgcttcaaacatcctagttgctagaattatctgacaagaattttaaagcagccaatatatgtctttaatgagcaattatgaaaatacttgaaacaaatgaataaaatacgtactggcaaaataatagaagacataaagtagaaccaaaaggtaattttagacctaggaagaatgaaattttcagggtcaaacttcaagtctgtctttcaaatattttcagacttttaagttgcaggaaaataattagtattttgtactacttaattagaaatctgtgaaatttgattgatttgtaaaatctcagctattttattctagaagcagccatcttaggctgctaggaaatataatatcagaaaaaagaaaacaaaaacctcagtgaattggctccatagcagactggaggggacagaaaaaataatcagtgaatttgaagataaaacaata

SEQ ID NO: 684179 - DNA, 1386 bp, Homo sapiens
cagggggaaggagtgccgcggggggaacagtgcatccgtagtctccgtgtttggaggaggccccagggtagccagacagcagcagacagcagcccgcacgaatgcggagaaccttctgcgcgcttcacacagctcaacctaattgacaggtatttggggtgactgtgaaccagaaccccaagatacattttgctgccggcttcttgccctctctccttttccagaacgtacagtgttaaagctgtgaaatgagactcctctctgattggtttctaccacttggctcgcttgctactaaagctcaggcaccttggygtgcgcgctcgagggcgttcctctgtctctgtctcatctccatctacagagtgacctcacgtgcctttctcagcccttccacatccagcaggagcctggctgagcaccccagctgggctgtgaagatgccgagaggggagagcattctgggtgtccagcgctggggcacagtgggatcccacactccctgtccctccagcctgtttctcatcacctgagggttttgttttccgtgttccggttgaagagatgtctgtgccaggagggttcctcccttcccatttgcaacctgggatgggtgacgcagatttatccgagacttgggagtgaggctgagagtcagttctttcgtatcctaagaaaggctgaccgtcccatcaaggcccgtgtgctgaaactgtccgtgtgcaggctcaggtggagcaggtctctgtcaggcagccatttgtatttgggcggtgggtgctttgcctagcttagtgcctaccatgcccaggcttgcaaatggggctgtttgggctttgatgtgggctcaggctcagagggctgaagtggttgtggggaggggcttctggggactgtgtccatgtctctgtcgtttttccccatcacaccgtacactcccttgaggccagccgtccatcaccattgagtcatagtcgacagtttgatttacagcccgggtgtcaaacaaaatgaaaagcacgtgatgaatggagggagcacgtgctgtggagggaggggtgcgctccgctccgcaggtcaggggctaagcggccatgccttggcctgtctctacaggcacatgcatgccctggactatttttggggtgcctttctcatcttgaggagtggcaggttttttggactaaggacaaagtgacagaattggactgagaaaggttcatgggggagggctcgctgagccagccctgattaggagcattgctcacaaaaccagaggaaggacggcatcctgggaccttctgatcgcaggacagccgaggagacctcaaacagtggagtgtgatggggcgggtcaccatggaggtgaggtggagactttgggaa

SEQ ID NO: 684180 - DNA, 626 bp, Homo sapiens
tatggctgttttaatagttcaagagcataatatagcattgmtttaccaaaatttttggcctttaacagccagtctatgaaaaccatttagagccccattcctgtctgtagcctaggaaatggaaccatctttaattctttcccacagggaagaatgctgcacctatcacactatgtggtcagggtcactgattgataataaataaataaataatagagcgctcaggggaaacaacactcaccagaccacaacacacagtagaagctaagtgctgagcgtgtactctggacaacgctggctgcaatgcagactgcaatggctacatgcttttccctctaacaattctctttggctttttcaattgggagggcagattttgcttaacaggcaactagaacaggatctctgcccactaaaaaattatccctatacatagagaaattactacagatgctaagtagtcagaatgctaacattttctacaaacttgattacttattggccaaaatgaaagcaaacagccaatttttaacaacacattcaccacttgaaacaaacagcagcatttacattatatcaaagattcatttctacagaatcgtactaaaaaatcatttttcctgcaa

SEQ ID NO: 684181 - DNA, 626 bp, Homo sapiens
tatggctgttttaatagttcaagagcataatatagcattgatttaccaaaatttttggcctttaacagccagtctatgaaaaccatttagagccccattcctgtctgtagcctaggaaatggaaccatctttaattctttcccacagggaagaatgctgcacctatcacactatgtggtcagggtcactgattgataataaataaataaataatagagcrctcaggggaaacaacactcaccagaccacaacacacagtagaagctaagtgctgagcgtgtactctggacaacgctggctgcaatgcagactgcaatggctacatgcttttccctctaacaattctctttggctttttcaattgggagggcagattttgcttaacaggcaactagaacaggatctctgcccactaaaaaattatccctatacatagagaaattactacagatgctaagtagtcagaatgctaacattttctacaaacttgattacttattggccaaaatgaaagcaaacagccaatttttaacaacacattcaccacttgaaacaaacagcagcatttacattatatcaaagattcatttctacagaatcgtactaaaaaatcatttttcctgcaa

SEQ ID NO: 684182 - DNA, 635 bp, Homo sapiens
aataaatgtacatatatacatatgtaagtgtatacatagacacatgtatatacacatacgtgcatatatatgtatgcctgtgtgtatatgtgtgtgtattccttgtagaagcaagaagatatctaaaggagtgtgtattttcttacattatgaaagtagctgatgcgatgatccaacttgctccgcctttctctgacgagaacacagactatgagagatcaggataagcttcctaaataaatatatgtagctcatcaacgaaagtgctgtagtgcatgctcaatctacgcaacagtttctggcatcaccagtcttgcacagtaatggagggtaagcctagagaagtaggcrtaaggttgacttctcaacaaagcttatggaaacttgtgcaatattatagctgtgagagctatagcagttgttactagatttcagcaaaactaatgtttaacatttagaacatttcaatcaccattattcactgattcaatgaatgtgtttttaactctagctaaactagtagatattaataagtatatgtctattatgtgatataaacgcttggatgtccaaaaggccttaatttacatctcatcctaattgattgccagctctgttatcttaccacgtaattt

SEQ ID NO: 684183 - DNA, 656 bp, Homo sapiens
ggcctatgcctggccatgatatctccttcagagaggggtgagatttgacaggacccagaagaacaggcagagggtacggggaggccaggaagaggccagaaatcaaggctggtgatttgcaaatgcagagcccatggcagcatccatggcgtctactggttccctctccagctcgctcactggcagttgctgggctatagcttcatgggctgatggtggccgagcaccaccaccacccagcagacactaaggagcacggtgaaaaagcctgggctttggggccagacagtcctgtgttcagatcccagctctgtcccttagaagctctgcaagtttgaggaagttccatgggaaggtgatctctttgagccttagacttccaagcaataaaatggggttgataacaccgatcctgcatagcctttgtgaagacatatgaaaagcatttgtcaaatgcccggctttcggtaaaagctggttcccttttatgccttytcctcgtccttcctgctaccccttggagctggctgtctcccgatgccagagacaggctctctgtgttgagcggcccgagtggttccaacgatgcccaccacgtggctggcaggggcccgagcacactcggcacactggagataaatacagggtccaggcac

SEQ ID NO: 684184 - DNA, 628 bp, Homo sapiens
taggtgtttcttcaccttcttataaggacacaatcacattgaattaaggacccattcttatagcttcatttracctaattatctctttaatggccttatcatttgcaaatacagtcacatttaggctagcatttcagcatataaattgtgtgtttgggggcagttcataataagaggttttatagcatatgtggaagtaaaaatattccaaaggaaaaaaagaagaaattggaaggtatttctctggaagcaaataataacagaacacttaaatttttgtggaacagcacactattttacacacagaatattcaaaggtaaacaacaatattacctaacctaaaggaaacacaaagcacaaatacacaaatacacgtgcatgaaacacaaatacaaagacatgaggagataaaataaaataaaaatttttggattcatctaaagtaataagggggagaatagtagatgtacaaacatgacacaagtcaaaattaaatagtaatatattagacttgaagtcatgcgtatcaataatttgtattacatgtagctaaactaaacactcattaaaaagcagacattttcagtctggatagaacagcaatatgtaatcatatgtcatttacat

SEQ ID NO: 684185 - DNA, 628 bp, Homo sapiens
taggtgtttcttcaccttcttataaggacacaatcacattgaattaaggacccattcttatagcttcatttaacctaattatctctttaatggccttatcatttgcaaatacagtcacatttaggctagcatttcagcatataaattgtgtgtttgggggcagttcataataagaggttttatagcatatgtggaagtaaaaatattccaaaggaaaaaaagaagaaattggaaggtatttctctggaagcaaataataacagaacacttaaatttttgtggaacagcacactattttacacacagaatattcaaaggtaaacaacaatattacctaacctaaaggaaacacaaagcacaaatacacaaatacacgtgcatgaaacacaaatacaaagacatgaggagataaaataaaataaaaatttttggattcatctaaagtaataagggggagaatagtagatgtacaaacatgacacaagtcaaaattaaatagtaatatattagacttgaagtcatgcrtatcaataatttgtattacatgtagctaaactaaacactcattaaaaagcagacattttcagtctggatagaacagcaatatgtaatcatatgtcatttacat

SEQ ID NO: 684186 - DNA, 1071 bp, Homo sapiens
tgacaaacgtatcatggtaatgtgagattttaacccagaggaacctgggtgaggtgtgtatgggaactctgtatcactttataactttatttatttattattcatttattaatttttttttgagacagagtctcactctgttgcccaggctggagtggagtggcatgatctcggctcactgcaacttctgtctcccaggttccagcgattctcatgcctcagcttcccaagtagctgggattacaggcctgggctaccacacccggttaatttattgtatttttagtagagatggggtttcaccatgttggccagrctcgaactcctgacctcaggtgatctgcccgcctcggcctcccaaagtgctgggatacaggcgtgagccactgcgcctggccactttacaactttaacgtaaatctaaaattattctgaaatttaataaaattacaatgctaccctgttgcttcacctcccaaattctagcccgttttagaactgtttgtaggctgtagaatctctcatatctgcattatattatgtactatatttctgctttattgaatttctccggagaagagcaaaatacggaataccaaacctctcaaagctgtgtgcaagtgctgttacatagtatgaccactagatggagatcgtgtccaggtggctaaaacttacgcttccttgaccaagcaatgtcttggagcagagttcacaaccaaatctcttttctgaaataatgcaataggcatgaatctcaagtctccagactctaggatgtaagaaatactaaaggtctttgttttctataaatcctcttgtgtactacttcaggagccaagaaaatgaaacttccgtccttcttggggcaattctctcttccattcaaccccagggaaatgaaaggtgtcaatgttcagggttttaccaatgaactaggagcccctgctggcactggttacctgttctcaatgaggaccactgagatgctgagacaggagatagaaagaaattatttaggcagatagtgagggtaaaaaagtcctcagcaaggcttcccttttaacaaaa

SEQ ID NO: 684187 - DNA, 1071 bp, Homo sapiens
tgacaaacgtatcatggtaatgtgagattttaacccagaggaacctgggtgaggtgtgtatgggaactctgtatcactttataactttatttatttattattcatttattaatttttttttgagacagagtctcactctgttgcccaggctggagtggagtggcatgatctcggctcactgcaacttctgtctcccaggttccagcgattctcatgcctcagcttcccaagtagctgggattacaggcctgggctaccacacccggttaatttattgtatttttagtagagatggggtttcaccatgttggccagactcgaactcctgacctcaggtgatctgcccgcctcggcctcccaaagtgctgggatacaggcgtgagccactgcgcctggccactttacaactttaacgtaaatctaaaattattctgaaatttaataaaattacaatgctaccctgttgcttcacctcccaaattctagcccgttttagaactgtttgtaggctgtagaatctctcatatctgcattatattatgtactatatttctgctttattgaatttctccggagaagagcaaaatacggaataccaaacctctcaaagctgtgtgcaagtgctgttacatagtatgaccactagatggagatcgtgtccaggtggctaaaacttaygcttccttgaccaagcaatgtcttggagcagagttcacaaccaaatctcttttctgaaataatgcaataggcatgaatctcaagtctccagactctaggatgtaagaaatactaaaggtctttgttttctataaatcctcttgtgtactacttcaggagccaagaaaatgaaacttccgtccttcttggggcaattctctcttccattcaaccccagggaaatgaaaggtgtcaatgttcagggttttaccaatgaactaggagcccctgctggcactggttacctgttctcaatgaggaccactgagatgctgagacaggagatagaaagaaattatttaggcagatagtgagggtaaaaaagtcctcagcaaggcttcccttttaacaaaa

SEQ ID NO: 684188 - DNA, 1071 bp, Homo sapiens
tgacaaacgtatcatggtaatgtgagattttaacccagaggaacctgggtgaggtgtgtatgggaactctgtatcactttataactttatttatttattattcatttattaatttttttttgagacagagtctcactctgttgcccaggctggagtggagtggcatgatctcggctcactgcaacttctgtctcccaggttccagcgattctcatgcctcagcttcccaagtagctgggattacaggcctgggctaccacacccggttaatttattgtatttttagtagagatggggtttcaccatgttggccagactcgaactcctgacctcaggtgatctgcccgcctcggcctcccaaagtgctgggatacaggcgtgagccactgcgcctggccactttacaactttaacgtaaatctaaaattattctgaaatttaataaaattacaatgctaccctgttgcttcacctcccaaattctagcccgttttagaactgtttgtaggctgtagaatctctcatatctgcattatattatgtactatatttctgctttattgaatttctccggagaagagcaaaatacggaataccaaacctctcaaagctgtgtgcaagtgctgttacatagtatgaccactagatggagatcgtgtccaggtggctaaaacttacgcttccttgaccaagcaatgtcttggagcagagttcacaaccaaatctcttttctgaaataatgcaataggcatgaatctcaagtctccagactctaggatgtaagaaatactaaaggtctttgttttctataaatcckcttgtgtactacttcaggagccaagaaaatgaaacttccgtccttcttggggcaattctctcttccattcaaccccagggaaatgaaaggtgtcaatgttcagggttttaccaatgaactaggagcccctgctggcactggttacctgttctcaatgaggaccactgagatgctgagacaggagatagaaagaaattatttaggcagatagtgagggtaaaaaagtcctcagcaaggcttcccttttaacaaaa

SEQ ID NO: 684189 - DNA, 676 bp, Homo sapiens
aaaaatgagggtgactgttaagcaagtggtatagaatttttgctttggggtaatagaagttttctaaagtttattgtggtgatggttgccccactctgtgaatataccatcatgagctgcgtaactacgttttggtcaacaatggactgcatatatggtcccagtaattacaacagaactaaaaatgtttctatcatatcatatgttttctatgtttagatatgtttacacaggcaaataccattgagttacaattgcttaccgtattcactaccgtaacttgctgtacaggtttgtagcttatgagcagtaagagcagtaagatatacggggtagcctaggtgtgtagtagcctatactatccaggtttgtggaagtacattgtataatgttctcacaaggatgaaattgcttaatgatgcatttcttagaacatatctgcattaagcaattaagcaatgcattattgtaacaaaatctattgaattttaaaatttaaattaatatattgtatggtatgttagtttatttcaaatatatacgtatgtgtgtgtgtrtatatatatatatatatatatatacacattactagatggctactagcatttttataaactattgtataaattgctgtatcatgggtcatatgagtttctttaatcatagacaatgttca

SEQ ID NO: 684190 - DNA, 676 bp, Homo sapiens
aaaaatgagggtgactgttaagcaagtggtatagaatttttgctttggggtaatagaagttttctaaagtttattgtggtgatggttgccccactctgtgaatataccatcatgagctgcgtaactacgttttggtcaacaatggactgcatatatggtcccagtaattacaacagaactaaaaatgtttctatcatatcatatgttttctatgtttagatatgtttacacaggcaaataccattgagttacaattgcttaccgtattcactaccgtaacttgctgtacaggtttgtagcttatgagcagtaagagcagtaagatatacggggtagcctaggtgtgtagtagcctatactatccaggtttgtggaagtacattgtataatgttctcacaaggatgaaattgcttaatgatgcatttcttagaacatatctgcattaagcaattaagcaatgcattattgtaacaaaatctattgaattttaaaatttaaattaatatattgtatggtatgttagtttatttcaaatatatacgtatgtgtgtgtgtatrtatatatatatatatatatatacacattactagatggctactagcatttttataaactattgtataaattgctgtatcatgggtcatatgagtttctttaatcatagacaatgttca

SEQ ID NO: 684191 - DNA, 676 bp, Homo sapiens
aaaaatgagggtgactgttaagcaagtggtatagaatttttgctttggggtaatagaagttttctaaagtttattgtggtgatggttgccccactctgtgaatataccatcatgagctgcgtaactacgttttggtcaacaatggactgcatatatggtcccagtaattacaacagaactaaaaatgtttctatcatatcatatgttttctatgtttagatatgtttacacaggcaaataccattgagttacaattgcttaccgtattcactaccgtaacttgctgtacaggtttgtagcttatgagcagtaagagcagtaagatatacggggtagcctaggtgtgtagtagcctatactatccaggtttgtggaagtacattgtataatgttctcacaaggatgaaattgcttaatgatgcatttcttagaacatatctgcattaagcaattaagcaatgcattattgtaacaaaatctattgaattttaaaatttaaattaatatattgtatggtatgttagtttatttcaaatatatacgtatgtgtgtgtgtatatrtatatatatatatatatatacacattactagatggctactagcatttttataaactattgtataaattgctgtatcatgggtcatatgagtttctttaatcatagacaatgttca

SEQ ID NO: 684192 - DNA, 1548 bp, Homo sapiens
aaaatgacaggctcctctcaaggtagaaccttgaaacaaacaacatccctagataagacgggatacaaggaatttagccaccaaatttctgagataaaccctgtttccattttatattaaaccctgcttggccatttcatgaaaattttaaataaaatatataaatataaaaatttaaataaaataaaattccacataaaacaacaaaatagacttttacttcaggaattttgagaggatgatttaaagtttatacacacacatgcacacaagcatacacatatatttctactatatacatatatctctttagtttgaacacacacattcattttaagaagtggtggatcataagaaagttttcttaatctactagatgcctacagaaaacttatttaataatgaaacactagaagattctttgctcaagtcaacaaaatgcgaagctgacctgtattccactattctcttaacactctcctgtaagtctttgccaatgtactagcacaaggaaaatataacagaaagacactttaagagacaacactcccaatatttgccaatgattttcttcctaaaaaatcttaaacaactaaaaaaaactaccagaggctagtaagaaagttctggagttacgggttataagattaacagacaataaaaaagacaactttcctatacctcagctaaccaatgaaaaaatcataatggaacaaaaatacagtttaggaaaaaaacacaaagaataaaattaacaaaaacatttaaaagtatgaaacttgactgaagccacaaaagaaaatttttacaaatagggagtaggagagagggaaattctcctaagtagaaaggttctatgttataactaaggcaatgatctccagattaagtccttttatattttactcaacattctcaagtgtctgatattttaagaaagtatccrtgtattatttttattatattttcttctccttttttttttttttttttttttagacagggtttcactctgtcactcagtcttgaatgcagcggcgggatctcagctcactgcaacctccacccccagggctcaagggatcctcccacttcagcctcctgagtagctcagaccacaggcatgcatcaccacaccagggttttgtctttttctatttttattagagacagggtctcaccatgttgcccaggctggtcttgaactcttgggctgaagagatctgcctgcctcggcctcctaaagtgctgggattacaggtgtaagccaccgtgcccggacaataatatttcttagaacatgaaaataaggaaaagaaaatactatgcagttttatcacagtgcattttgaggcctgcaagaaggggtggctcattgggccactggggagtgcctgaaactaggctaaaatgttagttaactcagaatcaggtctagaatccagagtctgacctccaacccaattcttcttttcataacatgacttcaagtcacttctttgtttcctgctcaaacctaagtatgcaaagaggaggtgccatttctca

SEQ ID NO: 684193 - DNA, 604 bp, Homo sapiens
tagatttccttctgaagtttacaacccccaagttttcccctctcaactcaacacgaatgctaaaagtaacagtagtctttttatcttttaggtcaatggcaatggcaatgttattagagtatgccttcctgaccccacacaaagaatgtatctttgatacatttatatccataaatttttctatgtggtcaaaagggtatcctgtatccaagtcattacatatataaaatggatggtggttttcaaagaaagccaaacctaagtcttaaaattaaccccgtttcccagtattaacttttctactgattttaatgaatcttaaagttgggaaaacacctccgccccatttctggtctagcgctcagcgcaaagtataaaatcaatgccccatatcagtttcaatttcagtgaaacaagacaccatcgcacagactgtcagtcttagaagatctaacagaataacttccattgtatgaggattttgcactgaagaaaagatamatttatacttgtatcagcagtgtgaatggtcacaaagacatatttactcatctgtgtacatcaaatttaagctacttataccctttaacttctctctataaat

SEQ ID NO: 684194 - DNA, 1137 bp, Homo sapiens
gatggatctttatgtgaagcaactacaatcacagagcttctggattcctctcactatttgttcttactacagaggggctgtcatggagyagttttcttcttttcaagcacctgagtgagcttaagaagtgggtgaagggtgtttggcagccaggctttgctctttcacagccctccatggtagacaggtcaagcggaccttgctcccacgatttttaaaattgtgatcctatgtccctcttgaaccagttcttagctaaatggttagcatattcctggtgcaaggtgcatgttcactgaatgcttgttttgctggttaaaacagacttaacatcaaatcattttaggacatttaaaagtactgaattatttatctgaaagaagaaggagcttaatatttgcataagagaaggacaaaaaatggtccagaagtatgtcaaagagccgtggcagaatcatcactcttttttaaggcactatctggtttatgaatcttctgtgtctgttggggtggaggagttgggcagacacacagggcttttagctaagagtgacctctgcctggtctcctgatcaggccattcactctcccaggctcttgtattttgctttaccctccctatttgcaccttctacacacatgattttggattttaagatctgattttccacatactttgaatttgtgtggttcaaaagtttatgactttttgaccaaatttggaaattgaatagataatcttgcctatcctaccactttgtaaacttattaattaccttgatcttccatgttaggcatatttaatgtatttttaatcacttagtagaattgtctaatacagaaaaataaaaagaagaaaacaacaagagtgagctactgcccagacaaggcttattaattacaaaagaaaaattgtgttacactgactgtaaaaaaaattgtgctaactttcttatttttgctatgctttctgaaatagtttaaatgcaccaaaatattctgttacttcaaacattaaaaaaattcacctgtgacactgggtaatcttggtgattttgggaaggggtaaataattctttaacaccataaaaagtaccttttcctggtgtttttcagtgtcattttgaggggttattt

SEQ ID NO: 684195 - DNA, 1414 bp, Homo sapiens
tgagacatagtgttagtctgttgctttttttctaaattaggcattctctttccatttttcatatatttgtcactttcttatagatttataagacttcttttatgtgaaagatgttaaaaatacactgccttcctatatatgttgacacggtttcatttctttctttttaaaaagatcagtagtttaatattgatttattcaatcaatattaataagtgtgcaataaaatcaaccaaattctgcttactggtttctgtctctgatgtcatacttggaaaatctgcctttctaagattatgtaaccatttattttcttctattaattttgttatttcaatttttaatagctaaaatattaacccatctggaatttggattgtgtatggaataggtaagaatctaaatttttttaacgatggatcaattgttacaaaattagtttgtatcaaactcattcttttctcaccaatttagaatattactttcatcatatatgaaattcttaaatataactttttatggggtttctaatctcattgaactgtctttctcttcctctgccaataccaggtgattttaattttaattgtgtytgtctttactcatcttctttcttcattttcctcagaaaaaaaggtttagctcttctctaaaatttaattattaaaattaactttagagccacgttgcaaagttgggattccaatgggaattgcattctatttgtgtagtaatctgaggagaatttacttctttacaatattaatatttcacacccaagaacatccacttaatcaagattcttttatgttcctctacttattttgtagttctcttcaagaaagacttgaaccttttcatgagagttattcctaaatattttctaactaaattttaaaaagagttaagatcttggtaatcctgtcctaatttctaaatatggtctatgtgcttcagctatagtctcctacacagtggttcttaagaactctaaaccctgagatgagggggaaaatcaattgtacatcaaaatagtaaatacttggtaatgaagcagtgttacagatttttattccgtcatttctaaattttctttatctttatatttaaaaataagtttaacatgtgaatgagagacctatcacttaagacccaaaactcccacactttccatttatgtcaatatattatacataggtgtaggcaccaaaaatttttgtggttagtcacccaaactagattataaaggctttaatatttccctgcaccttttattcgttattcttcatggctcctagtacaatatcatgaaaatagtaaatgcccagttgatgcctcctcaaggagttatcaagtgaattgagtgactaaagcagaagatggaaagaactacaaaatttgatgtggcacatca

SEQ ID NO: 684196 - DNA, 606 bp, Homo sapiens
aatagaagagctagacagaattttaagaaataccttcattttaatgaaaaggcagggggagaggagtctatgaaggaaaacaagaaagaatagacagacgggtgttgttaaggcatttaagaacgtccacyattacttcttccatctcactgtaatcactacacttggtctagacttaaaattgaaggactataagcaaatcagaatcagtgtgccaggcatagtttctcttcctagaaagtttatatgacatatggctaataacaccaaattgaaaataagcacaaaatatagcctttttgagcagcccttttgcatcatctttttgcagcatagttaataaatcattttaaatggacagaagaggaaaaggtcaatctgttgtcccaagtgcagaaatggccacaaatgtctacgaaattcaatacaaaaggtcattgaaagagaatcacattatctgtcttgttaaatttgttaacaaattcttattaaatttgggttgactttctagattatataattgggtatattttgatggccaaatatacttctttgaaactagaggaatcaaataaaaggcttatatgccaataaccatcataccca

SEQ ID NO: 684197 - DNA, 606 bp, Homo sapiens
aatagaagagctagacagaattttaagaaataccttcattttaatgaaaaggcagggggagaggagtctatgaaggaaaacaagaaagaatagacagacgggtgttgttaaggcatttaagaacgtccaccattacttcttccatctcactgtaatcactacacttggtctagacttaaaattgaaggactataagcaaatcagaatcagtgtgccaggcatagtttctcttcctagaaagkttatatgacatatggctaataacaccaaattgaaaataagcacaaaatatagcctttttgagcagcccttttgcatcatctttttgcagcatagttaataaatcattttaaatggacagaagaggaaaaggtcaatctgttgtcccaagtgcagaaatggccacaaatgtctacgaaattcaatacaaaaggtcattgaaagagaatcacattatctgtcttgttaaatttgttaacaaattcttattaaatttgggttgactttctagattatataattgggtatattttgatggccaaatatacttctttgaaactagaggaatcaaataaaaggcttatatgccaataaccatcataccca

SEQ ID NO: 684198 - DNA, 845 bp, Homo sapiens
tagttaggcgtggtggcgggygcctgtaatcccagttactcaggagggtgaggcaggagaatcgcttgaatctgggaggcggaggttgcagtgattcaaattcgcaccactgcactctagcctgggagacagagtgaggctctgtctcaaaaagaaaaaaaaattggggcaccatttgggagctaagcacataattttcctctctgttcatgtgatggccatgggcagctacagtgtacttagctctattctcattactgaaggataatttgtaccctgaatgtgtttcaatgggtgaaaaactgggccaagcgcggtggctcacgcctgtaattctagcactttgggaggccgaggcagttagatcacttgaggtcagaagtttgagaccagcctgccaacatggtgaaaccctatctctactaaaaataaaaaattagccagacatggtggcgggtgcatgtaatcccagctactggggaggctgacgcaggagaatcgcttgaacccgggaagccgaggttccagtgagccaagattgcaccactgcatgcagtctcaaagtaaataaataaataaataaaaataaaaaggtaaaaactgaagaaagctgggtgataatcataggtaccagaattccaacttcaatgatcttatctgtggcaaacaaacaccaatcagtcaaagataataagcatttacccaccaagttgtttcacaaaatgcatttcctgcttccccctgccccgcccccactgccatatatatccctctgagtttcggattaggaaagaatgttgagaaaagcaacagcttacttgtgactacacagataataagcatca

SEQ ID NO: 684199 - DNA, 1111 bp, Homo sapiens
ctgcttctcagccactatgtcttctcattcatccacattgaacttggtaaagccccacttcttggagatgtggatcttctggtggccagggaacttgaacttggccctgcatggcgcctcaatcacatgctccttgttctgcagcttggtgcagatggacttaacttggccaatgtgaaccctggccacagtgccctggggctttccaaaggcaccttgaatgcctgtttcgagcctacatcgggggtagtgcaaggtcagagacatgaacgtacatttgaaaggcctgtctccaaggacccttagagcaacccatacaagaaacaggccatgtacaccaccaagaaagctgctgtttgcagccattgcacactgggatcagaacttctttcttatcaatctcgtctcctctcccattcattttttctccctcttcctttctttcctctttttttcacctttcatcgcagtctagtctctatcatggctgagaatgccaagccattgcaaaacccctcctgatgggctacgatagtcatgaatagttcaaaggatacacagattactaagagtacacccaaatggtttaacccaaatgtgggtttaagcccccacagcaaccagctctgagtttctgaatgtttacttatatatgtctattatttctcaagatgatgctgatatcctcaaagacaggaatagaatccatggcgactttgatgcaatgtgaaggcggccatcaaataccaacctaaatgaagaaaaaactagattttcttaagtgtaggagaaattgatttgaaagcatagtggatgtcaagttggtcataaggcagaaaaaagtcaaaatgaatccaaaatgcaatagcacaattataacatgccgagaagtcctttctgccttcaayactgaccaaatttctattggattcctttactctcattttacatctgcagaaaaatagggaggctgtaaaaagtgccatgaggggccaggtacagtggtttacacctacaatcccagcactttgggaggctgagacaggaggatcgcttgagcccaggagtttgagaccagtctgggcactatagtgagaccccagcatatata

SEQ ID NO: 684200 - DNA, 496 bp, Homo sapiens
tgaagaataacccgagactgggttatttataaaggaaagaggtttaattgactcacagttctgcattgctggggaggccctcaggaaacttacaatcatggcaggaggcaaaggaaaagcaggcaccttcttcacaggacagcaggacggacagagtgagtgcaagcacgggaaatgccagacgcttaaacaaccatcagatctcgtgagactcactatcatgagaacagcatgggggaaccaccccccatgatccaattacctccacttggtcctgcccttgacacacggggattatggggattataggggttacaatttaagatgagattttaggtgggggagcagccaaaccatatcagatcatgtctcaacgaaaaaaaaaaaaraaagaaagaaaagctaagtgaggcagtcaactctttgtcactgccaccacattttaaatatgaaataggctgtgtgcggtggctcatggctataatcccagcacttt

SEQ ID NO: 684201 - DNA, 611 bp, Homo sapiens
tcgggtatgtctttatcagcagcatgaaaacggactaatacaatgatcatattcagataataatcttttcaaacacatgtcctcctccaaagttcccatgtaaggacattgtttaatttttcttttcaaattaggtgtcactaatgtttgtcttaatgaattcatctattgctgttatattggtttcctattgctagtgtaacaaattaccataaacttagcaacttaaaccaattaacatttattcttttgcagttgtagaggccagatgactgaaaagggtcttacaatgtgaaaatcaaggtgtcaataaggctggttccttctggaagctctgaacytctctcaacctctggtggctgccagcattgcttggttcttggccatattcctgcagtctctacttttatggttgcattgttttcttctcttccatagtcaaatttccccctgccttcctcttgtaaggactcttattattgcatattggacccatccctacaacctagagtaatctctccatctcaaaattcttaatcacatctgcacattttctttttctaaataaggtagcattcacaagttctagggattaggatatgaataacatg

SEQ ID NO: 684202 - DNA, 2118 bp, Homo sapiens
actgagtctgtttaggaacctccaagctctgtagtaactttagggctagaaaggaggatgcctaagattcaggatcctgcagtgatgagtcaacatttcttggggaaggaggcagggctgaggattaaacggagatgatgggtatcgttctcttgctcaaaggcactggaccccaaggcctccagctcttcgctcccatttgaaattcaagtcctgagcacaccacagttgtgatgcagggaaagaatgtgcttatcagagagcctgggcaagtgggccccttgtgagtaccgttcaacctcatttatgtcattggcaccaaaagtagacatcagtctcttgaaagtttgattaatgctggtcacactcaaagaccctgggtagcattcatttactaagcaattactaaataccagtttctgtgctaaatgctgcatcagtcagggctcttaatggcaggcagcagaaactctccttggctgatctaagtagaaaaatccaggactgaaaggaaacggagtagctcatgaaattgcaggaagggccggaaaaccagacatggagccaaagtcaggctgcagaacaggtctagggaggatcccactgctgctgagacctagaccttgtgtctggcacccaggatgttgtagggctcagaccctggatcaatgtatcctgcagtgcctctgtgggtactgcaactccaggaactcaatcttgtcaacgccaccgccagagagaggccttcttggcctccatctttttggtcactagctccagattcaaaatcttgaatagatgcttcttctctttgatagagcccagtcatatgcgttagctgcaaaggaagctgaaaatctattaggaacttttgtcttcaaaaatgagaggcctgtcctccaccaagatccataggaaatggaatccaagaaaccacaggaaggggtgaggtgactgggcagctcacagcatgcatgctacatgtgaattatctcattcatttctcacactacccagtgaggtaggtattgtcatccctacttcataaatgatgatatgaggtacagaaagtttaaggaacttgcccaggacacgacacgcagctattaagtgctagacccagtcaatttgagtctgacttggactgtctgactccagaagccaccctctcagacactgctgtatacttccagtgaatgttgatgaaattttcagggttgctaagctgtggatttcagatcctggattgtatgacctaaaagagagacttccctaggagtgagggtccctgaacagtcaactggtttccaagaatgggctccctctcatcaccttatgacagtaatcctctgtccaacagccaaagaggtcctgtggggagggcttgcagatgggagtgcgcagagcccagctcaaagctcctgactaggctcttgttgagtattcctttgattcctgcttctgtctttttaaatcaatggagacaggggagggttatctccatcctcggctcaagatgaaatgcatcgttcctcgtttttctcattccttcccaatgtgtgtactgttaactttagttatgaaggaaattacagtgtcctgtgcatataccaaggctgtccaacctccacacctttgctcaagctgttccttctacttgaaatgcctgtttccttcccttctaattgcatctttccatccaggtaggaatcagctccttggttcatggagccttttctgctctgttttactatgcatggacttccttctgaattagcagaggatgtttcctagcttggtcttaacccttctccttttgtttgacctcaatttactcatcttacaaattaggttgtaagctaattgaatacaggatctatgcttcactctgattttatctccacctggatagcatcatttttgacacacaagcaggcatatgggaggggagagaagtttggtgccagaaagaactggatttgaattctaaccctgttgtttacgtgagtacgttacttaaccattaattacttcaatgtatatttattragtacctactatgtgccgggcactgtactaagcaccaaggatacaatggtgagtaaagagatgcagcct

SEQ ID NO: 684203 - DNA, 644 bp, Homo sapiens
agatggtgtgaggtggaggtcagagggcctgcttctcatttactatgggaccctgggccaggtcccttccctgtgggggcctcagtttctctgggtgtaaaatggcctggctaaatatcttgtagagtccatcgtctacgccctrcttcccctctttgagcctcgttttcctcccccgtctagtgagagtgatgacagcgcctgtcctgcctgtctcctggggtgtttgtgaggatcagaccagatgatgggtgggagaagtcccccttcaaagccagggatggacggtgctgcctgtgcacatttggggggcggtgctgcctgtgcacatttgggagacaccagggtcctcctgagggtgacacagtctgtggagacaggactgggccgtggagcagtaggagggtggcccctctggctcccagaacccagagccacatggctaccacttccttcccttcctccttccttgtctcctcagcccgtaaagggctgtcctgccggttaagtccccaggaaatccccagctccagccttcggaatgggggagaggagagtgtgtgtgtatacggggggtttctaggttaggacggtaagcttagcatctcccccaaactgtgagaccgccccccgaccaagtgaaa

SEQ ID NO: 684204 - DNA, 611 bp, Homo sapiens
tgagcccaggaggtcaaggctgtagtgagtcatggtcatgccactgcactgcagcctaaacaacagagtgagacccggtatcaaaaaaaaaaaaagaagaagaagaagmagcagaagtagaaccagggcctctaaggaagtttacagtccatactttctgcctttggaaaagactgctggcttaccccaggcctgagagcaggaacagctactgaggacagggtttctagcaacctctgaactcccagcagggagcctccttctcccacttcccaggggtctgatttgagggccctgggtagagcctgtctcagctctacatgatgggaaagtctgcaattcaagcttgactcatttggcttaactcatgggaatttgccttccttgaaatcctcttcccaccctgggacagcctaatgattcctatagggcacttgggacgcccttggcagtgagtcggcccagagagcaggactgagggagagggctgggaggtcagtagggtcactagacttagggcagagcccctgcctgtgcacccctcaggaccggagcagcctaaggtatcttgtacagtggataagagtgtgggctctgagggacctgggttc

SEQ ID NO: 684205 - DNA, 1542 bp, Homo sapiens
ctctaaccccttccccttcccacaatccttcatagagaggcaatgaaacaatgtaacttaaaagataaagtaactaaaataataggtatcctgaatggattctggaatagaagaatattagtggaaaaactggtgaaatccaaataaagtctacagttaactgtattgtgccaatgtcaatttcttagctttgacaaatgtaccatgatgacataagagattaacattagagggagctgggtgaagtgtatataggaactctatgtactatctttgcaacttttaaaaattatttcaggctgagcacggtggctcatgcctgtaatcctggcacttcgggaggctgaggcgggcagatcacaaggtcaagattgagaccatccttggccaacatggtgaaacctcgtctctactaaaaatacaaaaattagctgggcatggtggcgcacccctgtaatcccagctacttaggaggctgaggcaggagaattgcttgaacctgggaagtggaggttgcagtgagctgagatcatgccattgcactccagcctggcgtcaaagcgagactctgtctcaaaaaaaaaaaaaaaatttcaaaatgaaaagcgtattgattttttaaaaaggtaaagaaagaacataatttagaccaaaattagtctctgactattcaaggaatcagtgcattccgatgacactgatataaaatcttcttccagctcattcaaagcaaggccaaccacgttgcagtgttttagcaacatttcaccagacataattattaacacattacatagatgagaaaataactttcatcttaggagtgtgagtcttttaaatcatcaggcccagagagacattaaaatgagagagctatacgtcctattccccgctttgagctatggattcatcccttgaaactgcttgctattgccacagatagctataacttaacctaataatgcttaacctgacactatatccacaccctatggcttaacgatgtacagccaatcactgatcaatgttatatctataaaccaataataattcttgacaaacaactttgtactagcaatcyctagtctcctttttttgcctttaaaaaatctgcttataatacaggccaaatggtgctcataaccaaggctacctgggtctgagtcttccaggcagctcttcccactttggctcaagtaaacttttaaaatcgtatttggtgttaggcctcttccttttaggtcgacgtgaaaaagctgtctgaaacaccgttaggaaaaaaaacactagatcacaacactagagaaaatatgtttatattaatgtagattatagacatgaggaggaaaaatttacctcaagaatggctttgcttttggaaaaacttgtgaacttcatcaaactgttgcttgaggctaccttggggaatgggaccagggaaacatatcattttgaccctatatgctttttcactgcaagacctcttttttggatgagaatgtgttaattttgtacatttttaaacaaagtttgttttttttt

SEQ ID NO: 684206 - DNA, 1542 bp, Homo sapiens
ctctaaccccttccccttcccacaatccttcatagagaggcaatgaaacaatgtaacttaaaagataaagtaactaaaataataggtatcctgaatggattctggaatagaagaatattagtggaaaaactggtgaaatccaaataaagtctacagttaactgtattgtgccaatgtcaatttcttagctttgacaaatgtaccatgatgacataagagattaacattagagggagctgggtgaagtgtatataggaactctatgtactatctttgcaacttttaaaaattatttcaggctgagcacggtggctcatgcctgtaatcctggcacttcgggaggctgaggcgggcagatcacaaggtcaagattgagaccatccttggccaacatggtgaaacctcgtctctactaaaaatacaaaaattagctgggcatggtggcgcacccctgtaatcccagctacttaggaggctgaggcaggagaattgcttgaacctgggaagtggaggttgcagtgagctgagatcatgccattgcactccagcctggcgtcaaagcgagactctgtctcaaaaaaaaaaaaaaaatttcaaaatgaaaagcgtattgattttttaaaaaggtaaagaaagaacataatttagaccaaaattagtctctgactattcaaggaatcagtgcattccgatgacactgatataaaatcttcttccagctcattcaaagcaaggccaaccacgttgcagtgttttagcaacatttcaccagacataattattaacacattacatagatgagaaaataactttcatcttaggagtgtgagtcttttaaatcatcaggcccagagagacattaaaatgagagagctatacgtcctattccccgctttgagctatggattcatcccttgaaactgcttgctattgccacagatagctataacttaacctaataatgcttaacctgacactatatccacaccctatggcttaacgatgtacagccaatcactgatcaatgttatatctataaaccaataataattcttgacaaacaactttgtactagcaatctctaktctcctttttttgcctttaaaaaatctgcttataatacaggccaaatggtgctcataaccaaggctacctgggtctgagtcttccaggcagctcttcccactttggctcaagtaaacttttaaaatcgtatttggtgttaggcctcttccttttaggtcgacgtgaaaaagctgtctgaaacaccgttaggaaaaaaaacactagatcacaacactagagaaaatatgtttatattaatgtagattatagacatgaggaggaaaaatttacctcaagaatggctttgcttttggaaaaacttgtgaacttcatcaaactgttgcttgaggctaccttggggaatgggaccagggaaacatatcattttgaccctatatgctttttcactgcaagacctcttttttggatgagaatgtgttaattttgtacatttttaaacaaagtttgttttttttt

SEQ ID NO: 684207 - DNA, 674 bp, Homo sapiens
ttttgattgttaccattatccactcagtcacccaatcactcctttaacccctagacttaatcaagctctgttgattcatacccctcaataagtctcctctccagtgcctcaatttttgcttagatcactgcaagagctaccaacatttttttcctttcttcagcaactttcatcctcgatgtggaaggaaatcaagatattttaccccaaaatatatttctttgatatactttgagatgactgccagagggccagcaaacggaattggccctacaaagctgtctttcctgggggaaatttacatctgtagagaatctatattcatgcagccaggattcccttgtcagatctaggaaagattaagagtctgacacctttagaggtgagagaatttggtaaaggtaagaagaatttgtcatctattctgtctgctacccatgaggtttcatctatataataaggccaactttgctaggcaggcctcctgttctgtctctctcataacctgttttgccactaaagcctagtttaccaccatagcctgtttttggctgtgctctgaatccatattctttctgtaacctcgaggtggagggctttcwttttgaaggcccctgtgtcatgaaaaactatgatcaaataaatttgtatgccttttctcctattaatcgtct

SEQ ID NO: 684208 - DNA, 646 bp, Homo sapiens
atagatgttctataagtatttactgggggaaaaacaagccaaactaaactttttaaaaatggagatatttatcctctttaaattgtaataagatctatctgtcattaattaccctcaatactaaagtttttttacagatctttctcattttggagaaatgtattacaaaaattatccagctaagctgagaaactacaaaaaaggttatatagaaaaaatatgtatgttatttcaactatcacatatgacatctaatcctattacaatggatagaaaaaggtttgcactgacaggcataatactggaggaaattgagtgacacacatttcctactttgaagggtgcagtagcctcagtactgcctaagtaaacatcaacacatacttttaatacaaccaacagaggtcaaaactgatgtaaaagttcacaaacctatgatgatttacatttgcagtaagaaaatattttcaattatattccattactcaagaatcttgagtaatgttttactcaaggktttttggctgcataaatgtcttcttttgagaagtgtctgttcatgtccttcgcccactttttggtggggttgtttgtttttttcttgtaaatttgtttgagttcattatagattctggatattagccct

SEQ ID NO: 684209 - DNA, 639 bp, Homo sapiens
tttttactgagcgagcacagcactgctaaatccactagccatgtgccactcacagtgtggccagggaccagcagcattgatgtcaccaggagcctgttcaacacagaatctcagccccacacagacctgctgaatcagaatctgcatcttaacacggtgcccagctggctcctttgtattgtaccttaacatctgagaaacacagctttaatcaccccttctccccggagacttaactccaaaaccaaggccctgctacccaacttgccaccaagccatgaactacacttcctcttccaggaaaggagcaggcctttgcttctcaccctgttcacctggtcactgggattctttcccgctctggtgtctctggcattcaaacagctctgagaaggaaatttgctttctaggtcgaacctctctccctgcctcccccstctccacacgtctctggggaaggcaattccaggaggcccaaacaaaggtgccccaccctctgagcagagggacacagaggcttgtacttctctctactcagatggtgaaagtgaagcatggtttggggaaacgaagcttgggaagaatgagctaacacaagactcccccagagatgacacagagattctggagctctgagtt

SEQ ID NO: 684210 - DNA, 645 bp, Homo sapiens
tttttaagttattgcctgtgttgctccactttcacaacctgagggcagggatttttgtctggtttatacaccgctgtatttccaatgcctaaatatatgataagcactcaataaatacttgatgaagaggtaaagtgtattctttattttcatcccaggctcttggcaaagctttatttactgctgtccctacagtggaagtctaatcagaatgaatcaagaggtatctttcacrtcattacttccatttagttcaggtctctctttccactcatacttgtctcagagaaattttcctaccctagctcagtaaagtgttccatctgacaaggtcccataaaactaagaaatcatcacagcaaattaggagagagtaattaggggctatcatataggcatgcaatctgaaactccttaacatatgacggtattacaagaataccattatttggtaagaggcaaatcttaatactagccctcaacaaaaagaatctgcatataattaattagttaaggataatattgtctgtgaaaacaaaagatgtaagaaggaatattaagaaaacaaacagcaaaaatatgtgtaactgccaccagtgtgatactttatatctactgtaaatgaagcctcaaaaacagaatttg

SEQ ID NO: 684211 - DNA, 603 bp, Homo sapiens
aaacctttgctaccatgatttctttcttcttagctgacagaaattccattttttcatttgttcaggccaaaacttttgatgtaatccttgactcccctttttctcttaagccccacattgaatccatcagccctccaaaaaatattcagaatccaaccattttttatgaccatcagctatcaagagttttattacaatagactcgtgactgccctctcagcagcatcattcaatctgatatatgtcttacagaattagcatagaagacctattatcaaatgcagtggttctcaaagtattgtttctggaccagcagcatctgcatcacctgcgaaccyagtaaaaatgcacattctcaggaccccacccccacaagtcagaaactctgagggtgggatccagtaggcttctttaacaagcccttcaactgttcctgatacatgctaaagtttgaggtccactaatctagtgtgatagtggctgataaaaaggtccgataattttttacaatatcagttaagtagtaaaatcttaaaaagggaaaatttacctgttttacacttttacctgtaattaaaacatagaactaaacattcacatttt

SEQ ID NO: 684212 - DNA, 1250 bp, Homo sapiens
attgagcccctttcttcttcacttaaaaattcagagaggatgctaccagatagatttgaatcaaataccgcgtggtgttaccagatccatcaggcttttggggaccctgttcatttcaaaataccccatgaaccttctttgctttcttctagagctggacctcattgaaacaccaagaaaacaaacagctctaacaccaggagtccaatatacttctgagtcctcacaatcgaccagagggacaaaattcagtggggtgtactagctttagaatcactgctcacaagaaacagtgtagcactttgttcatctggagtgcttcacacataaagacaaaaataaagacataactaaacatataataacacatacaaataaaggtgttattttaaaacatataaagaaatatgtcacataccaatttatacataaacaaataagtgaaaaaatatatatcatgtgtgtagtgctgtttgcctgtctaaggtgttattcccagggcatgtaagaagtaaacatatatatacacacatacacacattaacatacatatacatattctttaataaaaatattttttaaatattctttcatcaactccagactcacactttctcacattttaacatctctaaaattggaatgcattttacaatctaaggcacttaacaattcaactggaagtgtttaaccttagcaatgtatgtaatgatgcatcttacaacagaggtgctttaggttcaataaattatggaaggctaactctacaataggtatttcttcatatatttgagagcaaacatcttattcctaaagagtcttcaagcagagaatcctgagtgctcgtatgatagagaaaaaaactctactaatatacagcagggcagctattttggagataacctggcagtacacttagttaaatgaaggagacatttatatatgtcaaagacatgctcacagaggtccagaagagaaatgtctaatgctgcatgtgttgcaaggagctggaggcaatctggatgcctagcaatgtaggagtagaaagactggtagacgcacacaaagaattayataagagttggaagcaaaggactagatgtatacaaagtaatagataacttcaaaaacagtgctgagtaggaaaaaagagatgagaactaaaacaaagcatataatttacatttctgtaaagttaaaagatacacattctcaagaatacatgtaaacaaaacattaaaatgtttgca

SEQ ID NO: 684213 - DNA, 610 bp, Homo sapiens
gtgaaacaaaaaaatggattcattcatacaatggaaatgtccaacagaggattagatttaggaattcacaggttgcagggtctccaggtgtgctctctgagtcttcagaccctgcctgtctcctctcaaggttgtcttcaagatgactaatggaagcaacataatagaagttgttgctcttgttctctctccaaactgtctaggggatccaatttctcatgatggcttttgtaagaaccagggggaaatttctcctaaaggccccagtcaagagtatgctgtggcatcattaatggaaatggtcattcatgccctcctaaaataatcattatggccagagaaaagagatcataatctggttggctttatwtagttaggattctctttggggctggaattgcggtgaatctcattgaagccatatggctgagaatatggaacaggagtttcccaaaagacaatttggatgcccttattagagaaattagctatgagtggtgaggagagaactgacagatgggcacgctatctgagagttcacaaacatttactagaactgagacagaaaaaagaactactaggcactgagtgaaggtattattgtttcttt

SEQ ID NO: 684214 - DNA, 610 bp, Homo sapiens
gtgaaacaaaaaaatggattcattcatacaatggaaatgtccaacagaggattagatttaggaattcacaggttgcagggtctccaggtgtgctctctgagtcttcagaccctgcctgtctcctctcaaggttgtcttcaagatgactaatggaagcaacataatagaagttgttgctcttgttctctctccaaactgtctaggggatccaatttctcatgatggcttttgtaagaaccagggggaaatttctcctaaaggccccagtcaagagtatgctgtggcatcattaatggaaatggtcattcatgccctcctaaaataatcattatggccagagaaaagagatcataatctggttggctttatatagttaggattctctttggggctggaattgyggtgaatctcattgaagccatatggctgagaatatggaacaggagtttcccaaaagacaatttggatgcccttattagagaaattagctatgagtggtgaggagagaactgacagatgggcacgctatctgagagttcacaaacatttactagaactgagacagaaaaaagaactactaggcactgagtgaaggtattattgtttcttt

SEQ ID NO: 684215 - DNA, 602 bp, Homo sapiens
caaaagctaaaggaatgtattgccagtagacctgcccacttagaaatttgaaacattctttagggagaaggaaaatgatataggccaaaactaagattacccaaagaaaagaaagtgtcagcaaaggaatgcatgaaggtaaaataaaatctttwcttttttcttattaatgtcttattaagctattactaatagcttaatttctaattcataattgatcccaaataaaaaagtttgtttaaagttataacagcaacaatatagtagatgattacagcatatggataagtagagtgaatgatagcaatgccataaggaaagggaaaagagaattggaaattctctattacaaagcagctggaggcacacagcaggaggggacagggtcagacttaggaatggtggccttcatgttctatagctgacaattagctgccacttttcacagccatcagtcccagaccagaccatagtacagtctactgcccaggttctgggaatttctgagctgtttaataaccaataactccaagtacagcagtaacagcaaaagaatctctcactacatgaatatatgaatatgaaattgttgcaagaagctg

SEQ ID NO: 684216 - DNA, 665 bp, Homo sapiens
agatgtaaatgtaattaaaattaaaaatctattattaaaattattttacttctttaaatatggctactagaagatgtgaagttacacatgtggcctgcattctgtttctgttgggtggtgctgctccagatccaataattcattcccaggagtggtcccactactgactttccctttccttccacaaactaacattgggctgccaaagagcagatagtaacactttcaaatattgctcctcctgggccaggcrcagtggctcacacctgtaatctcagtactttgagaggccgaggcgggcggatcacgaggtcaggagttcgagaccagcctgaccaacatggtgaaatcctgactctactgaaaatacaaaaattagccaggcgtggtagcccatgactgtaatcccagctactcatgaggctgagacagaagaatcgcttgaacccaggaggcggaggttgcagtgagcctagatcatgccactgcactccagcctgggtgacagagcaaaactccgtctcaaaaaaataaataaataaaataaaagtgaaaataaatagagggagaaatggagaaaagagaggatgggaaagagaaggaaagagacagaaagagaagagaggtacagaggaagagagcgtgcaggtcctgggaacacatga

SEQ ID NO: 684217 - DNA, 665 bp, Homo sapiens
agatgtaaatgtaattaaaattaaaaatctattattaaaattattttacttctttaaatatggctactagaagatgtgaagttacacatgtggcctgcattctgtttctgttgggtggtgctgctccagatccaataattcattcccaggagtggtcccactactgactttccctttccttccacaaactaacattgggctgccaaagagcagatagtaacactttcaaatattgctcctcctgggccaggcacagtggctcacacctgtaatcycagtactttgagaggccgaggcgggcggatcacgaggtcaggagttcgagaccagcctgaccaacatggtgaaatcctgactctactgaaaatacaaaaattagccaggcgtggtagcccatgactgtaatcccagctactcatgaggctgagacagaagaatcgcttgaacccaggaggcggaggttgcagtgagcctagatcatgccactgcactccagcctgggtgacagagcaaaactccgtctcaaaaaaataaataaataaaataaaagtgaaaataaatagagggagaaatggagaaaagagaggatgggaaagagaaggaaagagacagaaagagaagagaggtacagaggaagagagcgtgcaggtcctgggaacacatga

SEQ ID NO: 684218 - DNA, 665 bp, Homo sapiens
agatgtaaatgtaattaaaattaaaaatctattattaaaattattttacttctttaaatatggctactagaagatgtgaagttacacatgtggcctgcattctgtttctgttgggtggtgctgctccagatccaataattcattcccaggagtggtcccactactgactttccctttccttccacaaactaacattgggctgccaaagagcagatagtaacactttcaaatattgctcctcctgggccaggcacagtggctcacacctgtaatctcagtactttgagaggccgaggcgggcggatcacgaggtcaggagttcgagaccagcctgaccaacatggtgaaatcctgactctactgaaaatacaaaaattagccaggcgtggtagcccatgactgtaatcccagctactcatgaggctgagacagaagaatcgcttgaacccaggaggcggaggttgcagtgagcctagatcatgccactgcactccagcctgggtgacagagcaaaactcygtctcaaaaaaataaataaataaaataaaagtgaaaataaatagagggagaaatggagaaaagagaggatgggaaagagaaggaaagagacagaaagagaagagaggtacagaggaagagagcgtgcaggtcctgggaacacatga

SEQ ID NO: 684219 - DNA, 648 bp, Homo sapiens
ttctgagaagggattatgtctctgaaccagtgaactagtgattttttatttgtctttttgtgaaatatctttttttcatctttttattttgaaacattctgagtcattatgtttaagatatcagtcttgtatgcagcatgtatttttcaatcaattccaacaacttccaacaaattttgttttatttttgtgcctgcatcttaatgtaagtactcccatatttgggttaaatccatcatatcaatattcatttcctatatgtcaaaaatatttttatttctttcacttttcttgcgttgtttttgattcatcaattcatttttttctagctctctggtattcatttagcaatttctgaaaagataacaacaacgacattgtcttwttacaaagtctaccttatgttggcatttttaccatgtttcgggtaatgtaggaaccgtacaacattatattccttttgttcctttaatggttgctgtgctgtcattgacatgtattttatattcattccacctatagtttaacactcaccataaatttctaaatgttgttttaaaatgtcaatattaatttacacttctcacatatttacacttcctggtgatttacattctattctttattatcacatttctatttggaaca

SEQ ID NO: 684220 - DNA, 1510 bp, Homo sapiens
atttttttcataaagaaagttgaatagtctattagttgccactgagaaaaaaatatgtttattgaggttaaatagaagcagaagtccaattgcccatgtttaaggccatctgggatcttgaagatatggagacaaaaaaaagtttaatgttaaattgtgggaaggaaatattactcatgaaagtaattaatattactgaaggcaggatatttttaaagccacaataaggaaaatctgaatgtatatttatgtttttcaggatagaatccccttgcaggaagaggcggaggtawaatagaaaggaaaataatttttcagggtcaatttcaggatgttctaagaaggttaggtgattagtagtagcacagggagaggctggtcacatctcagaagaggaagggaattgaatcagttcattacttaaactaagtaactcattatttatttaacagatttttttgagcattttctttgtaagtactgtgctggaggatgaggattctgtggtaaataaaacaactgataacaaccctaattgcaaagagtttgccatctaatggggacttcagtcttctcagataattgtaaatgaggtcctagcttgagattaactggtatggggataggagccaggggagtgtagtaggaaataagcatgaagtacagaaaagattgtagagccataatgaggaacttggcaaaattaacatttgttgtcactttagtcaacacagttacatcacttctctagcaacacttagcctgtaatctgagtgggttaaggaaacagctgaggattacttggttagagactagcaaggcatccactttgtataaaacaaaatgatgagctttccagaggtagtgaatatgaagacataaattaatctgggctgagaaagagagcaagggcagctccacgagatgaacagaataagaactcgtaagatttgagagcctgaagagcgggatgaaaatgaatagcaggctcactaattttagtagaatgagaatagcgcaaggatggatgggtttggtcagaaaagaatattgtatttccagcgtttgacagtggaacatcatcaaatggtgaataaattttagagtatggtaaagcatgtggctaagaaaggaagacactgctgatgttgagaagttaagatattgtgaggtgaagctgagtattaaaagtgtaattttgaaaatgtgatttaaaaagcctgtaacaggatgacaggtgagaaggtggaacagaaaactgtaaatgtgtcaaaagtatcaagacatttttagaggtttacaatcaactaagaacaaaacagatttttttttttcatttgtgacttctaggactttagtcctttctttggaacattttgaagaaagctatagatatgtaatgtgtgtatgtatcttgcttgcatttgaaaagatttttcagttagtacagaaataagttctgtggtggatacagaaatgcaaccctttataaggaattctcttatcaaaa

SEQ ID NO: 684221 - DNA, 1510 bp, Homo sapiens
atttttttcataaagaaagttgaatagtctattagttgccactgagaaaaaaatatgtttattgaggttaaatagaagcagaagtccaattgcccatgtttaaggccatctgggatcttgaagatatggagacaaaaaaaagtttaatgttaaattgtgggaaggaaatattactcatgaaagtaattaatattactgaaggcaggatatttttaaagccacaataaggaaaatctgaatgtatatttatgtttttcaggatagaatccccttgcaggaagaggcggaggtataatagaaaggaaaataatttttcagggtcaatttcaggatgttctaagaaggttaggtgattagtagtagcacagggagaggctggtcacatctcagaagaggaagggaattgaatcagttcattacttaaactaagtaactcattatttatttaacagatttttttgagcattttctttgtaagtactgtgctggaggatgaggattctgtggtaaataaaacaactgataacaaccctaattgcaaagagtttgccatctaatggggacttcagtcttctcagataattgtaaatgaggtcctagcttgagattaactggtatggggataggagccaggggagtgtagtaggaaataagcatgaagtacagaaaagattgtagagccataatgaggaacttggcaaaattaacatttgttgtcactttagtcaacacagttacatcacttctctagcaacacttagcctgtaatctgagtgggttaaggaaacagctgaggattacttggttagagactagcaaggcatccactttgtataaaacaaaatgatgagctttccagaggtagtgaatatgaagacataaattaatctgggctgagaaagagagcaagggcagctccacgagatgaacagaataagaactcgtaagatttgagagcctgaagagcgggatgaaaatgaatagcaggctcactaattttagtagaatgagaatagcgcaaggatggatgggtttggtcagaaaagaayattgtatttccagcgtttgacagtggaacatcatcaaatggtgaataaattttagagtatggtaaagcatgtggctaagaaaggaagacactgctgatgttgagaagttaagatattgtgaggtgaagctgagtattaaaagtgtaattttgaaaatgtgatttaaaaagcctgtaacaggatgacaggtgagaaggtggaacagaaaactgtaaatgtgtcaaaagtatcaagacatttttagaggtttacaatcaactaagaacaaaacagatttttttttttcatttgtgacttctaggactttagtcctttctttggaacattttgaagaaagctatagatatgtaatgtgtgtatgtatcttgcttgcatttgaaaagatttttcagttagtacagaaataagttctgtggtggatacagaaatgcaaccctttataaggaattctcttatcaaaa

SEQ ID NO: 684222 - DNA, 2281 bp, Homo sapiens
cacatatagtgttctatagaaaaccaaaaagaagggaggggagctttcaaaaatattaggtcttcacatgggttttctattattattttaaacatgtctagctttttctatttcctctcaatgttctgcctctagaaagggagtttgaggatgggaggtgttacaggttggtgggggctcaagatataaaggctcacacccattcatctcagcactaaaaaaaaccaagtctcacctctctcatccattctcgaatcgttttgccagcttcttgatgccacacattgtgaacagagtctgtcaatgccacagcagttaccttattttttacatcggcttctcgttgaatcatctgttttaaaaaaggaaaataaaatattggctataattgtttttcctactgggtgcagcctgcttagtcagagataacaataatattatattaacaatgaaaaagcaatatgcatctctggttcaaagttactctttttttgcattgaacacacaccctattcttgtccagagatgtgaaaagacctaatatttcatttaaaaaaataccacttaagtcttagaactacgcagctctattattttccatgtggtttgacgattcgaggattaaagggatcacaggggaatccctgagggtttcttttacaagtttcttccaccacttcctatttcagtgcttcagggaagttagtacccggggttcactgttagctacttaggactaacttctactaattttcagtagatggcacatcagtaaagaaagatatcttgctttgacttttccaatttaactagcctgctcttcaccatggccttgtaattccttggtgttttaaatgcccacaaagatatttttcattcaaagcctattaattttgctttccagcatatttctttatgttggcaaacawtatattttataataacttcttcctatagaatgctatttctacaaaacaaaatagcttctaaaataacaaaaaaagatttgcttggcttggagataccgatgaattcatcagtggtctgccagataaagaaattaaaagctaaaatttctacatcaaaagaaatgaaaaaaggttttaatctactacactagtggccctaatttggtgtaataaatgtaagaaagctataaaaattgcagttaaaatatcataaatactaaccttgcatttcataataatgttcttttttttgcttcaaatgtcttttctccctctaaattcttttattgaaaaaaagaacaatttctttatcatttgctgttaatttctatgaattgtctatcaaaaatataatagtgcacttcaaaaaagagaattctgaatggcgatgaaagctcatacagagaaagaacactgcacaccatgcttatgataccaaaggatgcctgttggcgttctgaatttaaaatgtctctctcttaattttttttaagcccagcatatgtacatgctgtctcaatgaatactacctaatgggaacccaactcactgttaatgctgcctcagcaacatttctgcacctcaagtctttgtgccctgtgttttctgcttatataatataaaaatcttaaaatcaatattggttaccaacatcataatattgctgcaaaaatttatcctgcaataccaataatacttttaaaagcataaaataatactctaatttaatacttcacatgaattattaactagtatgctaccttcttctagattttattttacaaatagattatcattggatcacattggcactagcatataaaagtttaaaccaacattagatgataaaaccccaaattccacaatattgaatccaactggcttatgaagaaattatacgtccttattctcattttctaaatggtaacacttttagagatctagaccaattgttgctgaagtacaaaataagaacatgcctttctggtattctaaggatatgtttgcgttttaaaatatttgactcggattttgttgtggttgttgttaacatatgcagatgtatttaagacagcatctgaagacactaaatcttgagagccatttgtgaaatgagatacaataaagtaatgaattggtgaggagttagtgttaaagtagaaaacctggggattaaaattctacaagatggaaaaatacagagttgttagagggactactagaggaaaatatctgtagtctgtctttctggctgacgtttcatacagtggaagtgataacacgcaatttatcatcacatcacactgtcacat

SEQ ID NO: 684223 - DNA, 904 bp, Homo sapiens
ctttgcccttaacaggctatgagcaggtgattagattcctcttgaaagcaaacaaaaagacagtaatgtttgttaaatgtcttctatgtgttrtcttattcaacttcatttaccaagcaacaactgaaaagtcatcattatggtgcccactttatgcattcaaacagagaactaaatacagttatcctcccactatctcagaactagtgatggggctggtttccgacacaattagcccaccctttaaagtccattccttttccattcctcatccggtctctcacataataaataaacaagacagattaatgattaatgaatgaaataagtcaaagaagtgcaaatccaaatcatgaagggactaagatgacatttccagagcaagtctggcatgttggtgccagagcccaagtggactgaggggagtccatagggagggcagcctgtcatgaggagtccgaaaccaagccaggtaagagagacacgtgggagagacaagagcccaagtatgtcgagcaggttgcccacctggggagagaaggaaggtcctgattggggcactatagggtacattcctagaggagaggctggcagcagaaatgcgacagtttgttacacacaggggaaatgataaaatcagtaaatacattaaaggtaacagaagcaaaggcttctcactgttggagaagggagttacaaatacagaaagggagaaaactagctgaaccctgtggtgttggattggaactggaggtgttggtgtggatatatggtttgcaacataaatatggagttacagaaatacatacagacataaatatacgtatggatgtatatgcccctatgtattctctagagcttatcaactgagatggtctgggggcaagcaacactccagtagcaa

SEQ ID NO: 684224 - DNA, 904 bp, Homo sapiens
ctttgcccttaacaggctatgagcaggtgattagattcctcttgaaagcaaacaaaaagacagtaatgtttgttaaatgtcttctatgtgttatmttattcaacttcatttaccaagcaacaactgaaaagtcatcattatggtgcccactttatgcattcaaacagagaactaaatacagttatcctcccactatctcagaactagtgatggggctggtttccgacacaattagcccaccctttaaagtccattccttttccattcctcatccggtctctcacataataaataaacaagacagattaatgattaatgaatgaaataagtcaaagaagtgcaaatccaaatcatgaagggactaagatgacatttccagagcaagtctggcatgttggtgccagagcccaagtggactgaggggagtccatagggagggcagcctgtcatgaggagtccgaaaccaagccaggtaagagagacacgtgggagagacaagagcccaagtatgtcgagcaggttgcccacctggggagagaaggaaggtcctgattggggcactatagggtacattcctagaggagaggctggcagcagaaatgcgacagtttgttacacacaggggaaatgataaaatcagtaaatacattaaaggtaacagaagcaaaggcttctcactgttggagaagggagttacaaatacagaaagggagaaaactagctgaaccctgtggtgttggattggaactggaggtgttggtgtggatatatggtttgcaacataaatatggagttacagaaatacatacagacataaatatacgtatggatgtatatgcccctatgtattctctagagcttatcaactgagatggtctgggggcaagcaacactccagtagcaa

SEQ ID NO: 684225 - DNA, 586 bp, Homo sapiens
atgagccagcaaataggaaaaaagtcagacttctctcacatgattttgcctctcacctccacctgtctatctgcactttaggaagtcaaaaatttccttagtcatggaactctccagaacccagagaaagcagattaaaaacaaagccaaaaaggatctactccacctgtcagtattaagaccttaagacacctggggttggcggggccggcaaccaattaagaagtacagtaaggccaggcgtggtggctcacgcctgtaatcccagcactttgggaggccgaggtaggcrgatcacgaggtaaggagatggagaccatcctggccaacacggtgaaaccccatctctactaaaatacaaaaaacaaacattagccaggcatagtggcatgcacctgtagtcccagctacttgggaggctgaggcaggggagtcacttgaacccgagaggtggaggtttcactgagccgagattgtgccactgcacaccagcctggcgacagagcgagactccatctcaaaaaaaaaaaaagaagtacagtaggccctcacatccgtggattcaaccaaccatgggtcaaaaata

SEQ ID NO: 684226 - DNA, 583 bp, Homo sapiens
agtcttgctctgttgcccaggctggagtgcagtggcacgatctcggctcactgcaacctccacctccccagttcaagagattctcctgcctcaacctcccaagcagctgggactacaggtgcccaccaccacgcttggctaatttttgtatttttagtagagatagggtttcaccacattggccaggctggtctcgaactgctgaccttgtgatcctcctacctcggcctcccaaagttctgggattacaggcatgagcccccacgcccagcctacttttttttttttttagctctcaatacagagcctttgagctgtttctctctgcctggagctctgtccctagaacagggaacaaaaatggacaaaatctctgcattytgggagctcacattctaatatcagaaactcaggatgagatcattataatggttaaactttaaatttgaattagaagtacttgtaaccaaggcaaaaacaaagaagacacattaaggttatataattctcactgtctgatccaagtaaacatattatttaatgggaagagacaaacatttcccttgacactgatttctagaag

SEQ ID NO: 684227 - DNA, 378 bp, Homo sapiens
acactttgctgatgaagaaaataaggcactggaagtttaagtatcttacccaagattgcataggcatcagtgagtgttggactcaggccatctgcctcctgagtatttacaaaagtcccaacgtccctctctgggtatttttcgttctctctcctcccctctcctccmctcccctcccctcccctccccccttctctccttcccttccttccttccttttctttcctcctttcttttctttctgtctttctctctgtctctccccccccacctccctccctctctctttccctccctccctccctctctttcccttcctccccgcctctctctctttccctccatcccttcctctctctctctctttttttttttttt

SEQ ID NO: 684228 - DNA, 601 bp, Homo sapiens
gtgaaattcacattacatgaaattagccattttaaagtatccaattcagtgacatttagaacatggcacaatgttgtgcagccatcaccttgaaaattgcatttttaacaaatgctccactgctgcaggtggtccccagacagcgcactgagaataactatgctaagatgatgggtagaggtggcaaggaatgaatcatggatttctctcagattataacagaaatttttaaaagttagctttatcaaacatcaaaatctaaaaattatgcctttgcctttaccgatcaccaaatataatccracaccaggaagctagattgttttcatggttttctgtactaatggactcaacatttattgatttgaatgcaaccagtattcttatccttataaagaagtacagggctaagtgaagtaaagtgagagaagtgggaaaaaatgaatcactgctctgtgattagttagtccaggtccttgggttataattacattattatagcacattattaatttcaacttcaggaaatgaaattgtcaataaacacagaagtctctggagaaagaaatgcaaattaggtttctccttatattcaaaccct

SEQ ID NO: 684229 - DNA, 618 bp, Homo sapiens
aaaatgtggagataggaagagtctggggttcttttagcctgtcaaagaattagagtgccaaaaaagaagaaactgtaactaggtgggtcaggttcaatagagtagaacacttaatgcctatatgccaccaggaactctgtgaggtgtatgcatcaacctgacctcaagctgcagatttgagaaggaatcaaccaggaaacagtgaccagaggccacaagacggccacacattctgtgtgtgcagatccttcaccactatactccaaggaagagcatctagctggcaatgacttcctataaaaataaagattttagaaaagttctattcagaaaggttcaggaaaaggatgggtcctgtgaacacaagcgtagaaatgcagtacaatgggatgaaataaayggaaaagaaaatgagatgcaaaaagacaactgattaggttaattgggttttgacctcaagtagatctgggtttgaattctggctttttcagttgttagctgtgtggccttggactaatcgcttaatttctttaagcggctcacactgataatcctagcattttgggagtctgaggtgggaggatcacttgagcccaggagtttgagaccagtctgggc

SEQ ID NO: 684230 - DNA, 584 bp, Homo sapiens
ttgaaaataaaagccagagtcccagaacggcctcaatggacctaatccaaacaaataataatatcagtaatggcaaccacatattaaatgttgtctacatactagacagtatgataataatttacatattctatctcatttaatgaaaccaccctatgttacagcaattttacagatgagttaactgaggcttagaaaggttatatgtgtgacttgtccaactccacattaacygaagagcaatttcctattggaaaacccactattacgatatggatgtgtaccaatagaggctttagctttttgctttagctgaaaataagccctcatcttttagaagaggtttagtatttttaaactatattttatgagaaaaaaagtgaacaccatgccttgttagtctttgatgcaggaccaaacataagaccagtttaattcctgaaactaagaagtatgacacactgattctattttaccacttacatcaatttgcaacatttaacattagtggcataccaggtcagcttctcctttttaatgagcctttctgaaggcattctcttcatagtgctacagaattcttt

SEQ ID NO: 684231 - DNA, 642 bp, Homo sapiens
attgtgaatgggagttccctcatgatttggctctctgtttgtctactattggtgtatagggatgcttgtgatttctgcacattttgtatcctgagactttgctgaagttgcttatcagcttaaggagtttttgggctgagacgatggggttttctaatatacaatcatattattattataatacaatcatatgttttctaaatataaaatcatactatttctaaatatacaatcatattttctaaatatacaatcatacaatcaagatggagtcttgctctgtcgcccaggctagagtgcagtggcacgatctcagctcactgcaacctccacctcccaggttcaagtgattctcctacctcagcctcccaagtagctgggattacaggcatgtgccaccatgcccagttaatttttttatttttagtagagacagggtttcaccatgttggccaggctggtctcgaacccctgacttcaggtgatccacttgccttggcctcccagggtgctgggattacaggcgtcagccactgtgcccggcraaaattataatttgtatataatgacaagcaacaatagctttataaaactagaacttattggcttatttttatttttattttttgagacaggatctca

SEQ ID NO: 684232 - DNA, 665 bp, Homo sapiens
tttgaaggaagttcttggacttcctgatgattaatgaattttacctgtgaatgggtttgtatcttgtcsggacagaaaggaattctgtatttacctaactggccattatcttggtgccatttatgtgctcctcataacttttcaaaagctgtgactggtgtcagaacaaggtggagaaagactttttgagctgattcagtataggaagatccctaggaacagctctgggcatggcagtttagctctgctctatcttactgacttgctctcccttctttcctccctattttccccacttcctccttccttgcttccatccttgttaggtgactattctgttttcccagattttcttttctactttaagcccgaggtagaaaatgatccatgtatgcccagttcttttctaatttcttcatcagaaaatgacatttagactctggaatataataccttttatgttactaatcttgggctttatttgtattctaccatagtttctcattctcttccctgctaaatttgagaagggagttaagagttaagataaaataaagagggagttaacttactcaactcctaatcccgtaatcctttctctgattagtacattcagtggactggagaacctgtgccaacctcctgataccctcctgtttcttgtt

SEQ ID NO: 684233 - DNA, 665 bp, Homo sapiens
tttgaaggaagttcttggacttcctgatgattaatgaattttacctgtgaatgggtttgtatcttgtccggacagaaaggaattctgtatttacctaactggccattatcttggtgccatttatgtgctcctcataacttttcaaaagctgtgactggtgtcagaacaaggtggagaaagactttttgagctgattcagtataggargatccctaggaacagctctgggcatggcagtttagctctgctctatcttactgacttgctctcccttctttcctccctattttccccacttcctccttccttgcttccatccttgttaggtgactattctgttttcccagattttcttttctactttaagcccgaggtagaaaatgatccatgtatgcccagttcttttctaatttcttcatcagaaaatgacatttagactctggaatataataccttttatgttactaatcttgggctttatttgtattctaccatagtttctcattctcttccctgctaaatttgagaagggagttaagagttaagataaaataaagagggagttaacttactcaactcctaatcccgtaatcctttctctgattagtacattcagtggactggagaacctgtgccaacctcctgataccctcctgtttcttgtt

SEQ ID NO: 684234 - DNA, 2225 bp, Homo sapiens
gctgtgaagtaggcaattaaacttgagtccacagcccagaagaaagggctggatttggcagtcatcagtattgaggtactatttacagtcattggactgaaggggattactcaggaagagaatagactcagagagcccagagaagggccaacatttaccagttggtataggagagaaaaccaggaaggatcagtcagaagtagaaggcaattcaggaggatgttgtcactgaagactatagaagagttgtttcaagcaggtgtaagtggtttgcactctctctctcctccatatcctagacaaagcattatgtcctccatagactggctttatcgcccctcggtggcttcgtttaccatgtgccttctctatcatggcatctatcatatactattgtaatcatttgtttaacttctatgctagattgcaagctccttaaagacagggggaaacactatgttgttcaacatttgtattatttagcatggacagtagtccattggaacagcccacatacagtggtttaaatttttttaaaaagtatgattttccctcatataaaagtttaggtaaacatatgtaacaaacctgcacatcctgcacatgtaccctggaacttaaaaaatcataaaattaaaaagtttaggtaaataagtgagcccatggtgttgggactcgagatttatgctcttttgatcttgttgctctgtcatcaaaacccaacatggctgccccaactcttactctcatgtgcacattccagccattgcaaaagggaaaaggggaaggggaaggcattttcctttcttttaagaatatgggccgggcgcagtggctcatgcttgtaatcccagcactttgggaggccgagacgggtggatcacctgaggtcaggggttcaagaccagcctggccaacgtggtgaaaacccgtctctactaaaaatacaaaaaattagccaagcatggtgcaattgcctgtaatcccagctacttgggaggctgaggcaggagaatcacttgaacscagcaggtggaggttgcaatgagctgagatcgcaccactgcactctagccttggcaacaagagcgaaactccttctcaaaaaaaaaaaaagaagaagaaaaagaacatgaccagaagttgtacatatgtacatattactcgtttaaattccagtagcagaacttgctcatatgaccacatctatctgcaaggaaagctgagaaatctagtctttaactcagtatccatgtacacagataaaaattctatgactgtgaaagaagagaacagacactgggtgcaaccagcagccctgatataccattgtaactgtatcatagagcctgactgttggaatatgcttgtagagcatagagaaaggcaaggaaggataaacaccccactcttgacattaattaccttgcggggaggaaatggaaggggcatggaaggagagttataaattatttgttgactgaatggatgataataaatggataaatccaatggtgacagtagtgatgaggtgaattctttttagctccctctcccaccctccctcctcagcattggcttatgaaggaagagggactttcactagaccaaaaagatgagttatgtaaacagaaggaaagaaggctaatttatttaaatcttttattctgatatcttttttgcttaattctcttgagttttctaggtgggtgatcatattaaactacaaacaatgatactttagtctcctttccaatatttatatctatatttaaaatcttactatgttgacaaaataatagtaaatattggtgatgatcaacaattgttccttttcttactactttctttactacaaatatctctattgctttgccactgagtatgaggctggctattgttttgacatagctatttttcactaggttaatcaagaatctttctatatatggtttaatacaatctttaaaaattaataatacatatttgaatatcatttccttcatgtactctctaagatttttttttcttgttcattcccaatccagttccacattatgtggtgtttattgtctactatttatgtacttaaatggcaataaatctactttagtgaggcagagagttaggccctggatatagaagtataaaatcaggtcccttccatcaagaggcttgtgatttactaacagggacatgtctacaaatagatcagttataattaa

SEQ ID NO: 684235 - DNA, 2225 bp, Homo sapiens
gctgtgaagtaggcaattaaacttgagtccacagcccagaagaaagggctggatttggcagtcatcagtattgaggtactatttacagtcattggactgaaggggattactcaggaagagaatagactcagagagcccagagaagggccaacatttaccagttggtataggagagaaaaccaggaaggatcagtcagaagtagaaggcaattcaggaggatgttgtcactgaagactatagaagagttgtttcaagcaggtgtaagtggtttgcactctctctctcctccatatcctagacaaagcattatgtcctccatagactggctttatcgcccctcggtggcttcgtttaccatgtgccttctctatcatggcatctatcatatactattgtaatcatttgtttaacttctatgctagattgcaagctccttaaagacagggggaaacactatgttgttcaacatttgtattatttagcatggacagtagtccattggaacagcccacatacagtggtttaaatttttttaaaaagtatgattttccctcatataaaagtttaggtaaacatatgtaacaaacctgcacatcctgcacatgtaccctggaacttaaaaaatcataaaattaaaaagtttaggtaaataagtgagcccatggtgttgggactcgagatttatgctcttttgatcttgttgctctgtcatcaaaacccaacatggctgccccaactcttactctcatgtgcacattccagccattgcaaaagggaaaaggggaaggggaaggcattttcctttcttttaagaatatgggccgggcgcagtggctcatgcttgtaatcccagcactttgggaggccgagacgggtggatcacctgaggtcaggggttcaagaccagcctggccaacgtggtgaaaacccgtctctactaaaaatacaaaaaattagccaagcatggtgcaattgcctgtaatcccagctacttgggaggctgaggcaggagaatcacttgaacgcagcaggtggaggttgcaatgagctgagatcgcaccactgcactctagccttggcaacaagagcgaaactccttctcaaaaaaaaaaaaagaagaagaaaaagaacatgaccagaagttgtacatatgtacatattactcgtttaaattccagtagcagaacttgctcatatgaccacatctatctgcaaggaaagctgagaaatctagtctttaactcagtatccatgtacacagataaaaattctatgactgtgaaagaagagaacagacactgggtgcaaccagcagccctgatataccattgtaactgtatcatagagcctgactgttggaatatgcttgtagagcatagagaaaggcaaggaaggataaacaccccactcttgacattaattaccttgsggggaggaaatggaaggggcatggaaggagagttataaattatttgttgactgaatggatgataataaatggataaatccaatggtgacagtagtgatgaggtgaattctttttagctccctctcccaccctccctcctcagcattggcttatgaaggaagagggactttcactagaccaaaaagatgagttatgtaaacagaaggaaagaaggctaatttatttaaatcttttattctgatatcttttttgcttaattctcttgagttttctaggtgggtgatcatattaaactacaaacaatgatactttagtctcctttccaatatttatatctatatttaaaatcttactatgttgacaaaataatagtaaatattggtgatgatcaacaattgttccttttcttactactttctttactacaaatatctctattgctttgccactgagtatgaggctggctattgttttgacatagctatttttcactaggttaatcaagaatctttctatatatggtttaatacaatctttaaaaattaataatacatatttgaatatcatttccttcatgtactctctaagatttttttttcttgttcattcccaatccagttccacattatgtggtgtttattgtctactatttatgtacttaaatggcaataaatctactttagtgaggcagagagttaggccctggatatagaagtataaaatcaggtcccttccatcaagaggcttgtgatttactaacagggacatgtctacaaatagatcagttataattaa

SEQ ID NO: 684236 - DNA, 641 bp, Homo sapiens
aggtttaaagctctgtgccgctatcattttaagccttctctggccatgttccaccaccatccctggcaccccaacccaaaattcaagaatctttttcttttttataaggaatgtatgtttatgttatcattcctattaggatttaggttcttcaggaacattttgtcttattcaccattgtttaccctccaataaacatctgttgaataacgaatcaatggatggatggatagatggccagatagatggggaggccattaggacaatcctccaggtaagtataaattttgctctgacttggcacttgcttaactataaatcaaggctcaacatgccattttctctccattcctgcwtttttctggttttaatcacacagttgctgaatcatcaaatgctacagcagaaacatatccaaactggtaaaattctcagtaactatttttgatcttgaagccagttagaaacatactattaagggaaaagtgataacttgttaatattatggtttgatgaaggggaaatattgaacagagttttctaatatatttaactggtttataatttgcagagtaaaacttcaacaagtgcatgcccttgaaatccattaatctctctgtattgttttatgtctgaatcag

SEQ ID NO: 684237 - DNA, 2561 bp, Homo sapiens
caagcttgaaaaataactaatttagcttgagttctgagaaaagtctcatccaaatcattattcaaaaagctatttattctgctctcacttataccgttcaaagttattttgaaatgtaactttttgaataattttcgttatttgtaaagagctctgacttctttgaaataaagaatctgtgaaaaagtgaataaaagaaaatttaaaagttcacaagtgcttaataaggcaaaatcttttcaaagagcatatcaaattattttatttaaattgtcattttcaactaaaaagtaatgtgggttttatcattaatgaatgccactactttcgaccaatataatagtcaaagaagaaaatatttgagaatacttaaaaggtataccaaatcaatattagtagaaaaatgaagtacttttgtttattttactagtacgaatatgaagcactaatcaaaatcctttcaagaaaaattaagcatgacaattttcagccacagttatatttatttttcaattttgcctgtagtattttgccttttacattacacccttaagatttctaaaaccctggcttatgtacgagtatgaagagtacacaacccattaaattaagggctctcgacatactcatctacaaatcaaacaaatctaatgtcctcagttgatcaactttcattagtacactgttccctctgaaatcatgaacatcgtgaggacgaggaccaccaagtggtgatgaacttgactactttagacagaagtaggaaagtgtagcagaagaggtggtgaatgttgggcaaatctaccagaaactttactgattgtcatgttaattaattagccctgggcgcattttctttagaatgaagcaaatatttagcactacttcacaaattcatccagtgatacctaaaactttagtagctgacattttaggtaatggatggattactcttacatgaacctagcaaaaatatcctcttaggggcaggtatagaactacaaacttgcttctcttcaataattttctaagccccacgtgctccagcatactataacgattcagtgmactttgtcttagctatgttttacttaataaaatttggttatcttagcaaagtcaagaaaagaaagctcctaattgtcctaagcagctacttgtcaatgaagcaaattttccaattgctctgtttttaatttgtactgaccttctgatcaaatacaggattctagaggcagtcatatgtttggagtaagtccctccgaggttctgatcatctacagggcatgaggatctttgttttgagtcattcaccagtggtttctaagaaggaaagctccttgaagtgcctcttttccaaaagcaatgaaatgtaggtagaatttatgtgacttattgcatttaaaatacaaaatataatgaaaataagctttttttctacacttaatagaaaagttcttgttcagaatgaattcatatgaggaaaacattttctcaaacaaaacttctttttccattttatgaaagagaattttaaagaatgctagtaaaatccaaactgatccattaaataaggggaaagtatcagtttctgggtaaaagtcttctcaaaacccaattttcaaaggtatttgttttcccatgacagtgacaactttaaaaaagaaaaaataatttaaaaatttcttcacacaagtattcccttgttgaaataaacactacagattttatggcaaattgtgaactcacaactcaaagaacatatttgctgaccttcttttaaaaaattaattacttagatttttcagttacttaccttgcactttatgaaagaataagcaagtttctccatagacacttttactagaatattttgaatcaaaatcactcttgatttttaactcttcacagtttatagtattacagcattgattctcttttctacaaatgttatttatttgtgatgaactctctcctttgttatttcttggcaattaataatgaggaaagaccacaattcttagggtgcactgaaacattgaagtttcataatttataacaagacaatagtcatttcatagttaattttgatgctttgttgtttgtttccctgagatactaaatcatccaataatacccaaagggtccctttaaagacaaaaatacatgctaaattattaaatcttctaagaatgtctatctccagtctttttctaaattgccaccatcccgaaaatatggtctctgaaagcttatagatttcccaagtcttccttcttggatattgattttctcaatattggattgaaactagaatcaaccagatgttggtttctagtcttcattctggatgtgtggttatattttcatgtactactcagttttcccaacatttctttgtaatttctacattttggttcacatttgggaaggcctggattggtggctcaactttgctgctactgctaggagtcataaaaatcaatgtggttaaaattcctgctagtcaaaggaaactggagaggggttcagaaattaagtcaaattataagaaaacaatt

SEQ ID NO: 684238 - DNA, 2596 bp, Homo sapiens
tagtatgtggaactcacctactgaattactgagaggacagagggttgcgttatgagggaatctgaggaatacagatatcacttcacatttcgtcagaatttcacagtttaacatatattttatttcatttgtgcctcataggagctgtgtgaaataaagagaattgtcttctttttttttttttttttgtcaaagaagtcaaatgacatctcaatccacaaatccagtggtaaggcaaggttccctaaagaagataaacttgctaaaaatactaccctcctttgtttatttttcagaaatttaaattgctactcttcattgagaaaattagagcaaatgatgagattttttaaatctgctactgtgagtacgtgtatgatatttgatgaagttagcttgctgaaggcatcatagatcaaatccctaaaacaagaaacattttgtggccttacatgtgtaggattggagggtgtatgcatacactttcagtatattctagaaatcagtgagctacagtgtgatgtcatacagatatatttggccactgaccaaaaataaaagcatgctatagaagcattcgtcttgaaacaatatacttgccaaactgtctttacattggaataagccaatatttttatattttatatgtgcaggcaatcaataaaaaattgctaaggaacagagtctctattcacagtcctctgcatggggcacggcccagtacacattaagttgacctactgcatgatgtccagtcagtattaaaagggcttaacgattaaaaaaaaatcagatgtttaacatgtaaaagataattaattggtacattcaaagtctctcattcttttttgggatcatcctctgtgcttgatttttacccaatatttcagagccatttctgccagtgatgaaaaactggagatgaggttgcttagacacagcaaatcctgtatagccaaagggaagctgaaggtcaaagagtgaattagattgatgtcttgttcttgttgaaaacagaatttatttgttttgctgacagagaaggaaaatataaacagtcaagaacgggaagacatattattttgctataaaatgaattcaagaggaaataacagatataaggaaaaacacagtgaatattattataggaataattcattagaatagagagacaatgaacttaaacacttgctaattctcctgctgaaatggatcaagtgattgcttcgactggagaaaaatcctaaactaacctaaatataaatgagtgctagaggacaggcagaatcacatcatgacacagacttaaaggcagagccagaagtacaataaagttaagacctgagctctccatataaaacaaaccttgtgtaacaagtgaaccacccaggtatgtctttaaatttatttttgaaacattagtttctgtccttaattattttctaataaaaataaaatcatttgataaaagaaatacaataataatatccaacgtgaataaagtctgaagactcagagggaaaatatttttttcaataactgtaatcatcgtatttctccaaaaatctcatttgcaaataatattgtgaaaaaaacaattttcgtgatataactcacaaggcagaagtctgatataaaacataaaatgtccttttgtttttcgttttgcatttatttcttatttcatcctgataaaaatgaatgcatgcagttttcaatatgagcaaataagtttttttccatatatcctttaaaactgtcttattcacttcgaatcttataaaatatattcatttaaattatatttatagaaaatcttcttgagaaattatgaaacttctaaatttgaggagatagtgacctaaattactttaaaggtaatcttgatcataatagaatgctgcagaagggctcaaagtttcacttttagaaagtaataaattgcatggcatttaacaggcctactctaaataagccacagccttgaaaagaaaattgctttagacactggtcctcttgccartgtactgatttctattattagccaacatcttctaccggcccctgtctggggtcaccttaggtctagctgaagctgtatcctcagggccctgaatggattcagaatcagcatgcaacatgcttgtggtggcagtataaaacagtctacgtgagagaatggtccatgagagcaaaatcaatgtaaggataaatgaatgtagatgggatcaccaatcccaaatatgttacaagaagagagtgaacaaagtgacacggagactaagagaagataagaaaagaagtagaaagcaaacatagggtgagtattatggaatagttcttgagtaaaattcagtaactataaaattataattactatggctctatctgttaatgtagtgggctatttaataagccaaagcagcaaaaactagggcattactatggattagttctctgtgtgtttcctgaaacctagagaagattgtaggatataaactcaattgtgtcctagaaactcattttctatgttccagtcttgtaaattctacaaggttctagaaatctgtagtctaagaggcaataaacctaatta

SEQ ID NO: 684239 - DNA, 2596 bp, Homo sapiens
tagtatgtggaactcacctactgaattactgagaggacagagggttgcgttatgagggaatctgaggaatacagatatcacttcacatttcgtcagaatttcacagtttaacatatattttatttcatttgtgcctcataggagctgtgtgaaataaagagaattgtcttctttttttttttttttttgtcaaagaagtcaaatgacatctcaatccacaaatccagtggtaaggcaaggttccctaaagaagataaacttgctaaaaatactaccctcctttgtttatttttcagaaatttaaattgctactcttcattgagaaaattagagcaaatgatgagattttttaaatctgctactgtgagtacgtgtatgatatttgatgaagttagcttgctgaaggcatcatagatcaaatccctaaaacaagaaacattttgtggccttacatgtgtaggattggagggtgtatgcatacactttcagtatattctagaaatcagtgagctacagtgtgatgtcatacagatatatttggccactgaccaaaaataaaagcatgctatagaagcattcgtcttgaaacaatatacttgccaaactgtctttacattggaataagccaatatttttatattttatatgtgcaggcaatcaataaaaaattgctaaggaacagagtctctattcacagtcctctgcatggggcacggcccagtacacattaagttgacctactgcatgatgtccagtcagtattaaaagggcttaacgattaaaaaaaaatcagatgtttaacatgtaaaagataattaattggtacattcaaagtctctcattcttttttgggatcatcctctgtgcttgatttttacccaatatttcagagccatttctgccagtgatgaaaaactggagatgaggttgcttagacacagcaaatcctgtatagccaaagggaagctgaaggtcaaagagtgaattagattgatgtcttgttcttgttgaaaacagaatttatttgttttgctgacagagaaggaaaatataaacagtcaagaacgggaagacatattattttgctataaaatgaattcaagaggaaataacagatataaggaaaaacacagtgaatattattataggaataattcattagaatagagagacaatgaacttaaacacttgctaattctcctgctgaaatggatcaagtgattgcttcgactggagaaaaatcctaaactaacctaaatataaatgagtgctagaggacaggcagaatcacatcatgacacagacttaaaggcagagccagaagtacaataaagttaagacctgagctctccatataaaacaaaccttgtgtaacaagtgaaccacccaggtatgtctttaaatttatttttgaaacattagtttctgtccttaattattttctaataaaaataaaatcatttgataaaagaaatacaataataatatccaacgtgaataaagtctgaagactcagagggaaaatatttttttcaataactgtaatcatcgtatttctccaaaaatctcatttgcaaataatattgtgaaaaaaacaattttcgtgatataactcacaaggcagaagtctgatataaaacataaaatgtccttttgtttttcgttttgcatttatttcttatttcatcctgataaaaatgaatgcatgcagttttcaatatgagcaaataagtttttttccatatatcctttaaaactgtcttattcacttcgaatcttataaaatatattcatttaaattatatttatagaaaatcttcttgagaaattatgaaacttctaaatttgaggagatagtgacctaaattactttaaaggtaatcttgatcataatagaatgctgcagaagggctcaaagtttcacttttagaaagtaataaattgcatggcatttaacaggcctactctaaataagccacagccttgaaaagaaaattgctttagacactggtcctcttgccaatgtactgatttctattattagccaacatcttctacyggcccctgtctggggtcaccttaggtctagctgaagctgtatcctcagggccctgaatggattcagaatcagcatgcaacatgcttgtggtggcagtataaaacagtctacgtgagagaatggtccatgagagcaaaatcaatgtaaggataaatgaatgtagatgggatcaccaatcccaaatatgttacaagaagagagtgaacaaagtgacacggagactaagagaagataagaaaagaagtagaaagcaaacatagggtgagtattatggaatagttcttgagtaaaattcagtaactataaaattataattactatggctctatctgttaatgtagtgggctatttaataagccaaagcagcaaaaactagggcattactatggattagttctctgtgtgtttcctgaaacctagagaagattgtaggatataaactcaattgtgtcctagaaactcattttctatgttccagtcttgtaaattctacaaggttctagaaatctgtagtctaagaggcaataaacctaatta

SEQ ID NO: 684240 - DNA, 2596 bp, Homo sapiens
tagtatgtggaactcacctactgaattactgagaggacagagggttgcgttatgagggaatctgaggaatacagatatcacttcacatttcgtcagaatttcacagtttaacatatattttatttcatttgtgcctcataggagctgtgtgaaataaagagaattgtcttctttttttttttttttttgtcaaagaagtcaaatgacatctcaatccacaaatccagtggtaaggcaaggttccctaaagaagataaacttgctaaaaatactaccctcctttgtttatttttcagaaatttaaattgctactcttcattgagaaaattagagcaaatgatgagattttttaaatctgctactgtgagtacgtgtatgatatttgatgaagttagcttgctgaaggcatcatagatcaaatccctaaaacaagaaacattttgtggccttacatgtgtaggattggagggtgtatgcatacactttcagtatattctagaaatcagtgagctacagtgtgatgtcatacagatatatttggccactgaccaaaaataaaagcatgctatagaagcattcgtcttgaaacaatatacttgccaaactgtctttacattggaataagccaatatttttatattttatatgtgcaggcaatcaataaaaaattgctaaggaacagagtctctattcacagtcctctgcatggggcacggcccagtacacattaagttgacctactgcatgatgtccagtcagtattaaaagggcttaacgattaaaaaaaaatcagatgtttaacatgtaaaagataattaattggtacattcaaagtctctcattcttttttgggatcatcctctgtgcttgatttttacccaatatttcagagccatttctgccagtgatgaaaaactggagatgaggttgcttagacacagcaaatcctgtatagccaaagggaagctgaaggtcaaagagtgaattagattgatgtcttgttcttgttgaaaacagaatttatttgttttgctgacagagaaggaaaatataaacagtcaagaacgggaagacatattattttgctataaaatgaattcaagaggaaataacagatataaggaaaaacacagtgaatattattataggaataattcattagaatagagagacaatgaacttaaacacttgctaattctcctgctgaaatggatcaagtgattgcttcgactggagaaaaatcctaaactaacctaaatataaatgagtgctagaggacaggcagaatcacatcatgacacagacttaaaggcagagccagaagtacaataaagttaagacctgagctctccatataaaacaaaccttgtgtaacaagtgaaccacccaggtatgtctttaaatttatttttgaaacattagtttctgtccttaattattttctaataaaaataaaatcatttgataaaagaaatacaataataatatccaacgtgaataaagtctgaagactcagagggaaaatatttttttcaataactgtaatcatcgtatttctccaaaaatctcatttgcaaataatattgtgaaaaaaacaattttcgtgatataactcacaaggcagaagtctgatataaaacataaaatgtccttttgtttttcgttttgcatttatttcttatttcatcctgataaaaatgaatgcatgcagttttcaatatgagcaaataagtttttttccatatatcctttaaaactgtcttattcacttcgaatcttataaaatatattcatttaaattatatttatagaaaatcttcttgagaaattatgaaacttctaaatttgaggagatagtgacctaaattactttaaaggtaatcttgatcataatagaatgctgcagaagggctcaaagtttcacttttagaaagtaataaattgcatggcatttaacaggcctactctaaataagccacagccttgaaaagaaaattgctttagacactggtcctcttgccaatgtactgatttctattattagccaacatcttctaccggcccctgtctggggtcaccttaggtctagctgaagctgtatcctcagggccctgaatggattcagaatcagcatgcaacatgcttgtggtggcagtataaaacagtctacgtgagagaatggtccatgagagcaaaatcaakgtaaggataaatgaatgtagatgggatcaccaatcccaaatatgttacaagaagagagtgaacaaagtgacacggagactaagagaagataagaaaagaagtagaaagcaaacatagggtgagtattatggaatagttcttgagtaaaattcagtaactataaaattataattactatggctctatctgttaatgtagtgggctatttaataagccaaagcagcaaaaactagggcattactatggattagttctctgtgtgtttcctgaaacctagagaagattgtaggatataaactcaattgtgtcctagaaactcattttctatgttccagtcttgtaaattctacaaggttctagaaatctgtagtctaagaggcaataaacctaatta

SEQ ID NO: 684241 - DNA, 2596 bp, Homo sapiens
tagtatgtggaactcacctactgaattactgagaggacagagggttgcgttatgagggaatctgaggaatacagatatcacttcacatttcgtcagaatttcacagtttaacatatattttatttcatttgtgcctcataggagctgtgtgaaataaagagaattgtcttctttttttttttttttttgtcaaagaagtcaaatgacatctcaatccacaaatccagtggtaaggcaaggttccctaaagaagataaacttgctaaaaatactaccctcctttgtttatttttcagaaatttaaattgctactcttcattgagaaaattagagcaaatgatgagattttttaaatctgctactgtgagtacgtgtatgatatttgatgaagttagcttgctgaaggcatcatagatcaaatccctaaaacaagaaacattttgtggccttacatgtgtaggattggagggtgtatgcatacactttcagtatattctagaaatcagtgagctacagtgtgatgtcatacagatatatttggccactgaccaaaaataaaagcatgctatagaagcattcgtcttgaaacaatatacttgccaaactgtctttacattggaataagccaatatttttatattttatatgtgcaggcaatcaataaaaaattgctaaggaacagagtctctattcacagtcctctgcatggggcacggcccagtacacattaagttgacctactgcatgatgtccagtcagtattaaaagggcttaacgattaaaaaaaaatcagatgtttaacatgtaaaagataattaattggtacattcaaagtctctcattcttttttgggatcatcctctgtgcttgatttttacccaatatttcagagccatttctgccagtgatgaaaaactggagatgaggttgcttagacacagcaaatcctgtatagccaaagggaagctgaaggtcaaagagtgaattagattgatgtcttgttcttgttgaaaacagaatttatttgttttgctgacagagaaggaaaatataaacagtcaagaacgggaagacatattattttgctataaaatgaattcaagaggaaataacagatataaggaaaaacacagtgaatattattataggaataattcattagaatagagagacaatgaacttaaacacttgctaattctcctgctgaaatggatcaagtgattgcttcgactggagaaaaatcctaaactaacctaaatataaatgagtgctagaggacaggcagaatcacatcatgacacagacttaaaggcagagccagaagtacaataaagttaagacctgagctctccatataaaacaaaccttgtgtaacaagtgaaccacccaggtatgtctttaaatttatttttgaaacattagtttctgtccttaattattttctaataaaaataaaatcatttgataaaagaaatacaataataatatccaacgtgaataaagtctgaagactcagagggaaaatatttttttcaataactgtaatcatcgtatttctccaaaaatctcatttgcaaataatattgtgaaaaaaacaattttcgtgatataactcacaaggcagaagtctgatataaaacataaaatgtccttttgtttttcgttttgcatttatttcttatttcatcctgataaaaatgaatgcatgcagttttcaatatgagcaaataagtttttttccatatatcctttaaaactgtcttattcacttcgaatcttataaaatatattcatttaaattatatttatagaaaatcttcttgagaaattatgaaacttctaaatttgaggagatagtgacctaaattactttaaaggtaatcttgatcataatagaatgctgcagaagggctcaaagtttcacttttagaaagtaataaattgcatggcatttaacaggcctactctaaataagccacagccttgaaaagaaaattgctttagacactggtcctcttgccaatgtactgatttctattattagccaacatcttctaccggcccctgtctggggtcaccttaggtctagctgaagctgtatcctcagggccctgaatggattcagaatcagcatgcaacatgcttgtggtggcagtataaaacagtctacgtgagagaatggtccatgagagcaaaatcaatgtaaggataaatgaatgtagatgggatcaccaatcccaaatrtgttacaagaagagagtgaacaaagtgacacggagactaagagaagataagaaaagaagtagaaagcaaacatagggtgagtattatggaatagttcttgagtaaaattcagtaactataaaattataattactatggctctatctgttaatgtagtgggctatttaataagccaaagcagcaaaaactagggcattactatggattagttctctgtgtgtttcctgaaacctagagaagattgtaggatataaactcaattgtgtcctagaaactcattttctatgttccagtcttgtaaattctacaaggttctagaaatctgtagtctaagaggcaataaacctaatta

SEQ ID NO: 684242 - DNA, 597 bp, Homo sapiens
gtctactccctcatatttcactattaagatgatggtaaattagcagtccaagagatcatggtcctgaaagtacagagaaaaaaatagaacccagtgacccaacataactaaggagcatatttgagacattgtcattcttggtatttctgaagaagcactgggatggaagggagttgagatcattttgtcagcyacagcactaaattttggtcatgaatatcaaagtgattccatctttatgaggagcctgtggagaatggcaacatgctatatgtatacattttagaatggattaattgccatctgcgtaccttttatcaggttattctatttgttcagcatgccccaagatctcttttgtactttacaaatctgcacttcaattcttcttagttcgagactcacttcaacctaccgcatccttagttttctgcacttacttgttgtttctaaaaaagtatacatgatattatacaataaacatctagaattatacatttatgtactatattcacagaaattggacttgcctttaagccctcctttttacatatattcctgttattgtctcactgctaagtaatattactggatggc

SEQ ID NO: 684243 - DNA, 597 bp, Homo sapiens
gtctactccctcatatttcactattaagatgatggtaaattagcagtccaagagatcatggtcctgaaagtacagagaaaaaaatagaacccagtgacccaacataactaaggagcatatttgagacattgtcattcttggtatttctgaagaagcactgggatggaagggagttgagatcattttgtcagctacagcactaaattttggtcatgaatatcaaagtgattccatctttatgaggagcctgtgsagaatggcaacatgctatatgtatacattttagaatggattaattgccatctgcgtaccttttatcaggttattctatttgttcagcatgccccaagatctcttttgtactttacaaatctgcacttcaattcttcttagttcgagactcacttcaacctaccgcatccttagttttctgcacttacttgttgtttctaaaaaagtatacatgatattatacaataaacatctagaattatacatttatgtactatattcacagaaattggacttgcctttaagccctcctttttacatatattcctgttattgtctcactgctaagtaatattactggatggc

SEQ ID NO: 684244 - DNA, 597 bp, Homo sapiens
gtctactccctcatatttcactattaagatgatggtaaattagcagtccaagagatcatggtcctgaaagtacagagaaaaaaatagaacccagtgacccaacataactaaggagcatatttgagacattgtcattcttggtatttctgaagaagcactgggatggaagggagttgagatcattttgtcagctacagcactaaattttggtcatgaatatcaaagtgattccatctttatgaggagcctgtggagaatggcaacatgctatatgtatacattttagaatggattaattgccatctgcgtaccttttatcaggttattctatttgttcagcatgccccaagatctcttttgtactttacaaatctgcacttcaattcttcttagttcgagactcacttcaacctacygcatccttagttttctgcacttacttgttgtttctaaaaaagtatacatgatattatacaataaacatctagaattatacatttatgtactatattcacagaaattggacttgcctttaagccctcctttttacatatattcctgttattgtctcactgctaagtaatattactggatggc

SEQ ID NO: 684245 - DNA, 597 bp, Homo sapiens
gtctactccctcatatttcactattaagatgatggtaaattagcagtccaagagatcatggtcctgaaagtacagagaaaaaaatagaacccagtgacccaacataactaaggagcatatttgagacattgtcattcttggtatttctgaagaagcactgggatggaagggagttgagatcattttgtcagctacagcactaaattttggtcatgaatatcaaagtgattccatctttatgaggagcctgtggagaatggcaacatgctatatgtatacattttagaatggattaattgccatctgcgtaccttttatcaggttattctatttgttcagcatgccccaagatctcttttgtactttacaaatctgcacttcaattcttcttagttcgagactcacttcaacctaccgcatccttagttttctgcacttacttgttrtttctaaaaaagtatacatgatattatacaataaacatctagaattatacatttatgtactatattcacagaaattggacttgcctttaagccctcctttttacatatattcctgttattgtctcactgctaagtaatattactggatggc

SEQ ID NO: 684246 - DNA, 597 bp, Homo sapiens
gtctactccctcatatttcactattaagatgatggtaaattagcagtccaagagatcatggtcctgaaagtacagagaaaaaaatagaacccagtgacccaacataactaaggagcatatttgagacattgtcattcttggtatttctgaagaagcactgggatggaagggagttgagatcattttgtcagctacagcactaaattttggtcatgaatatcaaagtgattccatctttatgaggagcctgtggagaatggcaacatgctatatgtatacattttagaatggattaattgccatctgcgtaccttttatcaggttattctatttgttcagcatgccccaagatctcttttgtactttacaaatctgcacttcaattcttcttagttcgagactcacttcaacctaccgcatccttagttttctgcacttacttgttgtttctaaaaaagtatacatkatattatacaataaacatctagaattatacatttatgtactatattcacagaaattggacttgcctttaagccctcctttttacatatattcctgttattgtctcactgctaagtaatattactggatggc

SEQ ID NO: 684247 - DNA, 597 bp, Homo sapiens
gtctactccctcatatttcactattaagatgatggtaaattagcagtccaagagatcatggtcctgaaagtacagagaaaaaaatagaacccagtgacccaacataactaaggagcatatttgagacattgtcattcttggtatttctgaagaagcactgggatggaagggagttgagatcattttgtcagctacagcactaaattttggtcatgaatatcaaagtgattccatctttatgaggagcctgtggagaatggcaacatgctatatgtatacattttagaatggattaattgccatctgcgtaccttttatcaggttattctatttgttcagcatgccccaagatctcttttgtactttacaaatctgcacttcaattcttcttagttcgagactcacttcaacctaccgcatccttagttttctgcacttacttgttgtttctaaaaaagtatacatgatattatacaataaacatctagaattatacatttatgtactatattcacagaaattggacttgcctttaagccctcctttttacatatattcctgttattgtctcrctgctaagtaatattactggatggc

SEQ ID NO: 684248 - DNA, 646 bp, Homo sapiens
ggccctttattgttggtcttctttctttcattgctacatgttagaataaatggtgtaagagaatgcttttatctattcaatttctttctctttggctcctgacccactgtctttgtttcagaataattatcagtgcctatatattaccttcacatatgaggcctttgttcgtttcattctttccatctcaattttctgtacattcgtattctctaaagtcttcatctctgtcaattgttcccttatctccctcaagtggacactgtcggcttttcgtagatgttcctactcaaaagagatcttgcaagccagtattttacattaagtaattgttctatttctcgacttttgctggcctataaatataacacatataaaggtagccattgcaggcacagtaaattatttgtctatgaaatcacaatgtttgccccagtatcttaatacaactctcaaatttatataattttttaatttaaaaatttaaaaataactttgcttaaacaaaggcagtttgttttctaacttatctatgtgtgtatgtatatatacacagaaatgtatatgtatacacacatatatattcataarttattgaaagtttcatgcaaattttttactttgccaatatgccccaaaacttgat

SEQ ID NO: 684249 - DNA, 434 bp, Homo sapiens
tttgtatgtttttctcmgcttagtctgtctaattaatttaattctcatacccagccagggaccctaagagggtagaggtaaacttttgcctcccctacactcgcagttagcagattggctagggctggggctgcactggatggcctcatttatatgttttatatttgctggttttggctgagacaatggaggccacatcattcctcaccccagggattcacctagccttgacttgttcacatggcagatcaattcaaacagcactgagagtgcaggccccgagattcacaaacttttagcttagcctgtgtgaaagaggctaatttcctatttgccaaagcaaatgacaaggccttcttgtaaggccttgtaaggagtaatgaactctctatattttgataaaatgagctaaaaagactcataataaaaatttg

SEQ ID NO: 684250 - DNA, 434 bp, Homo sapiens
tttgtatgtttttctcakcttagtctgtctaattaatttaattctcatacccagccagggaccctaagagggtagaggtaaacttttgcctcccctacactcgcagttagcagattggctagggctggggctgcactggatggcctcatttatatgttttatatttgctggttttggctgagacaatggaggccacatcattcctcaccccagggattcacctagccttgacttgttcacatggcagatcaattcaaacagcactgagagtgcaggccccgagattcacaaacttttagcttagcctgtgtgaaagaggctaatttcctatttgccaaagcaaatgacaaggccttcttgtaaggccttgtaaggagtaatgaactctctatattttgataaaatgagctaaaaagactcataataaaaatttg

SEQ ID NO: 684251 - DNA, 434 bp, Homo sapiens
tttgtatgtttttctcagcttagtctgtctaattaatttaattctcatacccagccagggaccctaagagggtagaggtaaacttttgcctcccctacactcgcagttagcagattggctagggctggggctgcactggatggcctcatttatatgttttatatttgctggttttggctgagacaatggaggccacatcattcctcaccccagggattcacctagccttgacttgttcacatggcagatcaattcaaacagcaytgagagtgcaggccccgagattcacaaacttttagcttagcctgtgtgaaagaggctaatttcctatttgccaaagcaaatgacaaggccttcttgtaaggccttgtaaggagtaatgaactctctatattttgataaaatgagctaaaaagactcataataaaaatttg

SEQ ID NO: 684252 - DNA, 434 bp, Homo sapiens
tttgtatgtttttctcagcttagtctgtctaattaatttaattctcatacccagccagggaccctaagagggtagaggtaaacttttgcctcccctacactcgcagttagcagattggctagggctggggctgcactggatggcctcatttatatgttttatatttgctggttttggctgagacaatggaggccacatcattcctcaccccagggattcacctagccttgacttgttcacatggcagatcaattcaaacagcactgagagtgcaggccccgagattcacaaacttttagcttagcctgtgtgaaagaggctaatttcctatttgccaaagcaaatgacaaggccttcttgtaaggccttrtaaggagtaatgaactctctatattttgataaaatgagctaaaaagactcataataaaaatttg

SEQ ID NO: 684253 - DNA, 604 bp, Homo sapiens
tatataggagaacctaccctagtatactggttagggasagcttctctatgaagttacattaagccagggtttcttgaccctcagcactactggcattgtaagctatattattctttgctgtgatgggtgggagtggtcttgtgctttgtggaatgtttagcagcatccctggcctcaaactagtttccagtaacatcccttctcacaatatgacaactgaaatttctcagtatgtcccagggcatggttgttaggtttagcaaataaacataaagaacacaatgaaatctgaatttcagataaacaacaattttttgtataaatatgtcccacatatttcataagatataatgatgcttaaaaatttatttgtgcttatctgacattcaaattttactagatgttgtgtattttacctgacagtcctatctagggaatgagattgtccccagttgagaaccactgcattaagcacatgttgataagacctgagaccttcagtcttcacataccattgatctcctaaacacctctgaattttatgtcatctctactttatcaagtcaaattaccacgaagttcaccaactcaaagcataaaaatc

SEQ ID NO: 684254 - DNA, 615 bp, Homo sapiens
tggggctcttcgactaaaaatcaagtccattcttgattttatttgaaagcattgtactttcattrtagtgatatatttttatgtttcagccaattctcctgtgttcacagttgattatattgtggttcatttaggctcttcaatgctttctactcttgtctacttcgaaccattttgctaccaataaactgctttaaaagtatctatcagagcctgtgcaggctgagagaggagagcaaagaaatcaataatgtttgcaattaatcagcagctctgatgggagaaggtattgaaaatattattatagctaagaaattttcaaaaattgtcatgtattaaaattattttggccttctgttaccctggtcattatgaaatgacaatgtcatacttcatactttcttgatggcaacaacaataagaaattcttttgtgtaaaataattattcatttttattaaattttacatggtcttaatagggtatatgaaaaactttaagacattttaagacaattaagagcagttaagaacatattgtaaggccacacatataaaatagagagctgaggaagtcctagacagaggaatccagcaagagaaagaaataaagggca

SEQ ID NO: 684255 - DNA, 385 bp, Homo sapiens
atatctgcccattgaggtaggtgaaatgggctttattaccttctttttccatatggaaactgaggttcagtcaggttacctgacctcaacacagctcacagcattgttttctgatgcagaggccagggctcttttacatgacataacggaaagctgactttcagtcarctaatacttttggctcttgggctctcaggaggccttcacatcatttcagtcccaagcatcaagcaggagatgagcttggggttcagattaaatgtatacatttattgtttgctgtgggatgtatgtgggaagcggtaatgtgcataggctccacagttgttgcaaacattaggcacccgataaaccctctgtatgggccatggggcatcacagacta

SEQ ID NO: 684256 - DNA, 2193 bp, Homo sapiens
attgctattcttagagaagagctttgctgctgtcccctccagactcctgtcatggccaacaatgagcccattcctctgctctttcctttggccctcttcccatttggggccatatgacaagttctatacctgcaccattgtatttgtgcatagagaggaagccctttctccccttttaccaacatttcctttgggaaaaatygaaggcaacatattatccatataaccaaatgtcattgagtctagtgcacttagaggaaagaaagagaacacaatgtcagactttttaaaaaattaaatataataatgatgttaattagggatggtagaatagcctacataatctgctctgaacatttctgaacaaataggagctcctccaaaaaatcagaggatcttaaaaaaggaactctatatagagcaagtaagcatgttgcaaattatatgtaagccattttggacaagcacatttcttaggttctttatggtagttcctgaagaaatttgagatgggtgagaggattccattcctacctctgcacaatacagctttgccaatgaaaactacttcaagcccaattctttcacacattcagcattcattagcaagcaaccctcaacacacttcatacaatctgttcagtgaactcagtgtccttttaggcaattctgagatgtgaccatattttagaagccgatttttattacccttatagttggtaccaggccactaagcttcttaaaccaatagctgagctcaggagccatttaggacttcatatcctgtgcctaaaggtactggctaccaacaatactggattcttaatcctcgttcatgcaaggagaaggaaaagggaataggattttaaaaaatattttggccaattcacatgttttgtgtactttaacatcacagtgagaacccatctctgatattaaacatactaaataacaagccaccaatttcaccaataataacccatttttgacattcactgtgttaactaacatcacctaacatgttagttgaaatggatagtttgctatacatcttggggtagccatctctggagcgtggcccatctgataaaatgttagcccaccatctttggagaatggattctttataaacacaattgattgtttctggaactaaacattaaaccagttggcacatacagagtactaatactctactttctctacactgaagtattatatactattaaaaacatggtaatgaaatataatgcatttgagttaattaaaaatgagtagctcttgagcacctatgtgtatgagccctgctaaaaacttggggaggataaaaaggataaacaagcactttggtatttagccattcattacaccagcttcagtatccttgatttatcaatctagagatacacatgactgaatcattcatcaattgtttccagcctcttgttaaatgttcttcacatccaaattcattttcaagaatctgatttgtcacttggccagaattctcattttcttgagaccaatagataaagcctgtttataaatttattgtttaactaatattgccttacctgtttcctggggggaaaaagcagctatctttcatctcagtccaagaagactataggaacttaggcctgtcctaaagaataaaaatgctatctttaaattatgccccagccaagatcaattttccagttgaaatgagcttcaacaatctaagtagcaggattatgatctacattgtatctttccctctttgtgagaatttaacagttttgtgtgggtctactcctcctcttgctttcatcctttgtgaacattttaaaactaacacttaatagaatgtggcctcttcatttcacacaatgttaacacaaggggctacagtgtgaagtaatgagacttttgggctcttggtagtagatacaactgtatctacatatctactactttttgaccatttacaatgagccagatgttttgctaagtactttacaagcatgtcatttaatcctcacatcctatgagggggcttttataatctctattttacagataagatactgaggtattagaaatttaagccacttaccaaagttacacagttagtgaatgatggaagtgaattctaactcaggtctcactctcacagccagccctcttactacttcattctatccttaatca

SEQ ID NO: 684257 - DNA, 2193 bp, Homo sapiens
attgctattcttagagaagagctttgctgctgtcccctccagactcctgtcatggccaacaatgagcccattcctctgctctttcctttggccctcttcccatttggggccatatgacaagttctatacctgcaccattgtatttgtgcatagagaggaagccctttctccccttttaccaacatttcctttgggaaaaatcgaaggcaacatattatccatataaccaaatgtcattgagtctagtgcacttagaggaaagaaagagaacacaatgtcagactttttaaaaaattaaatataataatgatgttaattagggatggtagaatagcctacataatctgctctgaacatttctgaacaaataggagctcctccaaaaaatcagaggatcttaaaaaaggaactctatatagagcaagtaagyatgttgcaaattatatgtaagccattttggacaagcacatttcttaggttctttatggtagttcctgaagaaatttgagatgggtgagaggattccattcctacctctgcacaatacagctttgccaatgaaaactacttcaagcccaattctttcacacattcagcattcattagcaagcaaccctcaacacacttcatacaatctgttcagtgaactcagtgtccttttaggcaattctgagatgtgaccatattttagaagccgatttttattacccttatagttggtaccaggccactaagcttcttaaaccaatagctgagctcaggagccatttaggacttcatatcctgtgcctaaaggtactggctaccaacaatactggattcttaatcctcgttcatgcaaggagaaggaaaagggaataggattttaaaaaatattttggccaattcacatgttttgtgtactttaacatcacagtgagaacccatctctgatattaaacatactaaataacaagccaccaatttcaccaataataacccatttttgacattcactgtgttaactaacatcacctaacatgttagttgaaatggatagtttgctatacatcttggggtagccatctctggagcgtggcccatctgataaaatgttagcccaccatctttggagaatggattctttataaacacaattgattgtttctggaactaaacattaaaccagttggcacatacagagtactaatactctactttctctacactgaagtattatatactattaaaaacatggtaatgaaatataatgcatttgagttaattaaaaatgagtagctcttgagcacctatgtgtatgagccctgctaaaaacttggggaggataaaaaggataaacaagcactttggtatttagccattcattacaccagcttcagtatccttgatttatcaatctagagatacacatgactgaatcattcatcaattgtttccagcctcttgttaaatgttcttcacatccaaattcattttcaagaatctgatttgtcacttggccagaattctcattttcttgagaccaatagataaagcctgtttataaatttattgtttaactaatattgccttacctgtttcctggggggaaaaagcagctatctttcatctcagtccaagaagactataggaacttaggcctgtcctaaagaataaaaatgctatctttaaattatgccccagccaagatcaattttccagttgaaatgagcttcaacaatctaagtagcaggattatgatctacattgtatctttccctctttgtgagaatttaacagttttgtgtgggtctactcctcctcttgctttcatcctttgtgaacattttaaaactaacacttaatagaatgtggcctcttcatttcacacaatgttaacacaaggggctacagtgtgaagtaatgagacttttgggctcttggtagtagatacaactgtatctacatatctactactttttgaccatttacaatgagccagatgttttgctaagtactttacaagcatgtcatttaatcctcacatcctatgagggggcttttataatctctattttacagataagatactgaggtattagaaatttaagccacttaccaaagttacacagttagtgaatgatggaagtgaattctaactcaggtctcactctcacagccagccctcttactacttcattctatccttaatca

SEQ ID NO: 684258 - DNA, 2193 bp, Homo sapiens
attgctattcttagagaagagctttgctgctgtcccctccagactcctgtcatggccaacaatgagcccattcctctgctctttcctttggccctcttcccatttggggccatatgacaagttctatacctgcaccattgtatttgtgcatagagaggaagccctttctccccttttaccaacatttcctttgggaaaaatcgaaggcaacatattatccatataaccaaatgtcattgagtctagtgcacttagaggaaagaaagagaacacaatgtcagactttttaaaaaattaaatataataatgatgttaattagggatggtagaatagcctacataatctgctctgaacatttctgaacaaataggagctcctccaaaaaatcagaggatcttaaaaaaggaactctatatagagcaagtaagcatgttgcaaattatatgtaagccattttggacaagcacatttcttaggttctttatggtagttcctgaagaaatttgagatgggtgagaggattccattcctacctctgcacaatacagctttgccaatgaaaactacttcaagcccaattctttcacacattcagcattcattagcaagcaaccctcaacacacttcatacaatctgttcagtgaactcagtgtccttttaggcaattctgagatgtgaccatattttagaagccgatttttattacccttatagttggtaccaggccactaagcttcttaaaccaatagctgagctcaggagccatttaggacttcatatcctgtgcctaaaggtactggctaccaacaatactggattcttaatcctcgttcatgcaaggagaaggaaaagggaataggattttaaaaaatattttggccaattcacatgttttgtgtactttaacatcacagtgagaacccatctctgatattaaacatactaaataacaagccaccaatttcaccaataataacccatttttgacattcactgtgttaactaacatcacctaacatgttagttgaaatggatagtttgctatacatcttggggtagccatctctggagcgtggcccatctgataaaatgttagcccaccatctttggagaatggattctttataaacacaattgattgtttctggaactaaacattaaaccagttggcacatacagartactaatactctactttctctacactgaagtattatatactattaaaaacatggtaatgaaatataatgcatttgagttaattaaaaatgagtagctcttgagcacctatgtgtatgagccctgctaaaaacttggggaggataaaaaggataaacaagcactttggtatttagccattcattacaccagcttcagtatccttgatttatcaatctagagatacacatgactgaatcattcatcaattgtttccagcctcttgttaaatgttcttcacatccaaattcattttcaagaatctgatttgtcacttggccagaattctcattttcttgagaccaatagataaagcctgtttataaatttattgtttaactaatattgccttacctgtttcctggggggaaaaagcagctatctttcatctcagtccaagaagactataggaacttaggcctgtcctaaagaataaaaatgctatctttaaattatgccccagccaagatcaattttccagttgaaatgagcttcaacaatctaagtagcaggattatgatctacattgtatctttccctctttgtgagaatttaacagttttgtgtgggtctactcctcctcttgctttcatcctttgtgaacattttaaaactaacacttaatagaatgtggcctcttcatttcacacaatgttaacacaaggggctacagtgtgaagtaatgagacttttgggctcttggtagtagatacaactgtatctacatatctactactttttgaccatttacaatgagccagatgttttgctaagtactttacaagcatgtcatttaatcctcacatcctatgagggggcttttataatctctattttacagataagatactgaggtattagaaatttaagccacttaccaaagttacacagttagtgaatgatggaagtgaattctaactcaggtctcactctcacagccagccctcttactacttcattctatccttaatca

SEQ ID NO: 684259 - DNA, 2193 bp, Homo sapiens
attgctattcttagagaagagctttgctgctgtcccctccagactcctgtcatggccaacaatgagcccattcctctgctctttcctttggccctcttcccatttggggccatatgacaagttctatacctgcaccattgtatttgtgcatagagaggaagccctttctccccttttaccaacatttcctttgggaaaaatcgaaggcaacatattatccatataaccaaatgtcattgagtctagtgcacttagaggaaagaaagagaacacaatgtcagactttttaaaaaattaaatataataatgatgttaattagggatggtagaatagcctacataatctgctctgaacatttctgaacaaataggagctcctccaaaaaatcagaggatcttaaaaaaggaactctatatagagcaagtaagcatgttgcaaattatatgtaagccattttggacaagcacatttcttaggttctttatggtagttcctgaagaaatttgagatgggtgagaggattccattcctacctctgcacaatacagctttgccaatgaaaactacttcaagcccaattctttcacacattcagcattcattagcaagcaaccctcaacacacttcatacaatctgttcagtgaactcagtgtccttttaggcaattctgagatgtgaccatattttagaagccgatttttattacccttatagttggtaccaggccactaagcttcttaaaccaatagctgagctcaggagccatttaggacttcatatcctgtgcctaaaggtactggctaccaacaatactggattcttaatcctcgttcatgcaaggagaaggaaaagggaataggattttaaaaaatattttggccaattcacatgttttgtgtactttaacatcacagtgagaacccatctctgatattaaacatactaaataacaagccaccaatttcaccaataataacccatttttgacattcactgtgttaactaacatcacctaacatgttagttgaaatggatagtttgctatacatcttggggtagccatctctggagcgtggcccatctgataaaatgttagcccaccatctttggagaatggattctttataaacacaattgattgtttctggaactaaacattaaaccagttggcacatacagagtactaatactctactttctctacactgaagtattatatactattaaaaacatggtaatgaaatataatgcatttgagttaattaaaaatgagtagctcttgagcacctatgtgtatgagccctgctaaaaacttggggaggataaaaasgataaacaagcactttggtatttagccattcattacaccagcttcagtatccttgatttatcaatctagagatacacatgactgaatcattcatcaattgtttccagcctcttgttaaatgttcttcacatccaaattcattttcaagaatctgatttgtcacttggccagaattctcattttcttgagaccaatagataaagcctgtttataaatttattgtttaactaatattgccttacctgtttcctggggggaaaaagcagctatctttcatctcagtccaagaagactataggaacttaggcctgtcctaaagaataaaaatgctatctttaaattatgccccagccaagatcaattttccagttgaaatgagcttcaacaatctaagtagcaggattatgatctacattgtatctttccctctttgtgagaatttaacagttttgtgtgggtctactcctcctcttgctttcatcctttgtgaacattttaaaactaacacttaatagaatgtggcctcttcatttcacacaatgttaacacaaggggctacagtgtgaagtaatgagacttttgggctcttggtagtagatacaactgtatctacatatctactactttttgaccatttacaatgagccagatgttttgctaagtactttacaagcatgtcatttaatcctcacatcctatgagggggcttttataatctctattttacagataagatactgaggtattagaaatttaagccacttaccaaagttacacagttagtgaatgatggaagtgaattctaactcaggtctcactctcacagccagccctcttactacttcattctatccttaatca

SEQ ID NO: 684260 - DNA, 2193 bp, Homo sapiens
attgctattcttagagaagagctttgctgctgtcccctccagactcctgtcatggccaacaatgagcccattcctctgctctttcctttggccctcttcccatttggggccatatgacaagttctatacctgcaccattgtatttgtgcatagagaggaagccctttctccccttttaccaacatttcctttgggaaaaatcgaaggcaacatattatccatataaccaaatgtcattgagtctagtgcacttagaggaaagaaagagaacacaatgtcagactttttaaaaaattaaatataataatgatgttaattagggatggtagaatagcctacataatctgctctgaacatttctgaacaaataggagctcctccaaaaaatcagaggatcttaaaaaaggaactctatatagagcaagtaagcatgttgcaaattatatgtaagccattttggacaagcacatttcttaggttctttatggtagttcctgaagaaatttgagatgggtgagaggattccattcctacctctgcacaatacagctttgccaatgaaaactacttcaagcccaattctttcacacattcagcattcattagcaagcaaccctcaacacacttcatacaatctgttcagtgaactcagtgtccttttaggcaattctgagatgtgaccatattttagaagccgatttttattacccttatagttggtaccaggccactaagcttcttaaaccaatagctgagctcaggagccatttaggacttcatatcctgtgcctaaaggtactggctaccaacaatactggattcttaatcctcgttcatgcaaggagaaggaaaagggaataggattttaaaaaatattttggccaattcacatgttttgtgtactttaacatcacagtgagaacccatctctgatattaaacatactaaataacaagccaccaatttcaccaataataacccatttttgacattcactgtgttaactaacatcacctaacatgttagttgaaatggatagtttgctatacatcttggggtagccatctctggagcgtggcccatctgataaaatgttagcccaccatctttggagaatggattctttataaacacaattgattgtttctggaactaaacattaaaccagttggcacatacagagtactaatactctactttctctacactgaagtattatatactattaaaaacatggtaatgaaatataatgcatttgagttaattaaaaatgagtagctcttgagcacctatgtgtatgagccctgctaaaaacttggggaggataaaaaggataaacaagcactttggtatttagccattcattacaccagcttcagtatccttgatttatcaatctagagatacayatgactgaatcattcatcaattgtttccagcctcttgttaaatgttcttcacatccaaattcattttcaagaatctgatttgtcacttggccagaattctcattttcttgagaccaatagataaagcctgtttataaatttattgtttaactaatattgccttacctgtttcctggggggaaaaagcagctatctttcatctcagtccaagaagactataggaacttaggcctgtcctaaagaataaaaatgctatctttaaattatgccccagccaagatcaattttccagttgaaatgagcttcaacaatctaagtagcaggattatgatctacattgtatctttccctctttgtgagaatttaacagttttgtgtgggtctactcctcctcttgctttcatcctttgtgaacattttaaaactaacacttaatagaatgtggcctcttcatttcacacaatgttaacacaaggggctacagtgtgaagtaatgagacttttgggctcttggtagtagatacaactgtatctacatatctactactttttgaccatttacaatgagccagatgttttgctaagtactttacaagcatgtcatttaatcctcacatcctatgagggggcttttataatctctattttacagataagatactgaggtattagaaatttaagccacttaccaaagttacacagttagtgaatgatggaagtgaattctaactcaggtctcactctcacagccagccctcttactacttcattctatccttaatca

SEQ ID NO: 684261 - DNA, 620 bp, Homo sapiens
ttctcagtaattcaaaaaagatcctcgatgatagctctgattcgacctgaaccaactattatggacaggaaaatagaatgatgagcctaaattatgtgcctatgattacacacactccaggggctagggtgtgtatgaagtcatctagacggaaaaagcatgaaaaggtaggccagatgcctctacagataacaattggggtattcttcctcagaaaaaaatgaccaaagctaaaaggcagctacaacaactgtccatctccctcatgcccttcctccctctgaggagctaggcctcatcstcttcatctgttgaattcgaccaaaccttccaggtctgtctaaaatgccacttcatctatgaagcgtatcttgactcctttactcttctcttacctaaattagatgtcttcctcaacttaggccaaattaaatctttaactttcttctgtggctttatataatgtgcttgttttatagctatttttttcatttctttcagattgtccaaaaggatgtaaaactatagcagaaactgtttcagtcatctttgaaggctttgcagatctatatcagtgactcacaattagcagatacattgtaaacaccaggccaattaga

SEQ ID NO: 684262 - DNA, 1017 bp, Homo sapiens
tgtgtgtacatgtgaactgttcagagtataactaaatcacgagaaatgtagctmgttctagaaaattctaaatctagagtgttaattcccaaccaggagcagttatcctaccaggagacattttaccatgtctggagacatttttggttgttacagctgggtgctcctggcatctagtaggtagaggccagggatgctgctataacagccggcagtgcacaggatagcacccacaaaataaattctctggctcacagtgtctgtagtgctgagcctgagaaacattgctttagagtctattgtgaaactatgcccaatgttttaggaaattgaatagtaatgataatagctagtcctgttgatatagctacttactgtatggcagagagtgtgccaagagcttcaatccttacaacacccgtatcacttactgttattactcccaatttgtagactaggcaaagagagcttaacttacttgtccaaggtcatccagttaaatgataacactgttacgggttttattcttataaccactatgtcacattgcctcttgaaaagtgaattgttcaagcgataccaacagatagctagtgacctaataaatatcatgcatgcaacttctgttgatagaataattattattttagcaagaatactagttcttggttttattggatactaacagtaaaaacgactaataccattcatattcacaacttaatgtattaaagactcttttgcaagttggccttataaaaattagcactaatatctttatttttaggtcgttattttatagtggaagctgacataaaggagttcacaactttgaaagctgacaagaagtttcacgtgttactgaatattttacgacactgccggaggctatcagaggtccgagggggaggacttactcgttatgttataacctgagtcccttgtgaacttttgaacataccaacagggtatagagtatagaggctatttctataattttcttatatataatttttt

SEQ ID NO: 684263 - DNA, 1017 bp, Homo sapiens
tgtgtgtacatgtgaactgttcagagtataactaaatcacgagaaatgtagctagttctagaaaattctaaatctagagtgttaattcccaaccaggagcagttatcctaccaggagacattttaccatgtctggagacatttttggttgttacagctgggtgctcctggcatctagtaggtagaggccagggatgctgctataacagccggcagtgcacaggatagcacccacaaaataaattctctggctcacagtgtctgtagtgctgagcctgagaaacattgctttagagtctattgtgaaactatgcccaatgttttaggaaattgaatagtaatgataatagctagtcctgttgatatagctacttactgtatggcagagagtgtgccaagagcttcaatccttacaacacccrtatcacttactgttattactcccaatttgtagactaggcaaagagagcttaacttacttgtccaaggtcatccagttaaatgataacactgttacgggttttattcttataaccactatgtcacattgcctcttgaaaagtgaattgttcaagcgataccaacagatagctagtgacctaataaatatcatgcatgcaacttctgttgatagaataattattattttagcaagaatactagttcttggttttattggatactaacagtaaaaacgactaataccattcatattcacaacttaatgtattaaagactcttttgcaagttggccttataaaaattagcactaatatctttatttttaggtcgttattttatagtggaagctgacataaaggagttcacaactttgaaagctgacaagaagtttcacgtgttactgaatattttacgacactgccggaggctatcagaggtccgagggggaggacttactcgttatgttataacctgagtcccttgtgaacttttgaacataccaacagggtatagagtatagaggctatttctataattttcttatatataatttttt

SEQ ID NO: 684264 - DNA, 3874 bp, Homo sapiens
atccataaattagcatttattagtcttagttattaaatatataatagtttatagggatgttaaagtctgacaagaatggagacaatttataaaaatgtttaaaatagttttatatatttgcaacattataagaaaatatatggaaaatctgatcatttaaggcattgatttgtagctaaaatatgtttacatgtattctatccatatgagcaaaatacagtaattgcataggcttcaaaggtaatagaccagaggattttctataggaaatgaattaatgggtccattgcacatgaaatcccattttgttaaatgaaacaagcccagcggtctttattgatctcattgtttttagattggttatgcctcctagtttcctttaattaaatcaaagctactatgtggatgtgggaaaatagtcttgaaaatgtgtcataatcaactgccataaaattaacctcaaattcatactgcccccaaatattctatcataaacacatcctgaattaatataattctgaaatacttagtttcataataatgaaggataaagaaattaacatggcatttgtttacataaaagaaataaattgtcttgaattgtacagggttaaattttcatgtcagagaatttacatggggaaataatcaagtttcattgcatgaaaattagttacacttgtgtgcatgtgaacacacatgcacaaacttccttaaacatttatttcaggtattaaaagacttaagtaagtagagagggaactgtactgattttcaactttatactcaaaatgcgataaaagacattattgaatgcaaaaattaggcttactcgtgagtatataccttttcataatcctgtaaacctctgggatcttcataaggaaacacttttctggactaattaagctgaatagattgaggaaaaaaacataggttttcttttcaaccttttattttctctaaatacatacatacatacatatgtgcacacatatccaactgtctatttagaaaaatttcatgacatcagagtaacagaaaggtcaccataaagattattcaaacatatatacatatggacttgagagacaatatttaacttatcccagttttcaaaatgaacaatgtggaaacaacacagtaggaaaaggtacaatcatcacagtttgaacgctcattaaagtaaatgtgctttttattagattgtttatttttccttttgaaaccactaacttaacctttcaacaattatcattgctgttgtactaaatcaattgttaaagttttgttataacatggtatcaattttaacaatttaacaaatataaatttcctctgtctccttactcatacttagctaacttttattgaactttaaatcattgaatgttttctacatattatacagaatcataggaattattgactaaaatagacatataaagagccattcaaaagaacgttttataaatcaattatttgaagtactattatttctcccagagtggagttaactaattttaattcccattatcaatttgaattgtcaatatgattttgagtctaagcactgtatatggttttatcaaaatacaacattatatcaacctttattttaattagttctgcttccaagggattttatgttcagatatgattgaatgaaatgtaaaaataatattcatagaaaaataagatattttatagacagttttacaacttttgaaaaccagtattaattctgacaaataaatattgtcaaaatatttttcttgatttctatgaataccttaatattattagcaagaaaaatctattgtaatatttgatagattttaatatcaattgcaaaatacttgctacataaccatcaagcacactgtgtgaaacctataaaccttattcattttttgaaaaagcatgtgtacattattatttatctgacacatgggaatggaaatgacattaggcaaaattaagtaatcagaaaaaaattattcaaaaagttaacctcttttctcattttattaaaaaaaattgataggcattttctttttcattaccaccctgatattctcattttatcaatggtgtacagatttcttaggacaaaaaaatagaattaatttccactttataaatttaattttctatagaaatatttaatatgtatggtgtaaaagccaaaaatatgcctctatagatcytgacaaaaaaacaaaattttaagtcagaggacctgaaaattattactgaattaagattgttcatttttatgttttctcacaattaaatctgatgtttcttaagttatggacttcatgataattaaaaactgattcttttgtagtactttcctttatgtgcacatattagctaggactacttctgttgcaaggcaaacaatccttatccaaaagcatttatgcataaaatagaacttactgtttcatgtaataagagtccaggggtggatgtggcttcaggtctgggtttattcaggactcaaatgagtcaccaaaattgcaccaagttttgcattttccccccagcagtctcaggttaatattatcacaatattcagatatattacataaagagaatctgatgattcacacacaattcttcctcctaatctctgaacctagcactatggatccaagaacgtaatcatttgattggcttaatataggttaaagattactcttttggctcctagggcgtaatccagtatatacacattacatggatttagagcattggagcaatatttgaatttgacaactagaaggaatatgaaagatgacaagaggtaatgacaatagtcacagtagtgctgatattcacttttatatgactatcaggagatttggtgaaatatcagtttccagtcattaatcagtgtgtataacttaagttctgattatggcactaaattaactttctattgatctccaatgaagacattaaatttgtatggggatgccttgcacatggactaaacacaatatcttgcattattaaaatgttcaagcatttacaaaagtagataaacaaagattctcccattttacctatctctcagtatcaacttttaacaattcatagcagatcatgtttcaactctacctcatagttagtccgtcctctacttcatttctattccatactcattggacagttttaatgaaaagccaataataatataattccatccacaaatgtcatataaactttataattcaacctgtaagatagtgggattttacatttggggtactttaatatgtctaaatatggatactcaatattcccaattaataatggataaaatcagaaatagagaaataaattatactcattctatttcttcctattacactgtagtgttttcataatgaagcatattctgatttctgatcatgaaatatttaaactggagagatacaacaaacaacattaatattcacttgtcttttatttctcttttattgttaatggatttggagtcccaatgtctggaatagctaagcaatgccaaattcttagatgacatttaaatttttaagaggtaataatcacagcttaaatatacatgcatagtggttgcttgagctgaatttttaaacatttgttttgaaaaattaatacaaattaactattatattttataaacacaatggctattttgagtcaaagggacttaaagtgtaatccgagttggttatgtgatcctggcaaagtcatataacacctctgagcccctgaatcttctagtcttagtcttctagttgaggaatattatatttaccttgtaggagtttccgtagacttaagaatatgtgaagaacctagaaaagtatccaattgg

SEQ ID NO: 684265 - DNA, 3874 bp, Homo sapiens
atccataaattagcatttattagtcttagttattaaatatataatagtttatagggatgttaaagtctgacaagaatggagacaatttataaaaatgtttaaaatagttttatatatttgcaacattataagaaaatatatggaaaatctgatcatttaaggcattgatttgtagctaaaatatgtttacatgtattctatccatatgagcaaaatacagtaattgcataggcttcaaaggtaatagaccagaggattttctataggaaatgaattaatgggtccattgcacatgaaatcccattttgttaaatgaaacaagcccagcggtctttattgatctcattgtttttagattggttatgcctcctagtttcctttaattaaatcaaagctactatgtggatgtgggaaaatagtcttgaaaatgtgtcataatcaactgccataaaattaacctcaaattcatactgcccccaaatattctatcataaacacatcctgaattaatataattctgaaatacttagtttcataataatgaaggataaagaaattaacatggcatttgtttacataaaagaaataaattgtcttgaattgtacagggttaaattttcatgtcagagaatttacatggggaaataatcaagtttcattgcatgaaaattagttacacttgtgtgcatgtgaacacacatgcacaaacttccttaaacatttatttcaggtattaaaagacttaagtaagtagagagggaactgtactgattttcaactttatactcaaaatgcgataaaagacattattgaatgcaaaaattaggcttactcgtgagtatataccttttcataatcctgtaaacctctgggatcttcataaggaaacacttttctggactaattaagctgaatagattgaggaaaaaaacataggttttcttttcaaccttttattttctctaaatacatacatacatacatatgtgcacacatatccaactgtctatttagaaaaatttcatgacatcagagtaacagaaaggtcaccataaagattattcaaacatatatacatatggacttgagagacaatatttaacttatcccagttttcaaaatgaacaatgtggaaacaacacagtaggaaaaggtacaatcatcacagtttgaacgctcattaaagtaaatgtgctttttattagattgtttatttttccttttgaaaccactaacttaacctttcaacaattatcattgctgttgtactaaatcaattgttaaagttttgttataacatggtatcaattttaacaatttaacaaatataaatttcctctgtctccttactcatacttagctaacttttattgaactttaaatcattgaatgttttctacatattatacagaatcataggaattattgactaaaatagacatataaagagccattcaaaagaacgttttataaatcaattatttgaagtactattatttctcccagagtggagttaactaattttaattcccattatcaatttgaattgtcaatatgattttgagtctaagcactgtatatggttttatcaaaatacaacattatatcaacctttattttaattagttctgcttccaagggattttatgttcagatatgattgaatgaaatgtaaaaataatattcatagaaaaataagatattttatagacagttttacaacttttgaaaaccagtattaattctgacaaataaatattgtcaaaatatttttcttgatttctatgaataccttaatattattagcaagaaaaatctattgtaatatttgatagattttaatatcaattgcaaaatacttgctacataaccatcaagcacactgtgtgaaacctataaaccttattcattttttgaaaaagcatgtgtacattattatttatctgacacatgggaatggaaatgacattaggcaaaattaagtaatcagaaaaaaattattcaaaaagttaacctcttttctcattttattaaaaaaaattgataggcattttctttttcattaccaccctgatattctcattttatcaatggtgtacagatttcttaggacaaaaaaatagaattaatttccactttataaatttaattttctatagaaatatttaatatgtatggtgtaaaagccaaaaatatgcctctatagatcttgacaaaaaaacaaaattttaagtcagaggacctgaaaattattactgaattaarattgttcatttttatgttttctcacaattaaatctgatgtttcttaagttatggacttcatgataattaaaaactgattcttttgtagtactttcctttatgtgcacatattagctaggactacttctgttgcaaggcaaacaatccttatccaaaagcatttatgcataaaatagaacttactgtttcatgtaataagagtccaggggtggatgtggcttcaggtctgggtttattcaggactcaaatgagtcaccaaaattgcaccaagttttgcattttccccccagcagtctcaggttaatattatcacaatattcagatatattacataaagagaatctgatgattcacacacaattcttcctcctaatctctgaacctagcactatggatccaagaacgtaatcatttgattggcttaatataggttaaagattactcttttggctcctagggcgtaatccagtatatacacattacatggatttagagcattggagcaatatttgaatttgacaactagaaggaatatgaaagatgacaagaggtaatgacaatagtcacagtagtgctgatattcacttttatatgactatcaggagatttggtgaaatatcagtttccagtcattaatcagtgtgtataacttaagttctgattatggcactaaattaactttctattgatctccaatgaagacattaaatttgtatggggatgccttgcacatggactaaacacaatatcttgcattattaaaatgttcaagcatttacaaaagtagataaacaaagattctcccattttacctatctctcagtatcaacttttaacaattcatagcagatcatgtttcaactctacctcatagttagtccgtcctctacttcatttctattccatactcattggacagttttaatgaaaagccaataataatataattccatccacaaatgtcatataaactttataattcaacctgtaagatagtgggattttacatttggggtactttaatatgtctaaatatggatactcaatattcccaattaataatggataaaatcagaaatagagaaataaattatactcattctatttcttcctattacactgtagtgttttcataatgaagcatattctgatttctgatcatgaaatatttaaactggagagatacaacaaacaacattaatattcacttgtcttttatttctcttttattgttaatggatttggagtcccaatgtctggaatagctaagcaatgccaaattcttagatgacatttaaatttttaagaggtaataatcacagcttaaatatacatgcatagtggttgcttgagctgaatttttaaacatttgttttgaaaaattaatacaaattaactattatattttataaacacaatggctattttgagtcaaagggacttaaagtgtaatccgagttggttatgtgatcctggcaaagtcatataacacctctgagcccctgaatcttctagtcttagtcttctagttgaggaatattatatttaccttgtaggagtttccgtagacttaagaatatgtgaagaacctagaaaagtatccaattgg

SEQ ID NO: 684266 - DNA, 3874 bp, Homo sapiens
atccataaattagcatttattagtcttagttattaaatatataatagtttatagggatgttaaagtctgacaagaatggagacaatttataaaaatgtttaaaatagttttatatatttgcaacattataagaaaatatatggaaaatctgatcatttaaggcattgatttgtagctaaaatatgtttacatgtattctatccatatgagcaaaatacagtaattgcataggcttcaaaggtaatagaccagaggattttctataggaaatgaattaatgggtccattgcacatgaaatcccattttgttaaatgaaacaagcccagcggtctttattgatctcattgtttttagattggttatgcctcctagtttcctttaattaaatcaaagctactatgtggatgtgggaaaatagtcttgaaaatgtgtcataatcaactgccataaaattaacctcaaattcatactgcccccaaatattctatcataaacacatcctgaattaatataattctgaaatacttagtttcataataatgaaggataaagaaattaacatggcatttgtttacataaaagaaataaattgtcttgaattgtacagggttaaattttcatgtcagagaatttacatggggaaataatcaagtttcattgcatgaaaattagttacacttgtgtgcatgtgaacacacatgcacaaacttccttaaacatttatttcaggtattaaaagacttaagtaagtagagagggaactgtactgattttcaactttatactcaaaatgcgataaaagacattattgaatgcaaaaattaggcttactcgtgagtatataccttttcataatcctgtaaacctctgggatcttcataaggaaacacttttctggactaattaagctgaatagattgaggaaaaaaacataggttttcttttcaaccttttattttctctaaatacatacatacatacatatgtgcacacatatccaactgtctatttagaaaaatttcatgacatcagagtaacagaaaggtcaccataaagattattcaaacatatatacatatggacttgagagacaatatttaacttatcccagttttcaaaatgaacaatgtggaaacaacacagtaggaaaaggtacaatcatcacagtttgaacgctcattaaagtaaatgtgctttttattagattgtttatttttccttttgaaaccactaacttaacctttcaacaattatcattgctgttgtactaaatcaattgttaaagttttgttataacatggtatcaattttaacaatttaacaaatataaatttcctctgtctccttactcatacttagctaacttttattgaactttaaatcattgaatgttttctacatattatacagaatcataggaattattgactaaaatagacatataaagagccattcaaaagaacgttttataaatcaattatttgaagtactattatttctcccagagtggagttaactaattttaattcccattatcaatttgaattgtcaatatgattttgagtctaagcactgtatatggttttatcaaaatacaacattatatcaacctttattttaattagttctgcttccaagggattttatgttcagatatgattgaatgaaatgtaaaaataatattcatagaaaaataagatattttatagacagttttacaacttttgaaaaccagtattaattctgacaaataaatattgtcaaaatatttttcttgatttctatgaataccttaatattattagcaagaaaaatctattgtaatatttgatagattttaatatcaattgcaaaatacttgctacataaccatcaagcacactgtgtgaaacctataaaccttattcattttttgaaaaagcatgtgtacattattatttatctgacacatgggaatggaaatgacattaggcaaaattaagtaatcagaaaaaaattattcaaaaagttaacctcttttctcattttattaaaaaaaattgataggcattttctttttcattaccaccctgatattctcattttatcaatggtgtacagatttcttaggacaaaaaaatagaattaatttccactttataaatttaattttctatagaaatatttaatatgtatggtgtaaaagccaaaaatatgcctctatagatcttgacaaaaaaacaaaattttaagtcagaggacctgaaaattattactgaattaagaytgttcatttttatgttttctcacaattaaatctgatgtttcttaagttatggacttcatgataattaaaaactgattcttttgtagtactttcctttatgtgcacatattagctaggactacttctgttgcaaggcaaacaatccttatccaaaagcatttatgcataaaatagaacttactgtttcatgtaataagagtccaggggtggatgtggcttcaggtctgggtttattcaggactcaaatgagtcaccaaaattgcaccaagttttgcattttccccccagcagtctcaggttaatattatcacaatattcagatatattacataaagagaatctgatgattcacacacaattcttcctcctaatctctgaacctagcactatggatccaagaacgtaatcatttgattggcttaatataggttaaagattactcttttggctcctagggcgtaatccagtatatacacattacatggatttagagcattggagcaatatttgaatttgacaactagaaggaatatgaaagatgacaagaggtaatgacaatagtcacagtagtgctgatattcacttttatatgactatcaggagatttggtgaaatatcagtttccagtcattaatcagtgtgtataacttaagttctgattatggcactaaattaactttctattgatctccaatgaagacattaaatttgtatggggatgccttgcacatggactaaacacaatatcttgcattattaaaatgttcaagcatttacaaaagtagataaacaaagattctcccattttacctatctctcagtatcaacttttaacaattcatagcagatcatgtttcaactctacctcatagttagtccgtcctctacttcatttctattccatactcattggacagttttaatgaaaagccaataataatataattccatccacaaatgtcatataaactttataattcaacctgtaagatagtgggattttacatttggggtactttaatatgtctaaatatggatactcaatattcccaattaataatggataaaatcagaaatagagaaataaattatactcattctatttcttcctattacactgtagtgttttcataatgaagcatattctgatttctgatcatgaaatatttaaactggagagatacaacaaacaacattaatattcacttgtcttttatttctcttttattgttaatggatttggagtcccaatgtctggaatagctaagcaatgccaaattcttagatgacatttaaatttttaagaggtaataatcacagcttaaatatacatgcatagtggttgcttgagctgaatttttaaacatttgttttgaaaaattaatacaaattaactattatattttataaacacaatggctattttgagtcaaagggacttaaagtgtaatccgagttggttatgtgatcctggcaaagtcatataacacctctgagcccctgaatcttctagtcttagtcttctagttgaggaatattatatttaccttgtaggagtttccgtagacttaagaatatgtgaagaacctagaaaagtatccaattgg

SEQ ID NO: 684267 - DNA, 3874 bp, Homo sapiens
atccataaattagcatttattagtcttagttattaaatatataatagtttatagggatgttaaagtctgacaagaatggagacaatttataaaaatgtttaaaatagttttatatatttgcaacattataagaaaatatatggaaaatctgatcatttaaggcattgatttgtagctaaaatatgtttacatgtattctatccatatgagcaaaatacagtaattgcataggcttcaaaggtaatagaccagaggattttctataggaaatgaattaatgggtccattgcacatgaaatcccattttgttaaatgaaacaagcccagcggtctttattgatctcattgtttttagattggttatgcctcctagtttcctttaattaaatcaaagctactatgtggatgtgggaaaatagtcttgaaaatgtgtcataatcaactgccataaaattaacctcaaattcatactgcccccaaatattctatcataaacacatcctgaattaatataattctgaaatacttagtttcataataatgaaggataaagaaattaacatggcatttgtttacataaaagaaataaattgtcttgaattgtacagggttaaattttcatgtcagagaatttacatggggaaataatcaagtttcattgcatgaaaattagttacacttgtgtgcatgtgaacacacatgcacaaacttccttaaacatttatttcaggtattaaaagacttaagtaagtagagagggaactgtactgattttcaactttatactcaaaatgcgataaaagacattattgaatgcaaaaattaggcttactcgtgagtatataccttttcataatcctgtaaacctctgggatcttcataaggaaacacttttctggactaattaagctgaatagattgaggaaaaaaacataggttttcttttcaaccttttattttctctaaatacatacatacatacatatgtgcacacatatccaactgtctatttagaaaaatttcatgacatcagagtaacagaaaggtcaccataaagattattcaaacatatatacatatggacttgagagacaatatttaacttatcccagttttcaaaatgaacaatgtggaaacaacacagtaggaaaaggtacaatcatcacagtttgaacgctcattaaagtaaatgtgctttttattagattgtttatttttccttttgaaaccactaacttaacctttcaacaattatcattgctgttgtactaaatcaattgttaaagttttgttataacatggtatcaattttaacaatttaacaaatataaatttcctctgtctccttactcatacttagctaacttttattgaactttaaatcattgaatgttttctacatattatacagaatcataggaattattgactaaaatagacatataaagagccattcaaaagaacgttttataaatcaattatttgaagtactattatttctcccagagtggagttaactaattttaattcccattatcaatttgaattgtcaatatgattttgagtctaagcactgtatatggttttatcaaaatacaacattatatcaacctttattttaattagttctgcttccaagggattttatgttcagatatgattgaatgaaatgtaaaaataatattcatagaaaaataagatattttatagacagttttacaacttttgaaaaccagtattaattctgacaaataaatattgtcaaaatatttttcttgatttctatgaataccttaatattattagcaagaaaaatctattgtaatatttgatagattttaatatcaattgcaaaatacttgctacataaccatcaagcacactgtgtgaaacctataaaccttattcattttttgaaaaagcatgtgtacattattatttatctgacacatgggaatggaaatgacattaggcaaaattaagtaatcagaaaaaaattattcaaaaagttaacctcttttctcattttattaaaaaaaattgataggcattttctttttcattaccaccctgatattctcattttatcaatggtgtacagatttcttaggacaaaaaaatagaattaatttccactttataaatttaattttctatagaaatatttaatatgtatggtgtaaaagccaaaaatatgcctctatagatcttgacaaaaaaacaaaattttaagtcagaggacctgaaaattattactgaattaagattgttcatttttatgttttctcacaattaaatctgatgtttcttaagttatggacttcatgataattaaaaactgattcttttgtagtactttcctttatgtgcacatattagctaggactacttctgttgcaaggcaaacaatccttatccaaaagcatttatgcataaaatagaacttactgtttcatgtaataagagtccaggggtggatgtggcttcaggtctgggtttattcaggactcaaatgagtcaccaaaattgcaccaagttttgcattttccccccagcagtctcaggttaatattatcacaatattcagatatattacataaagagaatctgatgattcacacacaattcttcctcctaatctctgaacctagcactatggatccaagaaygtaatcatttgattggcttaatataggttaaagattactcttttggctcctagggcgtaatccagtatatacacattacatggatttagagcattggagcaatatttgaatttgacaactagaaggaatatgaaagatgacaagaggtaatgacaatagtcacagtagtgctgatattcacttttatatgactatcaggagatttggtgaaatatcagtttccagtcattaatcagtgtgtataacttaagttctgattatggcactaaattaactttctattgatctccaatgaagacattaaatttgtatggggatgccttgcacatggactaaacacaatatcttgcattattaaaatgttcaagcatttacaaaagtagataaacaaagattctcccattttacctatctctcagtatcaacttttaacaattcatagcagatcatgtttcaactctacctcatagttagtccgtcctctacttcatttctattccatactcattggacagttttaatgaaaagccaataataatataattccatccacaaatgtcatataaactttataattcaacctgtaagatagtgggattttacatttggggtactttaatatgtctaaatatggatactcaatattcccaattaataatggataaaatcagaaatagagaaataaattatactcattctatttcttcctattacactgtagtgttttcataatgaagcatattctgatttctgatcatgaaatatttaaactggagagatacaacaaacaacattaatattcacttgtcttttatttctcttttattgttaatggatttggagtcccaatgtctggaatagctaagcaatgccaaattcttagatgacatttaaatttttaagaggtaataatcacagcttaaatatacatgcatagtggttgcttgagctgaatttttaaacatttgttttgaaaaattaatacaaattaactattatattttataaacacaatggctattttgagtcaaagggacttaaagtgtaatccgagttggttatgtgatcctggcaaagtcatataacacctctgagcccctgaatcttctagtcttagtcttctagttgaggaatattatatttaccttgtaggagtttccgtagacttaagaatatgtgaagaacctagaaaagtatccaattgg

SEQ ID NO: 684268 - DNA, 612 bp, Homo sapiens
tcaaaatttaaaaaatcttgaatttttattgcagtcatctcattctatcactttaacatgccaaagttcagagagattaaatttcactcagtcatgtctccagtatatggtaaaaactgcattaattaatcaattaaaatagaaaaattctggcaactcatacactacaacatgtttaagatgagaatactgtcaatatcacagaaatttttttatgctcgagttaattaaaaaatgcctgtaagaatgccrtgttaaaaggaaagtctgaatacatattagacaacagagattataatgatgatgatgacaaaatgatgacaaccttgagaaaaaatcctgtcgcatcagaagtctttctttccagataccatattaatatacctgttagtaatgtatatatgtgtcataaatagtttaatggacacaaatttctcccagacaaatatgcatgccactttccaacacagcattgccaatcctctcattcagagggcaggccttgtgattttctttgataagctaaatgttatgggactcataatttgtgagttctggagtctaggccttatgagattccttagtgcttccacaatttccacctttaacatt

SEQ ID NO: 684269 - DNA, 612 bp, Homo sapiens
tcaaaatttaaaaaatcttgaatttttattgcagtcatctcattctatcactttaacatgccaaagttcagagagattaaatttcactcagtcatgtctccagtatatggtaaaaactgcattaattaatcaattaaaatagaaaaattctggcaactcatacactacaacatgtttaagatgagaatactgtcaatatcacagaaatttttttatgctcgagttaattaaaaaatgcctgtaagaatgccatgttaaaaggaaagtctsaatacatattagacaacagagattataatgatgatgatgacaaaatgatgacaaccttgagaaaaaatcctgtcgcatcagaagtctttctttccagataccatattaatatacctgttagtaatgtatatatgtgtcataaatagtttaatggacacaaatttctcccagacaaatatgcatgccactttccaacacagcattgccaatcctctcattcagagggcaggccttgtgattttctttgataagctaaatgttatgggactcataatttgtgagttctggagtctaggccttatgagattccttagtgcttccacaatttccacctttaacatt

SEQ ID NO: 684270 - DNA, 612 bp, Homo sapiens
tcaaaatttaaaaaatcttgaatttttattgcagtcatctcattctatcactttaacatgccaaagttcagagagattaaatttcactcagtcatgtctccagtatatggtaaaaactgcattaattaatcaattaaaatagaaaaattctggcaactcatacactacaacatgtttaagatgagaatactgtcaatatcacagaaatttttttatgctcgagttaattaaaaaatgcctgtaagaatgccatgttaaaaggaaagtctgaatacatattagacaacagagaytataatgatgatgatgacaaaatgatgacaaccttgagaaaaaatcctgtcgcatcagaagtctttctttccagataccatattaatatacctgttagtaatgtatatatgtgtcataaatagtttaatggacacaaatttctcccagacaaatatgcatgccactttccaacacagcattgccaatcctctcattcagagggcaggccttgtgattttctttgataagctaaatgttatgggactcataatttgtgagttctggagtctaggccttatgagattccttagtgcttccacaatttccacctttaacatt

SEQ ID NO: 684271 - DNA, 612 bp, Homo sapiens
tcaaaatttaaaaaatcttgaatttttattgcagtcatctcattctatcactttaacatgccaaagttcagagagattaaatttcactcagtcatgtctccagtatatggtaaaaactgcattaattaatcaattaaaatagaaaaattctggcaactcatacactacaacatgtttaagatgagaatactgtcaatatcacagaaatttttttatgctcgagttaattaaaaaatgcctgtaagaatgccatgttaaaaggaaagtctgaatacatattagacaacagagattataatgatgatgatgacaaaatgatgacaaccttgagaaaaaatcctgtcgcatcagaagtctytctttccagataccatattaatatacctgttagtaatgtatatatgtgtcataaatagtttaatggacacaaatttctcccagacaaatatgcatgccactttccaacacagcattgccaatcctctcattcagagggcaggccttgtgattttctttgataagctaaatgttatgggactcataatttgtgagttctggagtctaggccttatgagattccttagtgcttccacaatttccacctttaacatt

SEQ ID NO: 684272 - DNA, 612 bp, Homo sapiens
tcaaaatttaaaaaatcttgaatttttattgcagtcatctcattctatcactttaacatgccaaagttcagagagattaaatttcactcagtcatgtctccagtatatggtaaaaactgcattaattaatcaattaaaatagaaaaattctggcaactcatacactacaacatgtttaagatgagaatactgtcaatatcacagaaatttttttatgctcgagttaattaaaaaatgcctgtaagaatgccatgttaaaaggaaagtctgaatacatattagacaacagagattataatgatgatgatgacaaaatgatgacaaccttgagaaaaaatcctgtcgcatcagaagtctttctttccagataccatattaatatrcctgttagtaatgtatatatgtgtcataaatagtttaatggacacaaatttctcccagacaaatatgcatgccactttccaacacagcattgccaatcctctcattcagagggcaggccttgtgattttctttgataagctaaatgttatgggactcataatttgtgagttctggagtctaggccttatgagattccttagtgcttccacaatttccacctttaacatt

SEQ ID NO: 684273 - DNA, 649 bp, Homo sapiens
tggcctcatccgctcaaatagctgtaactactggtgcatgccacagcgcacagctcacctttgctttttaaagcataaaattatgtttgttttctaaatatcactaacagtgatctgagtaaaattctatattttagrcaaaaagtttacttaattagtctgcatgagtaaaaatcaataataataaatacatatactactttatgaaaatgattaacttaataatcaaataacttgagcaaataattgattcagcttaaaaggacattctattatgccaatttatttagggtaaaagaaagttgaaatatattgcagaactgtaagacagttaacagtatatattataaaaccatattgttagtcaatttgctactacataggaagagttttggtgattaaatagaccctgtaatacagtggtaatttaaaaatattttttaaaattttagaacagttttatatttagagagaaaatgtaaatatatatagggaccatataacccacactcaatttccttattgtgagcatcatatgttaggcatttctattactaacataatgtaataacattaatacattataataaataaaatttacatattgatcagagttctttagcattaccaaatcattttttttctgttc

SEQ ID NO: 684274 - DNA, 649 bp, Homo sapiens
tggcctcatccgctcaaatagctgtaactactggtgcatgccacagcgcacagctcacctttgctttttaaagcataaaattatgtttgttttctaaatatcactaacagtgatctgagtaaaattctatattttaggcaaaaagtttacttaattagtctgcatgagtaaaaatcaataataataaatacatatactactttatgaaaatgattaacttaataatcaaataacttgagcaaataattgattcagcttaaaaggacattctattatgycaatttatttagggtaaaagaaagttgaaatatattgcagaactgtaagacagttaacagtatatattataaaaccatattgttagtcaatttgctactacataggaagagttttggtgattaaatagaccctgtaatacagtggtaatttaaaaatattttttaaaattttagaacagttttatatttagagagaaaatgtaaatatatatagggaccatataacccacactcaatttccttattgtgagcatcatatgttaggcatttctattactaacataatgtaataacattaatacattataataaataaaatttacatattgatcagagttctttagcattaccaaatcattttttttctgttc

SEQ ID NO: 684275 - DNA, 1538 bp, Homo sapiens
gaaaacacaggggactagttcagaagcctctcaggaaagcttgctaaatcacaatagagtatatttctgttttaagcaggaaaacagttctagcatcacagtagtatcttttatgatccagtcaatttgccatcccttcaaagtcactgtccattatgtcrtattccagtgacttggtcttgttgattagtaaagttctatctctgcgtctttaactgtgtttcttccaccactcttgccttccagtattaagaccatcttcttggccatctgcttaaaccttttgttgtctatgtgtccataacacatgactaatttttttttaaatatttaatatgtttactattgttaacatcttcttttttttatttttttgggagacagagtcttactctgtcacccaggctgaagtgcaccagtgcaatctcggcttaattcaacctccacctcctgggtttgagcaattctcgtgcctcagccacctgaatagctgggactacaggtgcgccaccacatctggctatttttttttttttttgtattttttgtagaaacaaagttttgccatattggcctggctggtcttggactcctgccctcaagtgatccatctgcctcgacctcctaaaatactgggattataggcataagtcacggcgcttggtctgttaactccttatttatgtttcattctatagattctacaccttaacatggagaggtcgttttatgatatatttatttatatattaatatatgtatataatagtatatatttaatatatagtaggtatgaacacctatttctgtaattagtaaattagaaaatagtataacatttttgaaaactcaaattttatgtaatactgaaatgatttcatttttgaaacagtcaaggcttagtttaatttttttatttatcataagaactactaattatactgaggtgtattcatataaatacagactcagacatatataggtaaaaatcacatgatttgaaaatgttgtatacacaaaataataggaagaaatttgaagctcctattaaagtaatacatgactgtcttgaggaggactttttaaagttagaatgtcttacattagagactgtgtggcttggaaagaaacaaaatctttcacaaaatataatttaaaagatttctatttatattaaatttacaacatcacagaggcaagttgcactgttcctcccaccttccacaattttatttcaatgtaaattatttttcagtataatgtattatattcctgatctgttccatcagctcctgtgagttgtgatgctttataagtttcctctagtgtatggaagaacttaagcagaaatgaagcatcagaagcaggctggaccccacattaacacaatcatcacttttcttcatgtaacaacgtattatcactcttcgcttcaaagtacaggagtctcccttatccaggcatgactttgctttctaaagcttcagccaccggtggcgaactgtgatctgaaaataatgaatggaaaattccagaag

SEQ ID NO: 684276 - DNA, 1538 bp, Homo sapiens
gaaaacacaggggactagttcagaagcctctcaggaaagcttgctaaatcacaatagagtatatttctgttttaagcaggaaaacagttctagcatcacagtagtatcttttatgatccagtcaatttgccatcccttcaaagtcactgtccattatgtcgtattccagtgacttggtcttgttgattagtaaagttctatctctgcgtctttaactgtgtttcttccaccactcttgccttccagtattaagaccatcttcttggccatctgcttaaaccttttgttgtctatgtgtccataacacatgactaatttttttttaaatatttaatatgtttactattgttaacatcttcytttttttatttttttgggagacagagtcttactctgtcacccaggctgaagtgcaccagtgcaatctcggcttaattcaacctccacctcctgggtttgagcaattctcgtgcctcagccacctgaatagctgggactacaggtgcgccaccacatctggctatttttttttttttttgtattttttgtagaaacaaagttttgccatattggcctggctggtcttggactcctgccctcaagtgatccatctgcctcgacctcctaaaatactgggattataggcataagtcacggcgcttggtctgttaactccttatttatgtttcattctatagattctacaccttaacatggagaggtcgttttatgatatatttatttatatattaatatatgtatataatagtatatatttaatatatagtaggtatgaacacctatttctgtaattagtaaattagaaaatagtataacatttttgaaaactcaaattttatgtaatactgaaatgatttcatttttgaaacagtcaaggcttagtttaatttttttatttatcataagaactactaattatactgaggtgtattcatataaatacagactcagacatatataggtaaaaatcacatgatttgaaaatgttgtatacacaaaataataggaagaaatttgaagctcctattaaagtaatacatgactgtcttgaggaggactttttaaagttagaatgtcttacattagagactgtgtggcttggaaagaaacaaaatctttcacaaaatataatttaaaagatttctatttatattaaatttacaacatcacagaggcaagttgcactgttcctcccaccttccacaattttatttcaatgtaaattatttttcagtataatgtattatattcctgatctgttccatcagctcctgtgagttgtgatgctttataagtttcctctagtgtatggaagaacttaagcagaaatgaagcatcagaagcaggctggaccccacattaacacaatcatcacttttcttcatgtaacaacgtattatcactcttcgcttcaaagtacaggagtctcccttatccaggcatgactttgctttctaaagcttcagccaccggtggcgaactgtgatctgaaaataatgaatggaaaattccagaag

SEQ ID NO: 684277 - DNA, 1192 bp, Homo sapiens
ttctatttacaacctctataagctctttttagttagtagtattagttgcattaactagattacacatatctcaaagcttgtatactttctgggtatgattcacagcctcacaaaaattttgtgtgagtagtagagccttagatgagtacactttttttttaaattcattttatgccaattaaatcagcaaacatttgttgagtcatagtatgtgtcagacactgtggaaagtgctagagataaaaaaaataaatatggaatacagtttgctctccagggcacacagtcatgggatggagatagtgatgtaagtaaatcattggaatacaagatcataagcgcaattttgcaagtatttccaaaatagaacattgacacaagtcagcaagtcatcaatttgaatgcataaggtacatgcttaaagaaargttgttttatatatatcataaaagaggagtaggatttttccagatgggggtagagtgaaattgagaggttggtgaggaaagaagagtatttcaggagccagaacagcatgtgctgaactagaaatatattagacagttaagggaactgcagagttttagtcctgattgaaatgtagggtacatttatgtaacacagacaaattaggccaaggagaaattgtagagtatatcttatgatattctaataaacttagattttatttgtaagtagtgagaccactgagaagattaaacaaacaacaacaaaaataggagaaacctggttgtatttaaattttaaaacaatgtctgtggctatattgttgaagacagagtaaaaggatgtaagacctacagacacaggggtcagagtggagcttactttagttcacatgggagattatgagaatctgtcttaagtcattaacgattaagcaggggttgttatttttagatactaaagtaggaaaatcaataggattcagtgacccatgagataaagtaggagaagagagcacggtctcgtggtcttccgaatttttggtttactagattgaataatagcattattggttataaatgtaattatatgaaaatgaggaagttgtgaagaaagattttaagtttaattgtgtacatgttgaccaggaatctatacattaaaaaacattttgataatttgcagttagtgctcgctgtgcatttatagatgaaatatttaaatg

SEQ ID NO: 684278 - DNA, 1192 bp, Homo sapiens
ttctatttacaacctctataagctctttttagttagtagtattagttgcattaactagattacacatatctcaaagcttgtatactttctgggtatgattcacagcctcacaaaaattttgtgtgagtagtagagccttagatgagtacactttttttttaaattcattttatgccaattaaatcagcaaacatttgttgagtcatagtatgtgtcagacactgtggaaagtgctagagataaaaaaaataaatatggaatacagtttgctctccagggcacacagtcatgggatggagatagtgatgtaagtaaatcattggaatacaagatcataagcgcaattttgcaagtatttccaaaatagaacattgacacaagtcagcaagtcatcaatttgaatgcataaggtacatgcttaaagaaaggttgttttatatatatcataaaagaggagtaggatttttccagatggggrtagagtgaaattgagaggttggtgaggaaagaagagtatttcaggagccagaacagcatgtgctgaactagaaatatattagacagttaagggaactgcagagttttagtcctgattgaaatgtagggtacatttatgtaacacagacaaattaggccaaggagaaattgtagagtatatcttatgatattctaataaacttagattttatttgtaagtagtgagaccactgagaagattaaacaaacaacaacaaaaataggagaaacctggttgtatttaaattttaaaacaatgtctgtggctatattgttgaagacagagtaaaaggatgtaagacctacagacacaggggtcagagtggagcttactttagttcacatgggagattatgagaatctgtcttaagtcattaacgattaagcaggggttgttatttttagatactaaagtaggaaaatcaataggattcagtgacccatgagataaagtaggagaagagagcacggtctcgtggtcttccgaatttttggtttactagattgaataatagcattattggttataaatgtaattatatgaaaatgaggaagttgtgaagaaagattttaagtttaattgtgtacatgttgaccaggaatctatacattaaaaaacattttgataatttgcagttagtgctcgctgtgcatttatagatgaaatatttaaatg

SEQ ID NO: 684279 - DNA, 1619 bp, Homo sapiens
tcaaatttttaaaatccagtttgtacttaaacatagcacatatcaattcatatgtcatatttttatcagaaatgcatgtatgtaatgtttacaatatttacagtattaaaaataggttcatataaaccagttgttccagatatactcaaaagttttactgatagaggcataaggttttaaatttaaatttaattataattatataaaattaaagattctgttcttcattcactagtaaataatattagtactcaatagctgcatgtagcaagtggctactggacattgtattgaacagggcaggtttagatcctgaaatttatggcccatttttttaggcccatgtttatatttcacatctgaatcaattgttctaaacactaggaaacttaacaatcataagaagtgcttattttaaatgcattttaccaggaaacctccccctccacttcattctgattcagtatatcggtggttggattagataattttgatgcaggtggtccaaaaaattacagtttaggaaaataatggcgatagaagttaatgaaggcagcagcaaggtggggactgatttgccttaatgcctagagctcatctgggtatcacatacccaaaattttactgacttaagttaacactttggcctgaaggccatattcctgggaaataagagaaaaactaaagaaacaaatctcaaaaagaagaccatgccacatcttgtgtagaaaaataacattgccctttaacttggcccatccttaatggaaaaatattagcaaagaggaaccttgagcgccacctagtgtttggagtgtgctgtgctgctcacagtttttcttgctatcattcctatttcagttacttcattatttcattttcaagtaaccattcttcagattgtcccttgaacgtaaacatagaacagcgttttattcttagacaatgttcttttgctttatatcaaaatcctaggatattttatttatatcccaaatttctgctaccacatatatatgttgatgatttccaaaactttaactctctggacccacatttctgaattctattagttgtcatcaccatttgaatgatacacaggcacctcaaactcactgtctaaaatggaaattataatttttacttccagtaattatgaattctccttctgtattttattycttgctaaatgcatgactatccacactgttagggccaagcatcaagggtgtattcttgatgatttttccatctcattttcttgtttagtcatcaaaacctggtattttattttcttaatatgtcttgaggcatttacctcctctttatgttcactgtcattgccttttcattcacacatgactactttggaaaccgtccatgttaattctctgagtgctaattccgcttattttgttgcttttaattttggcccaatatacttcatcttgcacttgtctaaataatctatgtaaaatacaatgttgatcttcattatgctccagtataaaaatgacatctcagagttttccagaaaattctaatcaccctagtgtagttatcaaaatcagtcatggtgtaaactttgtatctgtttggtctgatttttctatgccttg

SEQ ID NO: 684280 - DNA, 1630 bp, Homo sapiens
tgtaggccaggcactgtgcaaggatctagaaataagcaaattactaagacagagtccctgcccttatgggacaatcaacatttattcattcatggattcgtttactcagcaaatacatattgaggatcttattccagacagtatagtaagtaccaaataaataattttaaaaagagaccaggtccttgacctcctgcaactacaatttcatggggaagacaggtatgaattaactagtcacacaaataaatgtgaaattatagctgtgaaagaggagaaggagtttattatgtgaaggggaggggaggaaggaggaacattccaggcagagatatatccaaaggccaggaccacgaagcacacaagatgctgggagacattcctcatcgctgaagtagaaagcacaagctgatacctggtgaggctgcagaggtaaaccagcagtccaggtcatgcaagaccattgttctcacagaaagaatgagcaaaacttgtctagagtcctgggaagtgccacagcttgcatcctgcacacttaaaacctgaacagggaacagcagtagcttcctgttcgtagaaagttcctagacacatagtttcatgggatttggctaagtgaaccttgtccaagttacccaacctttttctgaaatgtttcctatttctctcatgtcacattaaatccaaagcaggaaaaaacgactgaaaacaaatgccattatgaaaaggcaccatgccgttcaaaactcttcatgctgtgtgacatgttgtgttacatcttaaaatgttatatttaataaaaagtaagttggaaaggggttctgccagtagtaagccagtctggccaactgtcaagaaagcggcttgacagcttcagcagaagcgggaggtcatggccagtgttttacagctttggaaaatgtctaactatctgagcggatatatgtgttaaaacacagaatagatacgtatcctccagcaagatgatgtggctggggtttctcccgtcaggaactgaggctgttgagagctttgagaaggaagtcagggaagggaattctggtacaaactgccacataaagtaaaggtcttggaaaccagagaaagtcagaggcagaggaagtggtagcacctctgcaggcaatacccaggggaggacggcttgacttcctatcccctgctattaccatctcagtaaaataggtatgtatacgtataggtatgtgtgtgtgtgtgtgcatatgtacgcatgtacatgttttatgtgtgtacatgcatatgtgtatattatgtatgcatgtgtacatatggtatagatatgtgggtgtatcagagtatgtatttatagggcatatgtgtgtatgtatatacatgtgtctacatgtatgtatacatgtatatgtagatatgtgtgtgcacatccacacgtttcattcagagtctattggtacacggccaaagcactcaacagcgataaaagcacacgggttcatcaggtggaaaaggctggcacttgaatgcgtgggtccactcagcgaatcccgacgccwgaacaacaggccatgtgctcaacaaagtctgtgtgtgtgtgtgtgtgtgtgtgtgtgtgtgtgtgtgtgtgtgtctctct

SEQ ID NO: 684281 - DNA, 1245 bp, Homo sapiens
tgattggctgagactcagttatctgttacaaagccaaattcctaaattagatttatggtttgtttacagagttaggttttggttacataagggcttgagtatgcaaatatggaggctttctcaaatcacgtttcgtttaatttaacaccttcataaataggatggacttaagagatcatcccaacctccttactgtacagatcaagagatgggggtccggaaagctgctgatgttcatgctgtgagtttaacaccaggaaacaacaatttatcagtagaactgtgtgttagtttaaagaaagcaatggcagaatggaggcagaactctaaggaaaaatgaggaaagtgatgcttaagtagctagcggaccaacagaaatgtcagagaagaaatcatattctctgtctcataggcaccagtatttcctgggactgtttactgagtaggtgcttagtgaagattgaataaatgccaacgtacagaaaagcaacaccagaaatcagagagtgacaaccacagccttgtttctgctgcccaaatgttaatgggttgacttscattaaaaatcaaagacaaaacaggcagctacttaatggtttgccagccaaataaagaagctcatgctgtgagcagctaagataatagttcaaaggaatgctacccaaggaggacaggtaagcaatttccagattcagccaagggttccaggactaacataaggatgtacaattataaagaaagactgatgaggacctgcccaaagcatgtggagaaggccaagagggggttaggggaggtgctgcaaataccatgacaatagagaccactgggaacctcagagaaaagggaaaaggggcatatattttcaataaaatactgacacatgtaagagaaaatggaaatgtgaattagacataaatttatagaaaaataaagctaacattatctgcctttaatgcagacatttaaatttccagcagatggagatgttaccacgtgaaagagaagtttgacaggtggactcagcttcgctttctaaaacatgatggtttgtttcttaggagtgagacaaagagaagacccctaaaataggtagactcctgagctttaaataaataatactttttaaaagaaactttaagtgttacctgagttcctaattcagagggttagctttttaaatgatgaaagcattcgccagttgtttccttgttttagaagaatttggcaaaaatcatttgtttt

SEQ ID NO: 684282 - DNA, 627 bp, Homo sapiens
gaaatatgctgttttagattttagtcttagaataaattccaggtggaggatgaatgggtcagtgggtatgaattatgttgcctgatatctgtcttactttcccraaagctgtaccagtcatatgaagatacaactttcatcccgaacttgctttatgtgctgtccttaaaaaagagagaaatctttcttgttgattgtaagtatatacaacaaaggcttagaaggaaatattatggtctggtcagggaatctcaggcatgtagctcagaatcctggtcagcacagcttaggaaaagcatcttaaagatttttttctcagcccagaacccctcttccaaactgctctaggttcaagcaaaggttaccctcccttggccaggggacctcttgctgcctgccagccagggatgtctggatcttcttttgatcttattttcccccctcaacccagagctatttaatctctcctgggagagacagaggcatttgttatttggccatcaacagttaactgcttttgtggtttacacacataaacagaagacaaatcaaaactacactcaggatatcacactttctctgtaaaacctgagactttaacaagaacttactttaccttctttcaca

SEQ ID NO: 684283 - DNA, 1674 bp, Homo sapiens
cagtaatgtcctaggccttcacagtcactcaccactcactcactgacttacccagagcaacttctggtcctgtaagctccatttgtggtaagtgccttacacgagtgcaccatttttttaaaatcgtttatgctgcgtttttattgtgtcttttctatgtttaaatacactaatacttaccattgtgctacagttgccwacagtattcagcacagtaacatgctgtacagatttgtagcctaggaacaatagactgtatctatatatacagctatatatagcctaggagaattagattatatatttgtagtctaggtgtgcagtcggctataccatctcagtttgtgtaagtatgctccattatgttcacacaatgatgaaattgcttaatttctcagaatgaaaaatgtattccttcagcagggatacattcatttctgagaactatccctgttgttaagtgacacatgactggatataaagtatacataatacatacatatgtatctggaaaagaatctggaagaacataacccatccctgtaaagtggtttccttaggggtggggaagagctagaattatggctttctctttctttagtctacatttctctaatatttttacatgacaattatgtattatatttgaaatccaaggaagagaccaagtgcagtggctcacatttgtaatcccaacactttgggaggccaaggcaggaggattgcttgagcccaggagttcaagaccagcctgggtgacatagggagtcctagtgtcttaaaaaaaagaaattatccaggcaaggtgatgcatgcctgtggtcccagctactcaggaggatgaggacggagaatcgcttgagcctgggagagcgaggctgcagtgaggtgtgatagcaccactgtactccagcctgggtggcagagctagactctgtctcaaaaacaaacacacaaaaagccaaagaaagcaatgaatactaaaaatctaaaaaagaaaaattaaatgttaagaatcttcttgagctctccttttatagagaatttaaaagcttacctccttaagactgaaattgaaaatgaatagctacaaaaatgggaatagaatgttctaagcttcaggtcagtaagaaaagtaactatgggctaatattgttaaatcaaaacatattttaaaagatacacccagcactggaaatttcctattttctctagtgtttaaatcaacctctttaaacattatatatttttctgattatgtcagtaattcatgtttattccaagaatttggaaaataccaaaaagaacaaagaaggaaacagaaataacctataatcatgtttttcagagataaccaaaattaatattaatatttttgtgtatatatattaccctttagtcttttaattaacacatatgtatatttttaaaaaagggttcataactattttcatctgacaacacataatgaaggtgtccccttgccattctttggaatagcattgaatattaccattacttcttatttttgtaataaatattactataatccatatatttatgttaaattttttattaaaaaaattagacacaggctgggcgtggtggctcatgcctgtaatcctaagcattttgggaggccgaggtgggcgattgcctgagctcaggagcttg

SEQ ID NO: 684284 - DNA, 1674 bp, Homo sapiens
cagtaatgtcctaggccttcacagtcactcaccactcactcactgacttacccagagcaacttctggtcctgtaagctccatttgtggtaagtgccttacacgagtgcaccatttttttaaaatcgtttatgctgcgtttttattgtgtcttttctatgtttaaatacactaatacttaccattgtgctacagttgcctacagtattcagcacagtaacatgctgtacagatttgtagcctaggaacaatagactrtatctatatatacagctatatatagcctaggagaattagattatatatttgtagtctaggtgtgcagtcggctataccatctcagtttgtgtaagtatgctccattatgttcacacaatgatgaaattgcttaatttctcagaatgaaaaatgtattccttcagcagggatacattcatttctgagaactatccctgttgttaagtgacacatgactggatataaagtatacataatacatacatatgtatctggaaaagaatctggaagaacataacccatccctgtaaagtggtttccttaggggtggggaagagctagaattatggctttctctttctttagtctacatttctctaatatttttacatgacaattatgtattatatttgaaatccaaggaagagaccaagtgcagtggctcacatttgtaatcccaacactttgggaggccaaggcaggaggattgcttgagcccaggagttcaagaccagcctgggtgacatagggagtcctagtgtcttaaaaaaaagaaattatccaggcaaggtgatgcatgcctgtggtcccagctactcaggaggatgaggacggagaatcgcttgagcctgggagagcgaggctgcagtgaggtgtgatagcaccactgtactccagcctgggtggcagagctagactctgtctcaaaaacaaacacacaaaaagccaaagaaagcaatgaatactaaaaatctaaaaaagaaaaattaaatgttaagaatcttcttgagctctccttttatagagaatttaaaagcttacctccttaagactgaaattgaaaatgaatagctacaaaaatgggaatagaatgttctaagcttcaggtcagtaagaaaagtaactatgggctaatattgttaaatcaaaacatattttaaaagatacacccagcactggaaatttcctattttctctagtgtttaaatcaacctctttaaacattatatatttttctgattatgtcagtaattcatgtttattccaagaatttggaaaataccaaaaagaacaaagaaggaaacagaaataacctataatcatgtttttcagagataaccaaaattaatattaatatttttgtgtatatatattaccctttagtcttttaattaacacatatgtatatttttaaaaaagggttcataactattttcatctgacaacacataatgaaggtgtccccttgccattctttggaatagcattgaatattaccattacttcttatttttgtaataaatattactataatccatatatttatgttaaattttttattaaaaaaattagacacaggctgggcgtggtggctcatgcctgtaatcctaagcattttgggaggccgaggtgggcgattgcctgagctcaggagcttg

SEQ ID NO: 684285 - DNA, 1674 bp, Homo sapiens
cagtaatgtcctaggccttcacagtcactcaccactcactcactgacttacccagagcaacttctggtcctgtaagctccatttgtggtaagtgccttacacgagtgcaccatttttttaaaatcgtttatgctgcgtttttattgtgtcttttctatgtttaaatacactaatacttaccattgtgctacagttgcctacagtattcagcacagtaacatgctgtacagatttgtagcctaggaacaatagactgtatctatatatacagctatatatagcctaggagaattagattatatatttgtagtctaggtgtgcagtcggctataccatctcagtttgtgtaagtatgctccattatgttcacacaatgatgaaattgcttaatttctcagaatgaaaaatgtattccttcagcagggatacattcatttctgagaactatccctgttgttaagtgacacatgactggatataaagtatacataatacatacatatgtatctggaaaagaatctggaagaacataacccatccctgtaaagtggtttccttaggggtggggaagagctagaattatggctttctctttctttagtctacatttctctaatatttttacatgacaattatgtattatatttgaaatccaaggaagagaccaagtgcagtggctcacatttgtaatcccaacactttgggaggccaaggcaggaggattgcttgagcccaggagttcaagaccagcctgggtgacatagggagtcctagtgtcttaaaaaaaagaaattatccaggcaaggtgatgcatgcctgtggtcccagctactcaggaggatgaggacggagaatcgcttgagcctgggagagcgaggctgcagtgaggtgtgatagcaccactgtactccagcctgggtggcagagctagactctgtctcaaaaacaaacacacaaaaagccaaagaaagcaatgaatactaaaaatctaaaaaagaaaaattaaatgttaagaatcttcttgagctctccttttatagagaatttaaaagcttacctccttaagactgaaattgaaaatgaatagctacaaaaatgggaatagaatgttctaagcttcaggtcagtaagaaaagtaactatgggctaatattgttaaatcaaaacatattttaaaagatacacccagcactggaaatttcctattttctctagtgtttaaatcaacctctttaaacattatatatttttctgattatgtcagtaattcatgtttattccaagaatttggaaaataccaaaaagaacaaagaaggaaacagaaataacctataatcatgtttttcagagataaccaaaattaatattaatatttttgtgtatatatattaccctttagtcttttaattaacacatatgtatatttttaaaaaagggttcataactattttcatctgacaacacataatgaaggtgtccccttgccattctttggaatagcattgaatattaccattacttcttatttttgtaataaatattactataatccatatatttatgttaaattttttattaaaaaaattagacacaggctgggygtggtggctcatgcctgtaatcctaagcattttgggaggccgaggtgggcgattgcctgagctcaggagcttg

SEQ ID NO: 684286 - DNA, 833 bp, Homo sapiens
tttaaattctaggttttatgatccttaccttattatcacagatttcttctgtatttcttatctcaaatgtcttcctgctttattgtctgtggacatactctctacctcttctgaaaagttctctagagattctacactaggtcagatctttgctattggcaggacagacttcatccctgmactcacatatggcagaagagactagctacttttcatatgtcaactcaaaagatgagggatttgagggtaagaccatcgtaagtggctttcattttctttgtactctaaaaattttttccaaatgttcaataataaacattttttactttaatttacaattttaaaagatgagatatatatcatgagtagcctttgcttcctttcataaaccactatggctctattattttatccaaatcctttttgaagttatgtattttacccttttaacttatgagttcaagagcattgtaaattgccaatcatgatgaagtagtgatgtctttgatttattaaagacaaatatctaagtttgtcattttagagaattgttcttctttagtcaaacattgactattagttatgattctcataaaacttgcaaatgaatataaaacatctaagtgctattctcctttaattttttgtctctgtggtaagtagtaaaatgatttatagcaaagccactaatgtccatttagcagatgtttgctgggtgtggctacaccagaggctggctgtcctggttaagagcatgtgacctggaggccgggcgcggtggctcacgcctgtaatcccagcactttgggaggccgaggcgggcggattacgag

SEQ ID NO: 684287 - DNA, 658 bp, Homo sapiens
tataataaaattattagtgcacaataaaaagtggatactcagtaagttgtgtctaaattaataaattgatgagtgagtaaatatcgtacctgtccatgcctatataatcagacttttatctgcttacttatcattcttgcttcttaatgtattaaacttgtctctgtggacaagcatactatttttatcagtttcaataatttcattccaattcatgttcgtttaacaaaattatattttagttatatgaacatagttaacatttgttagaaaacagaaaaagtgaaaaattaaatgtatttgccttttcagtyaatttttttcatgttcaaagttacgtgaaactttcctcaattttttgtttaccttaattaagaattttattttctcatctaaagttcctttttcacttaacctttcccattcacatcatagctgcctccatgaaatacctaggacggttaaatttggccacagattctgacttttcataattgcaattcagattcccctgaacagaacccagctttaattccacagtggttccaaaccttttacttaaaactctaagtatccagatccagctctgattacttctctaagtagactatgctaggtgagatgcataaggcccttaagagatacaagtgttttccat

SEQ ID NO: 684288 - DNA, 658 bp, Homo sapiens
tataataaaattattagtgcacaataaaaagtggatactcagtaagttgtgtctaaattaataaattgatgagtgagtaaatatcgtacctgtccatgcctatataatcagacttttatctgcttacttatcattcttgcttcttaatgtattaaacttgtctctgtggacaagcatactatttttatcagtttcaataatttcattccaattcatgttcgtttaacaaaattatattttagttatatgaacatagttaacatttgttagaaaacagaaaaagtgaaaaattaaatgtatttgccttttcagtcaatttttttcatgttcaaagttacgtgaaactttcctcaattttttgtttaccttaattaagaattttattttctcatctaaagttcctttttcacttaacctttcccattcacatcatagctgcctccatgaaatacctaggacggttaaatttggccacagattctgacttttcataattgcaattcagattcccctgaacagaacccagctttaattccacagtggttccaaaccttttacttaaaactctaagtatccagatccagctctgattacttctctaagtagactrtgctaggtgagatgcataaggcccttaagagatacaagtgttttccat

SEQ ID NO: 684289 - DNA, 1456 bp, Homo sapiens
tgaactcattcttttcatggctgcatagtattccagatatatattatctttaaccctcttaccctaaagggaaattaggcccagtctccttcaaaaagggaaaagtgtggaggccatgatgctggggaaactgcattaggactgtggtccctgtacagccacaggagggaagtttttcaatggtgagtgagagttataactaagacctagatttgaatcttgacaccagcattagtaaaccatgtgccgttacccttagacaagttacctaacctctctatatcttagttcttagttttcttctctgtacagtggggattataatacatacctcataagatagtgttgatgattaaatgagataatacatagaaagatactttgcgtctggttgagaataaatmcttaaataagaagaaaccacagtgatagagaaaccacacattgttaatcccatgtgaatgaattcaggtaacatatacttccttccttcctgacatttccattttgatacctggaatggactagcttcagtttgattgttccaaacttgtcttgatcacgttagtaattaaagtttaaagccctggactttttcagggtgggaatccttatttcagaacccagagcaggctaaatggcccacccaacacagctatcctgtcatggttcctctttagaagttctgaaggttggcctctgagtccacctgaatacagaaataagctacattttttaaaaaaatagctttctccaagaatctttcatgtgtgcttttagcaggatgaagctgccctagggttaagcattgtgctatcaactgatggaagacagagacgcacccctgcaagagtaaggccgcacttccctttttcatatcctctctcaaactacctgctgggtgactgtttaattagtgggcaagcagtgattcctagaaattatggagtctttagtgttcacaaggatatagttcctaatgtttttctcagcagtatatacaaccacttcctacttttaaatagtaggctaatctgaatattaactacctgccaatttcaacacacctctcctataaacatttccttcctgggtagggaggaagcccaaacgatgtggtcctgtgtagttctttaactttcttttttatgattggtgcagagcatctgattatttccaggtgtttcagattttctcatggcctccttgttattttccccctttaagctcctttggcaatgaatgtgaccatgaggtccaaagctataaaggatgtgttcaccacttccctcttatgtctgtctctttatttaaccacaagttcactgtctttatccatgttaattccctgaggtattcacacagcatttgtgttgactgccttaattttgatcttctctaatcattccctgccagatggtagttaaagtttaatggcccctgtaaaaatagttcc

SEQ ID NO: 684290 - DNA, 2417 bp, Homo sapiens
gaaatgaacttgacttttgctcctaatactcaactaattactgatgccagctagtcccccaatcctgaggaaccagcaaaggtcagggaaatagttgcctctacatatttgcaataggcctgtgacatacaaatgcaatggtaataaggccgtataccaaagagccattcctctgtaactggacaatgcaaggtgcaaatcctggctgcaatgcttacttggacaagtcacctaacatcttagaatctcggatttctcatctgtacaacaggaataatgatagcacttgccttatagcattgttgtgaggattaaatggggctaaacacaacaagcacttagcacatagcaagcattcaataaatattagttttaaaaatacatagatttatgtggctatatggtctcctttagactatatagcctatacttgactaggagaatcaatcagacttaaaactctgtccatccagcttaggtaaccaattagatacatatgaaaattccatagtcactaccacctctgataccaaaaacactattggtaaacagtattaaactatttaaaagtatacagtatagattatataaaaattaaaattaaaatatatatcaaattcagtgcaagagattgaatttaaacatgatctctaagactccagtccaaaaatgtgatgactccatgataacttggtactggttattggtataatgagtttaccaaaggcaattactcagtttcattatattgccttttaatctcttaacaaaaatctagtccaaaattaaaattaaaggtattcaactcaagacacacacacaatgtttacataaggcccatcacttgggccttaactgttcactcctgtctgcagaaatctaaaagccacccaggccaccaacttaattatatccaggatgcgcaccagaggtgaaaagcctcctagaactgtttttcaatcatcatctctccaactgagctggactagtgacactaaaaccagcaattaaaagcctcaagtttagaaatacattcagtttcccaagtctccaaatggcaaaggttaagtgaattatgtggagataattcaccaaagtcccaagggagggtcctgctaacttcacattgctggttgtttcactcttatttttttcttctcaactgatatgcttcttgtcatggtgctgccaatgcaaacggcaggaaaataagaaaagttgcagatagggaaaataaaatcccttcaatgtgttttgcaaggggaagtcatgcgattaacacattcagtgtttctgtaacacagaaagctgtctcctctagctattttcaagaataattgtgagtaaatttacactcacctcatattaaaactacgttaaatctttactgtgttgctttgctacttaaattggatggcgtcgctgggcatcttactgtgtgagactataatgggaccggcaactctcctccaggctgaattagaaccacccattacacctcgagttgtgtggtaacacctccacagtgtttccaattaactttgtaagtttttaatcagtgacaaatgcatctttgtaaattcaatttaccttttattgcagcgctataaaccgtcttgcagcattccgatatgttgtgaacattttacttgctactgacataagacagctgttggacctacaacaaaggctaagctttatgagttacctgaattaggacgtaggtgaagtaattaaaccccaaagagaaagagggggaaaatagatagccctccatgatccacatacaccgataggtaggcaaggactcctgaagcaactctgaagcaactctgaagctgaaacattcaagattaaaatcccagaaactcccttctggtttaaactcacaatatgttgaaagaggtagataagtgaaaaggtcaggcacattttattaataaatccatacagctccttgtttttctttttaatcaaattcaaatgcatcctgttaaagagccatgggtgattagatcataaatctgcatgaccttgaagatgatgaaggaaatgcttctctgtaaagtgatcatcatgctgccagttccatcatttacacatttttacaggtgcaaggaaaaggtttaatttcaaattgcttgcaaaaatcactcaaaataaaatattactttataagatctccagataataatgtaaatgagctaaatgtactacttgaaaatgtatttttatttttgtttctatcttggctcctaacatctacaaaaagaaaaaactaagaggaaagagtagtataggtgtttgcctcactgtacttactctaggagtctagcttaggttttgtttgcatgttattaatgacacattattaactcattgytgcttgtagcatattatttacaattattaactaa

SEQ ID NO: 684291 - DNA, 2417 bp, Homo sapiens
gaaatgaacttgacttttgctcctaatactcaactaattactgatgccagctagtcccccaatcctgaggaaccagcaaaggtcagggaaatagttgcctctacatatttgcaataggcctgtgacatacaaatgcaatggtaataaggccgtataccaaagagccattcctctgtaactggacaatgcaaggtgcaaatcctggctgcaatgcttacttggacaagtcacctaacatcttagaatctcggatttctcatctgtacaacaggaataatgatagcacttgccttatagcattgttgtgaggattaaatggggctaaacacaacaagcacttagcacatagcaagcattcaataaatattagttttaaaaatacatagatttatgtggctatatggtctcctttagactatatagcctatacttgactaggagaatcaatcagacttaaaactctgtccatccagcttaggtaaccaattagatacatatgaaaattccatagtcactaccacctctgataccaaaaacactattggtaaacagtattaaactatttaaaagtatacagtatagattatataaaaattaaaattaaaatatatatcaaattcagtgcaagagattgaatttaaacatgatctctaagactccagtccaaaaatgtgatgactccatgataacttggtactggttattggtataatgagtttaccaaaggcaattactcagtttcattatattgccttttaatctcttaacaaaaatctagtccaaaattaaaattaaaggtattcaactcaagacacacacacaatgtttacataaggcccatcacttgggccttaactgttcactcctgtctgcagaaatctaaaagccacccaggccaccaacttaattatatccaggatgcgcaccagaggtgaaaagcctcctagaactgtttttcaatcatcatctctccaactgagctggactagtgacactaaaaccagcaattaaaagcctcaagtttagaaatacattcagtttcccaagtctccaaatggcaaaggttaagtgaattatgtggagataattcaccaaagtcccaagggagggtcctgctaacttcacattgctggttgtttcactcttatttttttcttctcaactgatatgcttcttgtcatggtgctgccaatgcaaacggcaggaaaataagaaaagttgcagatagggaaaataaaatcccttcaatgtgttttgcaaggggaagtcatgcgattaacacattcagtgtttctgtaacacagaaagctgtctcctctagctattttcaagaataattgtgagtaaatttacactcacctcatattaaaactacgttaaatctttactgtgttgctttgctacttaaattggatggcgtcgctgggcatcttactgtgtgagactataatgggaccggcaactctcctccaggctgaattagaaccacccattacacctcgagttgtgtggtaacacctccacagtgtttccaattaactttgtaagtttttaatcagtgacaaatgcatctttgtaaattcaatttaccttttattgcagcgctataaaccgtcttgcagcattccgatatgttgtgaacattttacttgctactgacataagacagctgttggacctacaacaaaggctaagctttatgagttacctgaattaggacgtaggtgaagtaattaaaccccaaagagaaagagggggaaaatagatagccctccatgatccacatacaccgataggtaggcaaggactcctgaagcaactctgaagcaactctgaagctgaaacattcaagattaaaatcccagaaactcccttctggtttaaactcacaatatgttgaaagaggtagataagtgaaaaggtcaggcacattttattaataaatccatacagctccttgtttttctttttaatcaaattcaaatgcatcctgttaaagagccatgggtgattagatcataaatctgcatgaccttgaagatgatgaaggaaatgcttctctgtaaagtgatcatcatgctgccagttccatcatttacacatttttacaggtgcaaggaaaaggtttaatttcaaattgcttgcaaaaatcactcaaaataaaatattactttataagatctccagataataatgtaaatgagctaaatgtactacttgaaaatgtatttttatttttgtttctatcttggctcctaacatctacaaaaagaaaaaactaagaggaaagagtagtataggtgtttgcctcactgtacttactctaggagtctagcttaggttttgtttgcatgttattaatgacacattattaactcattgtygcttgtagcatattatttacaattattaactaa

SEQ ID NO: 684292 - DNA, 1294 bp, Homo sapiens
catgatgatctcatcttgagacctttcatgtcattgtatctgcaaagaacggttttttaaataaggtcaaatccacaggttctgggggttcagatttgaacatatctttctgagggccactattcaacccattacaattacatacaaaagcagaggcctttgcacwcttagtctttaacttaagcacatatgcaaagcccctttggccatgtaaaatagcataattaggttccaaggattaggaggtggacatctttgaggggccattattctgtccgccatagttggaagcatgggtttctttctaagaacagtaggaatcaatgggaggttttaagcagaggagtgaaaccagcagaatcaggatgcaaaagcagaagaaccatactggaagcagggacaaaaggcttatccatagctggaggatataaagtgaacataggagcccgctaaacagtattttaaaactcatataatatatggtcatttgtatgataatggtaaataatatgtttttattcttttatagtctgggcttggtctttctcagttaatcctctgaggtttttataaggtcctgagttccaggacccctttggttattgttagaggtggacagctggccatggtggatcccagatgactattttggtcaagatactggtgcccacgatgagcaggcaggtgtgtgtgtgcctggaggaatgctgctttggcaggcacatttccacaacaccttaccaaggcactacctacacgagcaagatgttggaaccatctcaagaacaagcaaatggctaaacagcaagaggaaagaatgtcatcaaactataatccaggaatgtgcagtatgtggcttcttggaaccactttataaacaccaagtaaaaagagtgcacagaatcgatcatactgagattacacgtgtatttaaaggatacatatgtcagtaaggatttgaatagagttttatattttctgtgatgtttgtgaagtgtattccaacttgtctgtgcatctggcaacagcttcctgtctctgatcttgcatagagttgctcagaattgcctggaatgccttccaatgactccttttggcttgcctcttcttgctcctgtcttcactggccttctaatctcattcctctctgcttcatctctccctacctatctcaatgctacttgttagaataaaagtcttgagttcgctggctaccccctggctgctcttggtgtctcggctcccctgtcattaagtgtgggtaagaacctctggcttcctgcccaggccttta

SEQ ID NO: 684293 - DNA, 1294 bp, Homo sapiens
catgatgatctcatcttgagacctttcatgtcattgtatctgcaaagaacggttttttaaataaggtcaaatccacaggttctgggggttcagatttgaacatatctttctgagggccactattcaacccattacaattacatacaaaagcagaggcctttgcactcttagtctttaacttaagcacatatgcaaagcccctttggccatgtaaaatagcataattaggttccaaggattaggaggtggacatctttgaggggccattattctgtccgccatagttggaagcatgggtttctttctaagaacagtaggaatcaatgggaggttttaagcagaggagtgaaaccagcagaatcaggatgcaaaagcagaagaaccatactggaagcagggacaaaaggcttatccatagctggaggatataaagtgaacataggagcccgctaaacagtattttaaaactcatataatatatggtcatttgtatgataatggtaaataatatgtttttattcttttatagtctgggcttggtctttctcagttaatcctctgaggtttttataaggtcctgagttccaggacccctttggttattgttagaggtggacagctggccatggtggatcccagatgactattttggtcaagatactggtgcccacgatgagcaggcaggtgtgtgtgtgcctggaggaatgctgctttggcaggcacatttccacaacaccttaccaaggcactacctacacgagcaagatgttggaaccatctcaagaacaagcaaatggctaaacagcaagaggaaagaatgtcatcaaactataatccaggaatgtgcagtatgtggcttcttggaaccactttataaacaccaagtaaaaagagtgcacagaatcgatcatactgagattacacgtgtatttaaaggatacatatgtcagtaaggatttgaatagagttttatattttctgtgatgtttgtgaagtgtattccaacttgtctgtgcatctggcaacagcttcctgtctctgatcttgcatagagttgctcagaattgcctggaatgccttccaatgactccttttggcttgcctcttcttgctcctgtcttcactggccttctaatctcattcctctctgcttcatctctccctacctatctcaaygctacttgttagaataaaagtcttgagttcgctggctaccccctggctgctcttggtgtctcggctcccctgtcattaagtgtgggtaagaacctctggcttcctgcccaggccttta

SEQ ID NO: 684294 - DNA, 2473 bp, Homo sapiens
  misc_feature 587, 588, 589, 590, 591, 592, 593, 594, 595, 596, 597, 598,599, 600, 601, 602, 603, 604, 605, 606, 607, 608, 609, 610,611, 612, 613, 614, 615, 616, 617, 618, 619, 620, 621, 622,623, 624, 625, 626, 627, 628, 629, 630, 631, 632, 633: n = A,T,C or G
  misc_feature 634, 635, 636, 637, 638, 639, 640, 641, 642, 643, 644, 645,646, 647, 648, 649, 650, 651, 652, 653, 654, 655, 656, 657,658, 659, 660, 661, 662, 663, 664, 665, 666, 667, 668, 669,670, 671, 672, 673, 674, 675, 676, 677, 678, 679, 680: n = A,T,C or G
  misc_feature 681, 682, 683, 684, 685, 686: n = A,T,C or G
gttttagaaataattagataaaagtattttaataaagtaagttaggtragtagacctctgccaaaaatagaaccaaaagcagcaggagagtagggtttgcttaaagccaaactgtttgcccacattatgaaaatgccaatggaatgtgctaggactatggggctaatatgggtttggggtaggtggcatcatgactataagactgcccagaaagaggtactgagtgagaaagtggaggcaggaagggcagggaagagacaaagaacataaggtttttgtttttgaaatatgtaaacatgtaaaatcaagcaactacgcttgagaatgttttgggcaatgcagacctgtagctttgcatgctaattggccaaggcagtgtgggtaagggcatcatgtatctgcatggccactttgcttccactgcctggaaggaagttcactctcctgtgtcctgtggaaacaaagctgggactggagtgatccaggcatttcaagtggggcttagaaaagggcataaaatgaataatatgtacctaacatcacagctttcaatagctatctcccaagaataaaaaacaaagaattcnnnnnnnnnnnnnnnnnnnnnnnnnnnnnnnnnnnnnnnnnnnnnnnnnnnnnnnnnnnnnnnnnnnnnnnnnnnnnnnnnnnnnnnnnnnnnnnnnnnngattgaagtcgactgctggaaaaaaatagcagagcaacaagatccacacatttagaacctcatagaatgtgacacattattcataatggtgcaattctttcttttttattccagtaagcaaatttactaaatcactaatttgaaaaaaaaaattttttttttgagatggagtgtcactctgttgccgggctggagtgcagtggcacgatctctgctcactgcaacctccgcctcgcagcttcaagtgattgtcctgcctcagcctccccagtagctgggattacaggcacacaccaccacgcccagctaatttttgtatttttaatagagacagggtttcaccatgttggccagaatgatgtcgatctcctgaactcgtgatccgcccgcctcagcctcccaaagtagcctacattgcctctactttgaagggacaaagttgtcctggtttttttttcccttttattatttcattataactatcctaaaacttacatacattgcctatgtttggcattccataacataataattataataatcccccaatgtcagaaatgtatgtgtgagttcccatgtttattggcaatttataagctttttaatattgtactattttaaactaaaatgtagaaagaatattatgtttatatacagtcagataaattattaactgttgtaatttaagctgaaaatgaaactattttagtatcagtatagaagaaaagtatagtttctaatcatctataattttaaaatgcaaagcctataaaactttcaagatgttttgcctgtttgtttttaagatttataataattttctatctttagcaagtagctatttttaagccaggtaacttctttatttgaactgtattatactctcagaccctcatcctgcctagaaatgaataagtaataaataattactctgtattatttacttcttttattttatagtaaaatattcatttggatggacattaatttgaaatcattttgatgttttttttttttgagacagagtctctctctgttgcccagactagagtgcagtggtgcaatcatagctcactgcttccttgaactcctgagctaaagcgatcctcccacctcagcctcccaaagtgttgggattacaggtgtgaagcaccatgcccagtcaaaaaaaatttttttaatgtcaacagaaaagtttccaagcatccagttaaacagataatttgtctacactggggaggagaagtatgccataactctggtgtgtgtgtgtgtgtgtgtgtgtgtgtgtgtgtgtgtgtgtgtgtgtacatgcatgtgtaaagagagtatgtgtgtgcatgcatgtgtaaagtaccatgggtattcaaaggaacaggtccaagtttaggaagaacaggccatgctgacttggcggtgtatacctagaacctgttcgttgatgtcagtaaacttagtacctttttttcttaggccagagaatatgtcatcagactatgaatctgaattgctttctctctttttcttactgatatttaagaatatgaaagaaaaaggtctttgtatccaaaagcattgtgatgaagcttagccatgaatttcaaatgctgatatttctaatgttttaacaaaatctctatcagccaacctaatgctcccagtaatcagcaatatctcttgtataaaatagttcctgaaagaaaaaatttaaaatacgcaatctctttagagatttcatatcttattgtatttcattgggtttgtgacatcattttgtgccctatttt

SEQ ID NO: 684295 - DNA, 2473 bp, Homo sapiens
  misc_feature 587, 588, 589, 590, 591, 592, 593, 594, 595, 596, 597, 598,599, 600, 601, 602, 603, 604, 605, 606, 607, 608, 609, 610,611, 612, 613, 614, 615, 616, 617, 618, 619, 620, 621, 622,623, 624, 625, 626, 627, 628, 629, 630, 631, 632, 633: n = A,T,C or G
  misc_feature 634, 635, 636, 637, 638, 639, 640, 641, 642, 643, 644, 645,646, 647, 648, 649, 650, 651, 652, 653, 654, 655, 656, 657,658, 659, 660, 661, 662, 663, 664, 665, 666, 667, 668, 669,670, 671, 672, 673, 674, 675, 676, 677, 678, 679, 680: n = A,T,C or G
  misc_feature 681, 682, 683, 684, 685, 686: n = A,T,C or G
gttttagaaataattagataaaagtattttaataaagtaagttaggtaagtagacctctgccaaaaatagaaccaaaagcagcaggagagtagggtttgcttaaagccaaactgtttgcccacattatgaaaatgccaatggaatgtgctaggactatggggctaatatgggtttggggtaggtggcatcatgactataagactgcccagaaagaggtactgagtgagaaagtggaggcaggaagggcagggaagagacaaagaacataaggtttttgtttttgaaatatgtaaacatgtaaaatcaagcaactacgcttgagaatgttttgggcaatgcagacctgtrgctttgcatgctaattggccaaggcagtgtgggtaagggcatcatgtatctgcatggccactttgcttccactgcctggaaggaagttcactctcctgtgtcctgtggaaacaaagctgggactggagtgatccaggcatttcaagtggggcttagaaaagggcataaaatgaataatatgtacctaacatcacagctttcaatagctatctcccaagaataaaaaacaaagaattcnnnnnnnnnnnnnnnnnnnnnnnnnnnnnnnnnnnnnnnnnnnnnnnnnnnnnnnnnnnnnnnnnnnnnnnnnnnnnnnnnnnnnnnnnnnnnnnnnnnngattgaagtcgactgctggaaaaaaatagcagagcaacaagatccacacatttagaacctcatagaatgtgacacattattcataatggtgcaattctttcttttttattccagtaagcaaatttactaaatcactaatttgaaaaaaaaaattttttttttgagatggagtgtcactctgttgccgggctggagtgcagtggcacgatctctgctcactgcaacctccgcctcgcagcttcaagtgattgtcctgcctcagcctccccagtagctgggattacaggcacacaccaccacgcccagctaatttttgtatttttaatagagacagggtttcaccatgttggccagaatgatgtcgatctcctgaactcgtgatccgcccgcctcagcctcccaaagtagcctacattgcctctactttgaagggacaaagttgtcctggtttttttttcccttttattatttcattataactatcctaaaacttacatacattgcctatgtttggcattccataacataataattataataatcccccaatgtcagaaatgtatgtgtgagttcccatgtttattggcaatttataagctttttaatattgtactattttaaactaaaatgtagaaagaatattatgtttatatacagtcagataaattattaactgttgtaatttaagctgaaaatgaaactattttagtatcagtatagaagaaaagtatagtttctaatcatctataattttaaaatgcaaagcctataaaactttcaagatgttttgcctgtttgtttttaagatttataataattttctatctttagcaagtagctatttttaagccaggtaacttctttatttgaactgtattatactctcagaccctcatcctgcctagaaatgaataagtaataaataattactctgtattatttacttcttttattttatagtaaaatattcatttggatggacattaatttgaaatcattttgatgttttttttttttgagacagagtctctctctgttgcccagactagagtgcagtggtgcaatcatagctcactgcttccttgaactcctgagctaaagcgatcctcccacctcagcctcccaaagtgttgggattacaggtgtgaagcaccatgcccagtcaaaaaaaatttttttaatgtcaacagaaaagtttccaagcatccagttaaacagataatttgtctacactggggaggagaagtatgccataactctggtgtgtgtgtgtgtgtgtgtgtgtgtgtgtgtgtgtgtgtgtgtgtgtacatgcatgtgtaaagagagtatgtgtgtgcatgcatgtgtaaagtaccatgggtattcaaaggaacaggtccaagtttaggaagaacaggccatgctgacttggcggtgtatacctagaacctgttcgttgatgtcagtaaacttagtacctttttttcttaggccagagaatatgtcatcagactatgaatctgaattgctttctctctttttcttactgatatttaagaatatgaaagaaaaaggtctttgtatccaaaagcattgtgatgaagcttagccatgaatttcaaatgctgatatttctaatgttttaacaaaatctctatcagccaacctaatgctcccagtaatcagcaatatctcttgtataaaatagttcctgaaagaaaaaatttaaaatacgcaatctctttagagatttcatatcttattgtatttcattgggtttgtgacatcattttgtgccctatttt

SEQ ID NO: 684296 - DNA, 595 bp, Homo sapiens
ttgaatctgtttacttatatctactatgtttcctatgaagtgagaagccaaaagcttatggcttgcttttgggtcagcgggggccaagactgtgaccaactggtaatttcaaaaaatacagcacagaagtggaataatctctttaaggaatgccatcctcaaagtcagagggcaaatctctggaagtgagcccctctgccagtggagagagaggggttgaggtggggggtaactgatggatctttgagcccaaggaggcaggaaaggtgggaatactagaggaaaaacagcacttccattgtgcctggagggaggaaaaccaccagggtatagatgtagacagggacagcttccttcccacgacttctcattccttatgaagttgggagtgtgatattctttggaaggaacagagtatggttccctccataccctggaaagaagtggtgggacaagagatttgaggaatgggaagaatttgaattggctgccatggagaccggcagggagagctgatcgggatacccagagggattgttggtctgccctgggggcccttgcagtcggagaccatgaacttrtacttgcccagcca

SEQ ID NO: 684297 - DNA, 764 bp, Homo sapiens
gatgtcctacccctctgtttagcctgcctcattcttctctctcagcgacctgcccagtccaggcctctccagatggtcccctggcttctgcatccctctttcacctcctttttcctcaaccaagacaaaccactcctgtccagtctatcagggcctccccactgaaaccaggtaccccagctgaaaaacaaaccagtaaataaatgtcctcccccacagctgggaagagctgctaatggcttctagtggttctgtactctcaaggatgttcttttwttaatttaatttttgaaaagccaatacatgcatatggctcaaaattcaaacactataaaaattcccattcctgtgcctgcctcattgcatcggggcaattcccatcccaactctcagtaactgtcttttattagtttcttgtgtatcgtttcagtgtttctttatactcatataaccaaatacagacatatttacagagaattcttaagtgttctcagaaccataagccaaaggaatcttgctaacaatagaacttcaggcactttgtaaattttattgagcaacaagtctttcccagggccccttttgtcacaccgtataagtggctactttcttgtagttggagttccttgctctgaagaaaattggttccaacaggactttgtaacaatgtcatcacccagagagaaccacaatctgcatctcatttccaggtatgaaagggtgaaggggtggtgttggagaagtcctgagacccctctctttat

SEQ ID NO: 684298 - DNA, 595 bp, Homo sapiens
tcacttaagatctccttaaaagcaagccctgggtgcctcatctccctcacaccaagcagtctccaaggtgttttgctagataaaaggccatctcctcctgagagaatcatgtcgtcccctgccctcacccccagcagaagcagcagttcctctgatcatatgtggctgtgtatcagcagtttctcctacacttcaagaagaatcatgatgcaacagtgagctgcaggcatggaggtgaggaaggctggacaaagccaaacccatgagaagggcattacctgggccctgacggaggggagaggagccctggggtggagtggggctgggggaggaaagtgtctggagccctgtgctcaccatgtggtcctgcagagcagccagggcatcacctggaagctcatcaatcatgcasaccctcaggtcccacccaggcctcctggatcaggttgtgcatcctccagatccctaggtgatttggttataaagtttgagaaacactgagtctgcaggactccatgatcattagatcaggggagagagtctctaggtcctttctttgaaccttcccacacagcaactgtgaataataaatgcc

SEQ ID NO: 684299 - DNA, 595 bp, Homo sapiens
tcacttaagatctccttaaaagcaagccctgggtgcctcatctccctcacaccaagcagtctccaaggtgttttgctagataaaaggccatctcctcctgagagaatcatgtcgtcccctgccctcacccccagcagaagcagcagttcctctgatcatatgtggctgtgtatcagcagtttctcctacacttcaagaagaatcatgatgcaacagtgagctgcaggcatggaggtgaggaaggctggacaaagccaaacccatgagaagggcattacctgggccctgacggaggggagaggagccctggggtggagtggggctgggggaggaaagtgtctggagccctgtgctcaccatgtggtcctgcagagcagccagggcatcacctggaagctcatcaatcatgcagaccctcaggtcccacccaggcctcctggatcaggttgtgcatcctccagatccctaggtgrtttggttataaagtttgagaaacactgagtctgcaggactccatgatcattagatcaggggagagagtctctaggtcctttctttgaaccttcccacacagcaactgtgaataataaatgcc

SEQ ID NO: 684300 - DNA, 2322 bp, Homo sapiens
  misc_feature 1185, 1186, 1187, 1188, 1189, 1190, 1191, 1192, 1193, 1194,1195, 1196, 1197, 1198, 1199, 1200, 1201, 1202, 1203, 1204,1205, 1206, 1207, 1208, 1209, 1210, 1211, 1212, 1213, 1214,1215, 1216, 1217, 1218, 1219, 1220, 1221, 1222, 1223: n = A,T,C or G
  misc_feature 1224, 1225, 1226, 1227, 1228, 1229, 1230, 1231, 1232, 1233,1234, 1235, 1236, 1237, 1238, 1239, 1240, 1241, 1242, 1243,1244, 1245, 1246, 1247, 1248, 1249, 1250, 1251, 1252, 1253,1254, 1255, 1256, 1257, 1258, 1259, 1260, 1261, 1262: n = A,T,C or G
  misc_feature 1263, 1264, 1265, 1266, 1267, 1268, 1269, 1270, 1271, 1272,1273, 1274, 1275, 1276, 1277, 1278, 1279, 1280, 1281, 1282,1283, 1284: n = A,T,C or G
ctctcctctggaagctgcctggcctgcagcttcacctagctacagcccccaggccaagccccaggaagtttatctccaagatctctctccagaaatgtcatttccagctgctttctctgaatccagtgctaatgtctcctccgtgaagtctgctcaactgccccaggcaaatccaaaggctctaggctctgtgctcccatcaaatgaggcacattcatttctgcacacattacttaggcgtatattattgcccagtaaccatamaggttgtgattacatactttatctcatttaatccttgagctatgagataggtactactattcccatttcacagctatgaaaatttaggctagtgggttttgaagctagaatttaaacctggagtcctaattccaaatccaatacttcttaaccacacaagtgcaacatttttcatagatttagtataggacttatattatgcaagtgtgtctttaccactaagctgcaccaccttccggggtccccatcatatcttattcatttgtgtttcccaatgcaaagtacagtacctacgatagaatctatgctgaatagactaggttgaactgaattattcagcaaacagttaccaaaagagtgtgtgctggaccatttgcaaggcacaaggaccataaagatgaaaagattaccccccaccaccacatcccccaccccaccagcaaaaaacacccctgcataagacataaggacattgctatttatttaggttcttctagcaatggaagaatgaacagagtgtgctggaagcctcaggaagagcactggagtctgcatacaggaaagggcaggtgggggaagcggccaccacagcagatgccagagcctgagcaagacaacacaagatagaaatctgccatgtgggcaagcaggacaggacatttccagggaagagcagaggctacaacacagaggtgtgagagagcctggttttcctaggactttaagggaataataaatagcactgtggagggagtgggtttcctaatgagtgacccatatattgaactccttctacccaaaactagggccattcctacccaaagcagagcccaccccaatccatgaacgttggaaaacagacctgaatgcattttgcttcaagacaagaaagggtcgatgcccagctgagtgtgttctgtnnnnnnnnnnnnnnnnnnnnnnnnnnnnnnnnnnnnnnnnnnnnnnnnnnnnnnnnnnnnnnnnnnnnnnnnnnnnnnnnnnnnnnnnnnnnnnnnnnnnaatggcctttgctccagaggggacactatatcttccaaggctgttcactacataaacatgcttagacgaggctgagaaagacagtccaggacaaaaggaaagtcagtacctttgtgtttaaaggtactgactttgtgtttaagtgcaactgtaagatgcctactttcatagggagttacaaatgtaaatgcgtacagggaccaggcaagtaggtgtgtgagcgaggtgactagatataagaactgggagtagtggggattgcagaagataggagaggccatgctctatttgaaactggcagccaatactcagttccaactgattatttccacggaagaatgaggatcccaagttgtttcacctcttttttcccaaaagaactaggaaatgtgaatttttatgtgctatatcacccaccctttaaatgttggtaatgaattagaatttaaaatacaggtgcagtggctcacagcttaatcccagtactttgggaggtggaggcaggaggattgcttgaggtcaggagtttgagaccagcctgggcaacatagtgagaccttgtctctatcacattaaaaaataaaaataaaataatgttaagtggccaagagaaaacccgaagaagcagtggttggaactgatggagcagccttataaaggaagaagcaggctctgatagacacctgatctcccccaagtgggtagttaaagccctggttgatcacagccttaatggtaagcccaatcaattaagagaacaaaaagctagggattgtggagagaactctgctagaatcacaatcctgtcctcttgccctactccaacttcttctccaagaaagaaagaatagcttattttattgggagttcagacaaaagaaccatgcatgcccggactggctcactcctatccttctctttgagatttgcctatctccaaagaaagtcactggatgtctatgccatatgttttacagcagccaatctacatagcaagaggggcaggaggtcagggaacagggtcctgtgggctgttta

SEQ ID NO: 684301 - DNA, 2322 bp, Homo sapiens
  misc_feature 1185, 1186, 1187, 1188, 1189, 1190, 1191, 1192, 1193, 1194,1195, 1196, 1197, 1198, 1199, 1200, 1201, 1202, 1203, 1204,1205, 1206, 1207, 1208, 1209, 1210, 1211, 1212, 1213, 1214,1215, 1216, 1217, 1218, 1219, 1220, 1221, 1222, 1223: n = A,T,C or G
  misc_feature 1224, 1225, 1226, 1227, 1228, 1229, 1230, 1231, 1232, 1233,1234, 1235, 1236, 1237, 1238, 1239, 1240, 1241, 1242, 1243,1244, 1245, 1246, 1247, 1248, 1249, 1250, 1251, 1252, 1253,1254, 1255, 1256, 1257, 1258, 1259, 1260, 1261, 1262: n = A,T,C or G
  misc_feature 1263, 1264, 1265, 1266, 1267, 1268, 1269, 1270, 1271, 1272,1273, 1274, 1275, 1276, 1277, 1278, 1279, 1280, 1281, 1282,1283, 1284: n = A,T,C or G
ctctcctctggaagctgcctggcctgcagcttcacctagctacagcccccaggccaagccccaggaagtttatctccaagatctctctccagaaatgtcatttccagctgctttctctgaatccagtgctaatgtctcctccgtgaagtctgctcaactgccccaggcaaatccaaaggctctaggctctgtgctcccatcaaatgaggcacattcatttctgcacacattacttaggcgtatattattgcccagtaaccatacaggttgtgattacatactttatctcatttaatccttgagctatgagataggtactactattcccatytcacagctatgaaaatttaggctagtgggttttgaagctagaatttaaacctggagtcctaattccaaatccaatacttcttaaccacacaagtgcaacatttttcatagatttagtataggacttatattatgcaagtgtgtctttaccactaagctgcaccaccttccggggtccccatcatatcttattcatttgtgtttcccaatgcaaagtacagtacctacgatagaatctatgctgaatagactaggttgaactgaattattcagcaaacagttaccaaaagagtgtgtgctggaccatttgcaaggcacaaggaccataaagatgaaaagattaccccccaccaccacatcccccaccccaccagcaaaaaacacccctgcataagacataaggacattgctatttatttaggttcttctagcaatggaagaatgaacagagtgtgctggaagcctcaggaagagcactggagtctgcatacaggaaagggcaggtgggggaagcggccaccacagcagatgccagagcctgagcaagacaacacaagatagaaatctgccatgtgggcaagcaggacaggacatttccagggaagagcagaggctacaacacagaggtgtgagagagcctggttttcctaggactttaagggaataataaatagcactgtggagggagtgggtttcctaatgagtgacccatatattgaactccttctacccaaaactagggccattcctacccaaagcagagcccaccccaatccatgaacgttggaaaacagacctgaatgcattttgcttcaagacaagaaagggtcgatgcccagctgagtgtgttctgtnnnnnnnnnnnnnnnnnnnnnnnnnnnnnnnnnnnnnnnnnnnnnnnnnnnnnnnnnnnnnnnnnnnnnnnnnnnnnnnnnnnnnnnnnnnnnnnnnnnnaatggcctttgctccagaggggacactatatcttccaaggctgttcactacataaacatgcttagacgaggctgagaaagacagtccaggacaaaaggaaagtcagtacctttgtgtttaaaggtactgactttgtgtttaagtgcaactgtaagatgcctactttcatagggagttacaaatgtaaatgcgtacagggaccaggcaagtaggtgtgtgagcgaggtgactagatataagaactgggagtagtggggattgcagaagataggagaggccatgctctatttgaaactggcagccaatactcagttccaactgattatttccacggaagaatgaggatcccaagttgtttcacctcttttttcccaaaagaactaggaaatgtgaatttttatgtgctatatcacccaccctttaaatgttggtaatgaattagaatttaaaatacaggtgcagtggctcacagcttaatcccagtactttgggaggtggaggcaggaggattgcttgaggtcaggagtttgagaccagcctgggcaacatagtgagaccttgtctctatcacattaaaaaataaaaataaaataatgttaagtggccaagagaaaacccgaagaagcagtggttggaactgatggagcagccttataaaggaagaagcaggctctgatagacacctgatctcccccaagtgggtagttaaagccctggttgatcacagccttaatggtaagcccaatcaattaagagaacaaaaagctagggattgtggagagaactctgctagaatcacaatcctgtcctcttgccctactccaacttcttctccaagaaagaaagaatagcttattttattgggagttcagacaaaagaaccatgcatgcccggactggctcactcctatccttctctttgagatttgcctatctccaaagaaagtcactggatgtctatgccatatgttttacagcagccaatctacatagcaagaggggcaggaggtcagggaacagggtcctgtgggctgttta

SEQ ID NO: 684302 - DNA, 968 bp, Homo sapiens
aaaaaaaaaactagaaaaaaaccttccaaacaagaaaaaaaccaaatggattacatattccccaaacaatcctttgtgcgtattatcatgtaaaacaaggcttcagcaaaagggaagcaacatacacttcactgttatgttttctgacagtgtttttwttttaatacactttatggctgcttaagacctaaaacttgacttaaaaatgattggtagacttgacattcttttgtgaaatttaaaaatccagtaaaaattatttgtgtgtgtgtgtgaaatggattaggtataagacaatgcggggggggagtagagactgtgatatgtgaatagacatgagctgtctaaaagcaattaaattaaatttaaacaaatattgttaccctgatctgcctaaagcagtttaaattcatatactgggtgttcttcacttgagcttcaattgatgggaaagaaaatgccctttgggagtggcttaccactgcgttggccggggccaggtggacttttctcccttgtggttatgaagttgaaggtgacttccagttcagaaaggctaaaagcaatttatgtatctgtaggatcctttgctttgccatttgtctcctctttaaattggaaaatggttatttagctctgactggatcaatctattgaacatatacatgctgtctgaagatcctatgatgacaatcatcataaaattgcccaggaattggaaatctttaatcatgcattttgaacattctagccaatttttttttcatggtctaaaacacattatagttggaaggaaacatctgttgcttttcatgagagctttggaacccaatatgcttcatttacacggtcattttatgtgcgtcgggcacacttaaaaattttactcatcactgaattatctactcggcacattccacataagcagaaataaatgtcaacctccatcaaatccactggttaaagcc

SEQ ID NO: 684303 - DNA, 1315 bp, Homo sapiens
gatacacattgtttggatttttaaaaactctattaaatgtttaagtggttgtgaatatgaggaataattaaatgttaaccccagctgattagtgaacatataagaaaatggggggaactgatcccaaaagatcttctcttctaaggagaacttcacttgaggggcaaacactagaagatacaattgttattgtaaaacaaacactaatgagagtctgtcaaataattttaaaagaaaatagaacgcatttgcaactttcaaatgcatttgatgcccaacaatttcatcacctaccctatgtttaaaactgggaggcaatccagaaactaaaaggaatcagaaatttgcaaaaatatgtttgcgatacactatccaacacttgtactgacaacattagwgtagatatttcaacatatgttaattttaaggagtaagttcggcagatgggcttctaaattatcaaatttcaattaagatgttactaatcaagttaccaaaaaatttaattttcaggccgaggcaggcggatcatgaggtcaggagatcaagaccatcctggctaacatggtgaaaccccgtctctactaaaatacaaaaaaattagctgggcatggtggcgggcacctgtagtcccagctactccggaggctgaggcaggagaatggcatgaacctgggaggcggagcttgcagtgagcagagatcgcgccactgcactccagcctgggtgacagagcaagactccatctcaaaaccaaaaaaaaaaaaaaaaaaaaaaaagatttaattttcaaaatggtaactcttacttgttgctctgctgtaaaaactataaataatggcaatacctctcactccatctgatcttaaataatttaatgaaaaatatctaccaatatatttctaagaaaataaaagtaatccctatgagatatttttgacatttttttcaattgaactagagaaagaaaaatggaaacaaagtataaaaattcttctgtttcttcaaattatctgaatggctaccttccttcattataagggtaactgcttcttaatttcttcttttataaaaatcacttcgcagaagaacaacatatttcatttgtattttttcaaaacatgattcaaaacaacagctcttggttttataattttttcattaaatatgacagtcctacttacagaaatcttaacatctggatatttgtgctccccccaaaattcacatgttgaaacttaatactcaatctgatcgtattaagagatggggcctttgggacatgattgagtcatgagggctgagtcctcctaca

SEQ ID NO: 684304 - DNA, 1315 bp, Homo sapiens
gatacacattgtttggatttttaaaaactctattaaatgtttaagtggttgtgaatatgaggaataattaaatgttaaccccagctgattagtgaacatataagaaaatggggggaactgatcccaaaagatcttctcttctaaggagaacttcacttgaggggcaaacactagaagatacaattgttattgtaaaacaaacactaatgagagtctgtcaaataattttaaaagaaaatagaacgcatttgcaactttcaaatgcatttgatgcccaacaatttcatcacctaccctatgtttaaaactgggaggcaatccagaaactaaaaggaatcagaaatttgcaaaaatatgtttgcgatacactatccaacacttgtactgacaacattagtgtagatatttcaacatatgttaattttaaggagtaagttcggcagatgggcttctaaattatcaaatttcaattaagatgttactaatcaagttaccaaaaaatttaattttcaggccgaggcaggcggatcatgaggtcaggagatcaagaccatcctggctaacatggtgaaaccccgtctctactaaaatacaaaaaaattagctgggcatggtggcgggcacctgtagtcccagctactccggaggctgaggcaggagaatggcatgaacctgggaggcggagcttgcagtgagcagagatcgcgccactgcactccagcctgggtgacagagcaagactccatctcaaaaccaaaaaaaaaaaaaaaaaaaaaaaagatttaattttcaaaatggtaactcttacttgttgctctgctgtaaaaactataaataatggcaatacctctcactccatctgatcttaaataatttaatgaaaaatatctaccaatatatttctaagaaaataaaagtaatccctatgagatatttttgacatttttttcaattgaactagagaaagaaaaatggaaacaaagtataaaaattcttctgtttcttcaaattatctgaatggctaccttccttcattataagggtaactgcttcttaatttcttcttttataaaaatcacttcgcagaagaacaacatatttcatttgtattttttcaaaacatgattcaaaacaacagctcttggttttataattttttcattaaataygacagtcctacttacagaaatcttaacatctggatatttgtgctccccccaaaattcacatgttgaaacttaatactcaatctgatcgtattaagagatggggcctttgggacatgattgagtcatgagggctgagtcctcctaca

SEQ ID NO: 684305 - DNA, 1315 bp, Homo sapiens
gatacacattgtttggatttttaaaaactctattaaatgtttaagtggttgtgaatatgaggaataattaaatgttaaccccagctgattagtgaacatataagaaaatggggggaactgatcccaaaagatcttctcttctaaggagaacttcacttgaggggcaaacactagaagatacaattgttattgtaaaacaaacactaatgagagtctgtcaaataattttaaaagaaaatagaacgcatttgcaactttcaaatgcatttgatgcccaacaatttcatcacctaccctatgtttaaaactgggaggcaatccagaaactaaaaggaatcagaaatttgcaaaaatatgtttgcgatacactatccaacacttgtactgacaacattagtgtagatatttcaacatatgttaattttaaggagtaagttcggcagatgggcttctaaattatcaaatttcaattaagatgttactaatcaagttaccaaaaaatttaattttcaggccgaggcaggcggatcatgaggtcaggagatcaagaccatcctggctaacatggtgaaaccccgtctctactaaaatacaaaaaaattagctgggcatggtggcgggcacctgtagtcccagctactccggaggctgaggcaggagaatggcatgaacctgggaggcggagcttgcagtgagcagagatcgcgccactgcactccagcctgggtgacagagcaagactccatctcaaaaccaaaaaaaaaaaaaaaaaaaaaaaagatttaattttcaaaatggtaactcttacttgttgctctgctgtaaaaactataaataatggcaatacctctcactccatctgatcttaaataatttaatgaaaaatatctaccaatatatttctaagaaaataaaagtaatccctatgagatatttttgacatttttttcaattgaactagagaaagaaaaatggaaacaaagtataaaaattcttctgtttcttcaaattatctgaatggctaccttccttcattataagggtaactgcttcttaatttcttcttttataaaaatcacttcgcagaagaacaacatatttcatttgtattttttcaaaacatgattcaaaacaacagctcttggttttataattttttcattaaatatracagtcctacttacagaaatcttaacatctggatatttgtgctccccccaaaattcacatgttgaaacttaatactcaatctgatcgtattaagagatggggcctttgggacatgattgagtcatgagggctgagtcctcctaca

SEQ ID NO: 684306 - DNA, 1601 bp, Homo sapiens
ggctcatgcatggtgcgcgcacccactgacctgcgcccactgtctggcacttcctagtgagatgaacccggtacctcagatggaaatgcagaaatcacccgccttctgcatcgctcaggctgggagctgtagaccggagctgttcctattcagccatcttggctcctccccctagacaatatatttttaactctcatgtcaagtcacattgcggccttgcttcaccatcttgaaagttttctatactcaaatcacttttgcaagcttttctagaaaataatttagttaagagtggagatttggtttaaaaaattatcttttggcgaatatacacattaaaatgtaatttctccttgtgccataatctttattttccctcattttattcatatttcttctttttctggtccattttggcctgtttttctgataaaaaaataattccacctgtttttaaatcctttatacttttccttaccagttgtataattttcccacagacaatgacataatatagaaaatggagggaaattttgacctgtgactaacagtatgtcatggagaattaggcagaattttagggctttggtaaataggatgagtttaacttacgaaggtgggatgtgtcagaaggtaaatatatttgtttacatagggaagacacacccagcttcaagttattacaaaaggaggaaatactgaaaatctgaagattctcctcagcccgaaaatggaggagaaacaaggaaaaaaaaataatgaaagaaggaagaacctggtgaggagcaaaatgctttcatgaatggcatttgagagtttgtattaggtaagagaagtttttaaaacccacaggtattctataaattgaagataatctgggtcatcttaacataatagctcctatacaaaattttgccatgtaaattgccatgtttttctgtttattcattcttttggttcaattaataggaatcctgcttagtttttaacacttatttttcacctagctttgtatttcccctgattttttccttacctttcacctgaagcctttcctattttgttttctttctcctttcaggaagttcattagctcaaaaagaggcaaatatttccaacttttaaggagaaaacaagggcagactctgtacagttctcaactgggcttttacattactagttctrtagcactggggaggtcattttgcctctctggcctcagtttaagtgcaataattttaacagattttttttcaaatgtaataatatataatgtgaagctggtaaggagaatgtaatttgtaaactatttctccctttacctaaaagtgtcaatactttgagattaatttaatatataatatctggataaaatattctggtatcaggtgcaggtgcatgaggcgaagtgcagacactcctcaaaagaagacatttatgcagccaacaaacatatgaaaaaatgctcatcatcactggtcattaaagaaatgcaaatcaaaaacacaatgagatatcatctcacgccggttagaataatgatcattaaaaagtcgagaaacaacagatgctagagaggctgtggagaaataggaaggcta

SEQ ID NO: 684307 - DNA, 596 bp, Homo sapiens
tctgagctgggggcccctggcacctcagccacagcctcaccagtcataaggcacagcccaggaaggctcagcaatgtccgccgaccaccaggacccacagtcggtggcatcccagcccaccaagacttatcctggagccactgagctccctgctagggtctrgtcagggcttatgggggcctttgtcaagaggtcgttgggtcgggctgggaagatcatcttgacttcaggagcctgagatgagccaagataatgcacagcccatccagacggactgacagtggcattcaagtctggtccccctgcagccatgtctttcacaccaggccacaccttccactccaggccccaggattgacacaggcccgcccacagtctccttggtggagcccccacccatctgggccctggagccacctcagcctccagacttcacagggcggtctgggtgcagaccctggcacaggcagccctgggcaagttcttccccagctgtgaggggaatgagagcctaagggtttggcataagatcatatgcacgtgcctcacccgggccttgcccccagcaaccccaggccagcacccgctaggctcgt

SEQ ID NO: 684308 - DNA, 679 bp, Homo sapiens
ccttagctaaccacagcaggaatagaagcactgttggtgtcagataacaaaatgccaaaatgggaagtacctggagatagactaatattatctgtaaactccctagagactggcaccttggatagccctttagtccatgtgagggcttggctgacccaagaccaggacggaggcaagcagtccagcattatccatctgactttccaaaggaaagcagaagtcaccccaagggtaggatgagtgacacaacacagccggcaccaggatgaccaacaggattagctgggtcaaggcatcagccagccagagcagccgcgacaggcccagcagatgccgaggagtgatcggstgtcacctctgctcatctccatctgtttgtttggctgaccccagcgctggccccagctttctttctggactcataggcagctgggacccagggaaaatgagtatcacgcgagagtgtttggcaactgtgtgtctgatgtgcactcataagtcatgggaatgaccagggcgaggtgtcaactaacaatttctgcatgcttcccctcactcctgagcccactctccacaagcagagaaaggggagatggcgatggcagaaatcttcgcacaggtaattcagaggataaacaaacctcagggagctggtcagaagtctgactggggctaatcc

SEQ ID NO: 684309 - DNA, 641 bp, Homo sapiens
gaggatgcaaaggcgtaagaatgatacatggactttgaggacttcgggggaaggatgggacatgggcgagggataaaagactgcaaatagggtgcagtgtatactgctcaggtgatgggtgcaccaaaatctcacaaatcaccactaaacaacttactcatgtaaccaaacaccacctgttcccccaaaacctatggaaaaagaaaaatgaaatttattctctacgttctggaagctacaagtttgagatcaaggtgttggcaggatttagccaacattctgaggcctcgatcttggcctgtagatggccatcttctccctatatcttcatatgktctttcctctgtgcattttttctgtgtactaatcttctcttcttataagaacaccagttatatttgattagggcctacccacatgacctcattttaccttaattacatctcaaaaggccctaatatggtcacatactgaggggctaggggttagaacttcaacaaatgaattttgagggacaccactcagcccataataggtatcttcatgcctctcagagattatttgtaatccccataagaacacatgatgctgcaaataactttaaattacaaaacatttctaagcagaaacaagaagttgta

SEQ ID NO: 684310 - DNA, 1940 bp, Homo sapiens
tgatagattcatacattaattaaataactattgtatgccttcaatatagatatttttaaacatcatattttttctataaatttaaaacctgtcaaagtttaatgcaatcagaatacatatttttctttctcctttgtctttytgtcttttcctctttcttccactggattcttaaattctgagacattgaagtaaattatatttttttaagacttaggaatcaacattttattcaaaatattggtgaggtcttctgagaaaattatgaattttaataaagacagaaaagttagcctgtcacaataacagtgcaaggccattgtccactccaagtcaatctgaatgtggtgacatcaaaaatgacagttatcgagttggttaagagagatgaacatggaatggaggctgtaaagttcaatgagattaagttgaaatttgcttagtctgtcagtcagtgtcattcatgcacaactactgcatacagagaattgtactatatacttcctagagaaaactcccagaaggtctgtatatatgttttaggaaatgttacatttatcctcttcgcctaaatgtcaagaacaaagtaatgtttttggaaagtatgcattaatctacctatacatttttaaaacataacctttaattaattatgtgaaatcattaaacttcattgaaaaatatgcttaagtttttctgtggatatgtatttaagttcctatgtgttagaatcaatatgatgttctgtaaagtaagtgtaaagatcttcaaaagatagtggtaccataaattctttcaaaataagaagaatatcttaaattataaatatttacatgttataagttatgaataatatatttgagagaagaaacatgaaatggaaacaagtattaaatttccttatcccttaaaatcaggttatgatattgtaaaccagttttcttttgcagatataacaattatcctgaactctaaaattaacatgaagttaacataaaaaataagaattcttttgaacccccaggattgttttaatagcatatatattaaacagttgctgggttttctttctatattaaaatttgttaatgttattttctcaaagttccactcatctattgcaattttaaaattaaagtgcatatatgaggtataaagtaacagtttttttaactttattactcatagaaaatactgatattgggccaggtgtggtggctcacatctggaatcccagcactttgggaggccgaggcaggtggatcatgaggtcaggagttcgagaccatcctggctaacacggtgaaaccccatctctactaaaaatacaaaaaaaaaaattagccgggtgtggtggtgggcgcctgtagtcccaggtactcgggaggctgaggcaggagcatggcatgaactcaggagcagaggttgcggtgagctgagatagcaccactacactccagcctgggtgacagagcgagactctgtctcaaaaaaaaaaaaaaaagaaaagaagaaaatactgatattgtcaaacaatctatagagtaaaggaagcacagacagagatataaggaaacaacattttttttaattgacacactgaaatgaaacactaaaggtgttagatgcctaccatcttgattaaatttattctacccatgaagcaacagtttatgattttcaaatgaataacccacttaaatgtagggagcattaatacaatatgatattaatatacaaatactcacattattcacctgctactgacattctgaattaaatcagtaatggggtgtataactgattaaatatctacacaacagaaagcaacagcttatgatttaaagaggtactggtagagtgatcacatcattacactgccaaacaccatctatcacttttactgaacttaacgaagatggattacatcccgcagatga

SEQ ID NO: 684311 - DNA, 1940 bp, Homo sapiens
tgatagattcatacattaattaaataactattgtatgccttcaatatagatatttttaaacatcatattttttctataaatttaaaacctgtcaaagtttaatgcaatcagaatacatatttttctttctcctttgtctttctgtcttttcctctttcttccactggattcttaaattctgagacattgaagtaaattatatttttttaagacttaggaatcaacattttattcaaaatattggtgaggtcttctgagaaaattatgaattttaataaagacagaaaagttagcctgtcacaataacagtgcaaggccattgtccactccaagtcaatctgaatgtggtgacatcaaaaatgacagttatcgagttggttaagagagatgaacatggaatggaggctgtaaagttcaatgagattaagttgaaatttgcttagtctgtcagtcagtgtcattcatgcacaactactgcatacagagaattgtactatatacttcctagagaaaactcccagaaggtctgtatatatgttttaggaaatgttacatttatcctcttygcctaaatgtcaagaacaaagtaatgtttttggaaagtatgcattaatctacctatacatttttaaaacataacctttaattaattatgtgaaatcattaaacttcattgaaaaatatgcttaagtttttctgtggatatgtatttaagttcctatgtgttagaatcaatatgatgttctgtaaagtaagtgtaaagatcttcaaaagatagtggtaccataaattctttcaaaataagaagaatatcttaaattataaatatttacatgttataagttatgaataatatatttgagagaagaaacatgaaatggaaacaagtattaaatttccttatcccttaaaatcaggttatgatattgtaaaccagttttcttttgcagatataacaattatcctgaactctaaaattaacatgaagttaacataaaaaataagaattcttttgaacccccaggattgttttaatagcatatatattaaacagttgctgggttttctttctatattaaaatttgttaatgttattttctcaaagttccactcatctattgcaattttaaaattaaagtgcatatatgaggtataaagtaacagtttttttaactttattactcatagaaaatactgatattgggccaggtgtggtggctcacatctggaatcccagcactttgggaggccgaggcaggtggatcatgaggtcaggagttcgagaccatcctggctaacacggtgaaaccccatctctactaaaaatacaaaaaaaaaaattagccgggtgtggtggtgggcgcctgtagtcccaggtactcgggaggctgaggcaggagcatggcatgaactcaggagcagaggttgcggtgagctgagatagcaccactacactccagcctgggtgacagagcgagactctgtctcaaaaaaaaaaaaaaaagaaaagaagaaaatactgatattgtcaaacaatctatagagtaaaggaagcacagacagagatataaggaaacaacattttttttaattgacacactgaaatgaaacactaaaggtgttagatgcctaccatcttgattaaatttattctacccatgaagcaacagtttatgattttcaaatgaataacccacttaaatgtagggagcattaatacaatatgatattaatatacaaatactcacattattcacctgctactgacattctgaattaaatcagtaatggggtgtataactgattaaatatctacacaacagaaagcaacagcttatgatttaaagaggtactggtagagtgatcacatcattacactgccaaacaccatctatcacttttactgaacttaacgaagatggattacatcccgcagatga

SEQ ID NO: 684312 - DNA, 616 bp, Homo sapiens
tactataaaaatctattttccccagtataaaatgataaagaatttatactagaaaccataaacaaaaaattaaaagcaaaattcctgtattcattttagaaatgcatttaagaaacatttttctctagcattggggaaatattttaatctaaagtcctgttgattttgtgcaatctgttctcttggcatgaagatgccgttaatctactttgattcctattgatagagtattcttaaattcttatcaacaagtaatatttgcacagtaacttgaaatgcagcataaaaagctaaaagctgaaatttagaagaataaacacacgcacacacacacacgcacacaaaaaaaacccatatgtatacatatgtttatatatatttttaggaatgtagccttaatgcaatttaattctcagaatgtggtatttgtttcaacctcaattytcaggcattccacctagtatatcttttttatcctagaccatgtggcaaaataaacacagttttgaaaacgctggtttagatcattagtatctctacaatataacttcaaagatttaagtttttcaatgtatttgcattgaaaattcgcatcgttttccgcttcagagtaaaa

SEQ ID NO: 684313 - DNA, 660 bp, Homo sapiens
tttaatatgtcttaaacacttaaaattacttctattctcatgttgtttttcagtaggattgtttcttaaagaaaacctctccctgaccttggctctccctgtcagaattgtgcgcactcggtaatatatttggttgtggtagtttagatttcctaattactttcttatgtgctgtgaaaggttgaaaatctgtttatgctgggcgcggtggctcacgcctgtaatcccagcactttgggaggccgagacggcggatcacgaggtcaggagatcgagaccattctggctaacacggtgaaacccagtctctactaaaaatacaaaaaaattagccgggcatggtggcaggcacctgtagtcccagctactcgggaggctgaggcaggagaatggcatgaacctgggaggcggagcttgcagtgagctgagatcacgccactgcactccagcctgggcgacagagcgagactccatcttaaaaaaaaaaaaaaaaaagaaagaaagaaagaaagaaaaaaaggaaaatctgtctatatagtaggtattatattgaattgtgaattagtgggacttacaaygtaatacgtttttaagcatttgaagttattgatagttgataacctcttaggaaaaattggcctctaaatgttgaacttggaa

SEQ ID NO: 684314 - DNA, 650 bp, Homo sapiens
actgatctgtttgatatacaactttaaattccacatgaagacttggctagtttttctaaagaccraacatgattattttcaaaacagttgtacaaatattctattaagaaatggtaaactgaacttatcagcatggaggtaaataattaagaggagaaactgattgttttaccaacatatttaaagctcatgaaatcacaaatgtgtcattgtcatttactagaatattctgtgtaaaatccaatgtgctgaggttattatgttaccatctatgtgaactgggcctggcaggaagaagactatgtggtttgtgtttgtttttctttctttttttttttttttgagacggagtctcgctctgtcgcccaggctggagtgcagtggcacaatctcggctcactgcaatctccgcctcccgggttcacgccattctcctacctcagcctcccaagtagctgggaccacaggcgcctgccaccaggcccggctaatttttttttttttttttttttttttgcatttttagtagagacggggtttcaccatgttagccaggatggtctcaatctgctgacctcgtgatctgcccgccccggcctcccaaagtgctgggattacaggcatgagccaccgtgcccggcctgtacttg

SEQ ID NO: 684315 - DNA, 1035 bp, Homo sapiens
ttggaaacyattttccattataaaagaaattcttccaaatcacacaaaacactctgacacttctccagttccccctttgaatgttctgcaaatgtgctggtttgaaggaaaaaaaattcaatgtggcacatgtttaaaaatataatgaagacatagacattatcaaatacaacagatagcactaaccttccctttgaaccgtccctaaacatccacactcacatgtcctttaaatacaaaccacttttctccaggcttcctaacttggtaaatccaggtaccttcccaggtcgttcagagaattcggagcctccttccacatcacctttccccagcccagcagcacaaaaccaatcagctgacaaactcatttccacctctcaaggcctctcatattaatccctcctttccacacatatactgccctagctcagaccctcttcatacttcttaaactgacacagacaacctcacttggaggctaactggtctccttatcttgaatcccaaaatacacctatttacaacacagatccaaaacctcgtaactcctttctcaaaatcctgtaatgccctgtcaattgcattcagaagaaaaccaccttttcatcctttctccctttaagagcacattagtaagagtgtaaatcccagttctaccacttagtaggtttatttcatttgtaacctctatctcatttgtaaaaaaaagaatcatagtactatcttctcaataaagctgttctaaggaaataattattactaataaagcactgagaacaatgcctagcacatagaaaatgctcaaaaaaggttattattgttatccaaaccctatcctgcctcaccctacagactacttgtacttttataagtatttattctacagatttattcagtccttatgactaggagatgaagatacaaatatccattaaaaaatgttccgcattatctggccttcctgcctgtgcctgtggagtttctccttgccctgaatgctcctttctacctacagatatcctactcatcccc

SEQ ID NO: 684316 - DNA, 928 bp, Homo sapiens
atcctgacttcccatgatatttcttaaaaactaagcatcaaatgacacatttttaaagaataagccaattactttttaaaaacaatgactaataaaaaatagtgaactaaaatatgtaaaaattttactgaattgtaaaatataaaatgaagatagcagtttcaaacaagaggtttaatttacttttattatactataatattgtttcacaataattatttttatagaagtctgaacttttctaagtctttctactgaaaaggagttacacagtctttggtagattggttaaactatgataaatttggtaaaataaaaaattataagggaagattttaagaaagaaatttagacttatgcttaaatttggccctaaaatactaaaccaaagaaagtttgaaatgcaataacagcatgttaaataatgaatcatttttaagttacctccagacaaggtaaggtaaaacaagtctagggccacaagctctatacaaaacaaccctatcaaaaaattttaagcttatctcctttccaagctgcttcctctgtcaagggcttgctattattttctagaagtatttttaggagcaagtcttctgttcagyctataactgtgaaagggcaagggcttcctctacttgtaagctaacatgttagcttgccacagtttcatggatgttggcaaaagacataagtctcctgggtcagagacaaaggatacattactactcatagaatagaaatagccacattattatatttttgctctggttccctgatccctaattcctacagaacaacatcaagaaggctgtcagttaacaattgcactcacaagtagggttcacgagagggcttctgctttcatggactctgaatcctttacactgcaccatgaatatgccttctcattgctttagagggaatc

SEQ ID NO: 684317 - DNA, 682 bp, Homo sapiens
gatttaactgatttgatttttttctcttcactttcaatgaaaatgatttaggcaatataattagccaaataaccaactttactatatttctccctgtggaaatgattagggccaccattagaaagggcaagcagctcaaaaagaatgtggatttttggagacacatagacttgaatttaattctcagccttgacaagtagtttcatggaattaagtaatctattactgacttttctgagattattttcctcaataataattccctgacagtgttacaaaaggatttgattaaatagtttttgcaaagagctaataaggtagctgaaagctaagatcctctattttttgctttttttcttttgtatataagatgttttcctacgtcgttacttaactcatgctcttcctattttctaattttataagcatccagtctttttagtttgattttaaacttcctgtacagctattttatgctactttggtaactcatatacaaggaatcaatttgcttcataatagtcttgcaattaatttgtcacacaacatatayggtactgtaaataaatataatttatggacagagaaacaaaggagagggaaaaagagacacaaagctttgagtttaaaacatagaataaaattacatagacagaacagaaatagggcaaaagagaataaa

SEQ ID NO: 684318 - DNA, 1242 bp, Homo sapiens
tccgagaacatttaaggcaggcgtggctaggctgtgatgttctataggtgtattcaacgcttttttttttttttgagacagagtttcgctcttgtttcccaggctggagtgcaatggcatgatctcagctcactgcaacttttgcctcctgggttcaagcgattctcctgcctcagcctcctgagtagctgggattacaggtgcccgccaccacactcagctaatttttgcattgtttgtagagacggggtttcatcgtgttggccaggctggtggaactcgacctcaaacccctgacctcaagtgatctgcccgcctcagcctcccaaagtgctgggtttacaggagtaagctacggcacccagcctcctcaatgcattttcgacttatgatattttgaatttacaatgagttaatggggatgtaaccctgtcctcattgaggagcatctgtatgtgaatcctccattgtacaaatgagaaacaggggacttgagaggtaaacaggggacctgagagccaaggtaaaacagcctaacagaccgcagggctgtgagccctgctgttgcaatcgaatggtgcacctcggtgagtatggcgctccctttcctgtggggagccagctttgataaggagagagaggtgggcaggggacacagagaggcactgagggaagcccatcttcagagatgagcccaggcttagccttgcaagggcttcaggcacatgcggaggcggggcaggtgactgggggtggggggagggaagaggctgctgggccccctccctgctgcttgctcgctttccttctggctctctctgtgtgtctctccatctttctgcctctctgcctccttcccttgtcttccgcttctctgtagccctgtttagaccaagagttgttcacttagggctcctggatccctggagtgtagaaacatgttatctattttatggaaaaatggcagtgaacataggagtacatgtgtttttttgtagaacaatttattttctttgagatatatacccagtaatgggattgctgggtcaaatggtagttctaagttctttgagaaatctccaaaccgcttttcacagtggctgaactaatttacatttgcaacaacagtgcacaagagctccctttcaccacagccttgctggcatctgttttttcactttttttttttttgtagtataagtttaacaggagaaagaggccrggcacggtggctcacgtctg

SEQ ID NO: 684319 - DNA, 3446 bp, Homo sapiens
ttctctatcattgtccttttttgtggtgtacattcttttgtctttgctaacaatagcatagaaactgactagtctaacagaatgtaagaagacaattggctgtgtctcaataaaaggaggcaagtacatcttcctgatgaaaacattcttgaaaaatccatttagccccattttagcatctcctctcaagatgtccttaaagtgagttttccacatacaatccttataaccactcaacagtaatttattttgtagaaaaaaatcgtgtccacttatttgaaggcaagaaaaagagctggctgtctgttaaagatggtcatttggacagtaagtttgtatgaaggcaagcaaaagagcaggctgtctgttaaagatggtcatttggacagtaagtttgtactcagatggcttttgtatgtggggattggggtgctctgcactctaaacttaatggaggggttttgtgggagatttgacttcccaggaacatattgaaggatggtgtgggcaggggaaactgattcagagataccttgtgaaggaaagtggagggatcaggctgagtctcccaaaaagggcagagaaaatggcaactgtttccccctggctcagattcccaggtatattataggctttggtcactgtttctggaaagagaggtgaaacttgagtggacttttctttagattgtctaccatctaaagcatagctttactgacagtgaagaggggttgtaaaagctttcatttatccttgaaatacctactgagcaaggaactatggaaaacaaagtccagcccagacaaattctgtgctcgtcaagattatagcatgacacagtaaaaatgcttatgttagaaagtgagctcatactgcacacggagaaataacatggaagtgtaacagtgggaaaacttatttccagctggaaatgacctctaagatgggttttgtgggacaagtagacacatagaagcagggaagcaaaacacagaaagaaaaaagatcggagacaaaggctcagaaatggaaaacttccaggcatgtataaggaacagctgctagtttggttaagcagaggagaaagctggatgtagtccatgagaatttccctaaaaatgggaaataaagcacatttcatctccagtctgtctgtggttaaagctttctaaacacattgaaactactgcttaatataagtttacagcaaaaatccttttgaatttggagaactgcaagatgtcttgctcatattccaaatcctttctgcaaatttcccaatraagagacgtaagttattgtcttccacagcagggattctcaacctcagcactatggacattatgaactgaataattctttgttggaaggtactgtcctgtgcattgtaggatgtccagcagcatgcctggcctctaataaaagtcagaagcaccccactccaggtacaacaatcaacaatgtctctagacactgctaaatgtcccccagagaacaaaactgcccccagtggtgaacctatggtctacactgagtcagtgtttcagatgattgttctccttgcatagatgaagacagccaagtaggaacttaagaaaaaaaaaaaaaagcccttctatattccaaatgcatggactctctgcatagagaataatttagctctttttattactaactaccgtttgatgccactgtgttacttagcatacaggaaaaatggacacaggcgtccagccatgtataaatgtgtgctgccacttatctgggactattagaatcatcacatactcctgattattcttcagaactctttaaatcacttatgaagactttgccttggagtattttttaaataaaaatagcaagttaactgctatttccatgcaatacacaaatcaaatttcaacactatcaaagattactaggtcaagatcattgggtaataagctcacctttggcatgaaatagcaaaagggggagaagaagggagaattgaaatagatggtctttaaaggcctttgaactctgaatttttagttcagttattttgctggaacaccagaaaaatcaagaataaaacaatttgtattgtatcagcctgatattttctttaaaaacttttttataagaaaaatgattcttttatatacccccctcaattttttttccaaaaatgaataatatatgcaggaatacctagaatatgttaaaagtgtggaacgtatgtttcgttatgaacgatactgtgaaatctttagatgaggaactagtgctgtcaaagtagaacaacattttttaaaagttgcactaatggtcaaaaattattattactactttaaagtattatatttgtctataagttacttgggaaatttataaataagtataaagcaattcatctcataattgtatgtaattatttctgtattttttatcctaaaatgaaaatgtttctggagagtattggaatacatgatacagtaccactattaccactagataacaacagtgctattatcgaacacgtgttcgttgcaaatgcatttgtataaataaatcaaatccaagtagcatacttctatttttaaaattcctatccttaagatcaaagaagtctataggagaaagggaccatggaaacatttgtatacgactaacagacactgattaatgataaatgcctggtatagtccattttcgtactctaaagtttctaaaatcaaaggtctgttttcttgacgatttgttttctaacatcttttagcatcttctcttaagtaaatatattgataattgaatctgttccttcaaagagtttaactccatgatacactaattaatttttttaaatagcgacttgggtagggagagacatgaaaccgtcagtctttctcctagttttattaagaagttcagagttactctattttactccaaacaacagcatttaattagttaacattaatagggtttctcctggactacgatgtagggaatttgcaatattgtgaaaaggcatcttcttcctctgggccagatggcaaaaagattttttctcatgccaactccagaagttgacctagattgtggtgttaggaaccatgaagctatcatagggattagcaggaaagagtgttggtagtaattagggcacgaatgctgtgtttgccaacctcatgacagattgcacctttttctccctggagtgggttctgaaagattagtagaagtttattgtaaagagcgcggcactctaaacagaggaatagcatgtgctaaagcttaaacctatattaggatgtgcaatgtttggaaaacagctacccagataggactttggataaagtttactaagaaaggcactggatgagagaaatcaggcagctgaggatgacgataaaataaatagaggtatagatcatgagcatttattgtgcaagactgca

SEQ ID NO: 684320 - DNA, 664 bp, Homo sapiens
cacttggtactttacctgtaattaacaggtgttgtcatcagcaaaatcaaggctgtgccactgatagcatttactataaaaattttacaactttaggaccatagttaatagtagtgtacagcagtcttctcttatttgcggggaataaattctaagacccctaatggatttctgaaattgcagagagtaccaaaccctatacatgctacgtattttttccttatgtatacacacctatgataaggtttaatttataaattaggcacagtaagatattaacaattattaatattaacaaaacaatgataatacatatgctgtaataaaagttatatgaatgtagtctctctctttttctaaaaatatcttacggtgctgaacgcacgytttttcttgtaatgatgtgagatgatacaatgctctacatgatgtcatgaagtgaggtgaatgacacaggcattgtgacctagcattaggctactattgactctctgatcattcgtcagaaacaaaatcatttgctttgggtgatcctggatcatgaagccatgatggtgttgatggttggatgtcagatgcagatgatgttggtggctaactagagagtagtgtatataggaaggattcacttcctgagcaggatggaatgggatggcacaaaatt

SEQ ID NO: 684321 - DNA, 945 bp, Homo sapiens
tgaaagtttatagtcttcagaatgagagccgaaaccctctacccctatattcaacctgaacactgagaactggatctacaaccctatgaacgcctacaataacatgagtttgctatttccttgtttttgttggcattattttatttttcctggagtctcttgcttaagcaaaggattttgttcatgacaggaagttccggtgcaacaatcgatttctgtttaagcttcccagtttgtggtattttgctacagcagcagccctatcagaaagaatacgccttccccactccacaatactgccagcattctgtggcattggtgctgtttcctgcaataagcaataaactcagccttttcttaatgatagctcatgctagttatattggagatgccagcattcagcaagagcctgctggatttgccactcttttaaagctgtcaagaagaacttttgaataagatattatgccgtgattttttagtaatgagagaaatgtgcatgattcttggaaatgcacaccagttacaagaaacatctagaaataagacccaagaaatcgttggcagccaaatatctgataggcttgagccataccgtggagtttgaaatttatcctaaaagcaatgagaaataattaaaggatttaaaccagaaaagcaaacaaacaaactaaaaaaaatccttcaactctattatagctgcaattaatttcattttgaaactttttatagtataccatatgcctgcatatatgaaaaaaaagtttgcctaaactctgttctcagaaaaagtaaattatcatatctatctatgtctctatctatcatcttacaactcaggaaaagtaaaaacgagccccaggtrtattagagattcaaaatacggctctagtgaaaatgaggacaccaaagtcagagatccatgtgagcaatatgaaaaaattg

SEQ ID NO: 684322 - DNA, 1369 bp, Homo sapiens
tggcaactatgtcggtaaggacaagctaatatgaaacgcttcggcaccacagttcagcattcctattactattgcggagcactttaattcacaaatcacttaccttttccacaaatccagtaaagctctaatagtgtttaggggccttgatatacaaaatccactcttatttgactcttatgcctataaatcgactttcctggttaaacaatttcacgtaatttcacataacctacaattgcccaatttccagaaagatgtgcttattggataatcaaaatataagcaaaatccctgattagaaagtgtaagcagactccatgactaagtggaacacactgattattttaaagtgagacaaaaaaagaacttttaaaagctctacaaatccaatcctcaaatgtctccatattaaaccataacttgagcatcaaagtatcatattttggccttaatttctgagtttccagttattggaactattaaaacatagttcaatctttctctagttagtcatatatatttagtgtatgtatctagctatataaaattaatcatgttatacctgcttatcagggcttattgaagatgggctatttaggaataaagtctagtaaaaaataaagaacttctactttacttggtcaacactttgcgtacaaaaatatttttgaaaggtaaactttcagccacctataagcctttatagcatataatctgtttattttgttttggattgcaatgacataagcttgcttactgtatataaatgtaaagaaaatttcagctaatgaaaacaacaaatgattaagccactatttctccaaaatgcttttagatagtttttgtgcaatggaatatgtacatcttattactttaaatcaaatggaagctcctagacaaatgttatattatgaatctatagcaaccctaatgtttaataagtattaaaattaatcagacaggacaatacatttaaatttaaaaacacactgaaagacttgtcacatgtttaagaatatcttagcttctaatgttgagcagaatgagtatctcgtaaaacatgtatactcttctgataaacaatgtccacamtctagtttattttacttttcagttagctcaatgataggaaaaagtgaatgcaaggaagttatagaataatagcaggttccttggctcatactgatcaattggaattacaaacaaaacgaaacaccacaccattagcagtacaatggaaagcagatattttcatatcacataacaggtgtggcaaatattatttatacccttaactgccttgaaattattatggctattattagccattacaatgattatctaatgcagtaatttgaaaagcaca

SEQ ID NO: 684323 - DNA, 1891 bp, Homo sapiens
caaaaggaaaatccatatcgaagttagaaagtgacacatcttggctcaggatagcatctttcatgtcattatatccagtacttgcctcaaaggtatcctttttctagatgttgattgaatatatggcttgcttactggcttgcamcccattacagccttaatgaacgtaaagatccaacataaaaaagaaaataattgggcagacattaaaatgctggaatgatgttactaactatgcaagggtgttgtcactgcctttagtttgtcaatttgcaaaatatttttcttgcaacacgctccattttttgtcattttcatatttggggaactacattataggaaattacttttgtccaaatgtctacaattagtgaaaatgtaaacgttggccctcaaatattttaactacaaaatctagagatatcttaataataacgaattttgatgaaaaatgctgtcgtgttctataaaataacttgtcagtgcctttttatcattcaatagtgatcagataaggaatcagttttctttatagtttcaatgaaggcatattttagattagtatattatttaaatgtgcaaactacaaattgacaacatctggtactttaatgaaagaggatatggcactggttgtaagatcaagcttttaggatttgacacaggatctttatgcattaaaaatagcaatgattaattcaaggctgaaactgactgcagtttgatgccctttgaactttgaaatgagaagatctgtagtatcctcttaactggtacacaaaagtaacagaaatgaataatggaaatatgacatactttaaaaatgagaatagctgcatgattaataaattttgcattcaggaccattaaacaaaatattttttctaagtggtcattgagatctaatatattactgactatctcactataaatcaatgatatttcattattaagattattttgaggtaagttatttgttcatataacgagattcaaaaataacatgttatttgaaagaaaaattatatgacattgggcaattaaacaacacaaatatgttttacatatacaagtgaaaattaatataaaataatattatctataggtatctaataatttcttcaaaagtatttaaaggaagacaaaattatttttaaagattaactcaaaagaaagccataataaataacaaattttactcactaattagggctctgtcagttggtgagaaatgcctcaatatacatttttcttttactaagcacgttataaatataattacatttcattaccaagaaaaaaatatatttaacctttttatctacttcaagtgagtgtaaaaaattatataaagctgaaacctttatttgttgaaagcaacaaataaagaaagtcattaagataatggaaagaaatcaagttttttgtccttaccaccaatttattaatttattcaacaacaccttgaaacaatctatatttatttctacatctgaaatgtcattaaaaatcacttctaagagctttacaaacagcagggaaaaaattttgtaaagaagaatcaataagacaataaatatggaattttataaaattttgattttctttacaatttcaaaaggtattgaaatatttttattgatattagctgtgtaatctgaaaaatgcaacatagtttagtacttaaaagagggcatcataagtcattaattttattcccaatttctatatctctgaaatgctttcagaatagcttcttgttttttttttttttttttttgagaagaaatctcactctggcacccagacaggagtgcaatggcgcacaatcttggctcactgcaacctccacctcctgggttcaagcgattcttctacctcagcctcccaa

SEQ ID NO: 684324 - DNA, 1891 bp, Homo sapiens
caaaaggaaaatccatatcgaagttagaaagtgacacatcttggctcaggatagcatctttcatgtcattatatccagtacttgcctcaaaggtatcctttttctagatgttgattgaatatatggcttgcttactggcttgcaccccattacagccttaatgaacgtaaagatccaacataaaaaagaaaataattgggcagacattaaaatgctggaatgatgttactaactatgcaagggtgttgtcactgcctttagtttgtcaatttgcaaaatatttttcttgcaacacgctccattttttgtcattttcatatttggggaactacattataggaaattacttttgtccaaatgtctacaattagtgaaaatgtaaacgttggccctcaaatattttaactacaaaatctagagatatcttaataataacgaattttgatgaaaaatgctgtcgtgttctataaaataacttgtcagtgcctttttatcattcaatagtgatcagataaggaatcagttttctttatagtttcaatgaaggcatattttagattagtatattatttaaatrtgcaaactacaaattgacaacatctggtactttaatgaaagaggatatggcactggttgtaagatcaagcttttaggatttgacacaggatctttatgcattaaaaatagcaatgattaattcaaggctgaaactgactgcagtttgatgccctttgaactttgaaatgagaagatctgtagtatcctcttaactggtacacaaaagtaacagaaatgaataatggaaatatgacatactttaaaaatgagaatagctgcatgattaataaattttgcattcaggaccattaaacaaaatattttttctaagtggtcattgagatctaatatattactgactatctcactataaatcaatgatatttcattattaagattattttgaggtaagttatttgttcatataacgagattcaaaaataacatgttatttgaaagaaaaattatatgacattgggcaattaaacaacacaaatatgttttacatatacaagtgaaaattaatataaaataatattatctataggtatctaataatttcttcaaaagtatttaaaggaagacaaaattatttttaaagattaactcaaaagaaagccataataaataacaaattttactcactaattagggctctgtcagttggtgagaaatgcctcaatatacatttttcttttactaagcacgttataaatataattacatttcattaccaagaaaaaaatatatttaacctttttatctacttcaagtgagtgtaaaaaattatataaagctgaaacctttatttgttgaaagcaacaaataaagaaagtcattaagataatggaaagaaatcaagttttttgtccttaccaccaatttattaatttattcaacaacaccttgaaacaatctatatttatttctacatctgaaatgtcattaaaaatcacttctaagagctttacaaacagcagggaaaaaattttgtaaagaagaatcaataagacaataaatatggaattttataaaattttgattttctttacaatttcaaaaggtattgaaatatttttattgatattagctgtgtaatctgaaaaatgcaacatagtttagtacttaaaagagggcatcataagtcattaattttattcccaatttctatatctctgaaatgctttcagaatagcttcttgttttttttttttttttttttgagaagaaatctcactctggcacccagacaggagtgcaatggcgcacaatcttggctcactgcaacctccacctcctgggttcaagcgattcttctacctcagcctcccaa

SEQ ID NO: 684325 - DNA, 1891 bp, Homo sapiens
caaaaggaaaatccatatcgaagttagaaagtgacacatcttggctcaggatagcatctttcatgtcattatatccagtacttgcctcaaaggtatcctttttctagatgttgattgaatatatggcttgcttactggcttgcaccccattacagccttaatgaacgtaaagatccaacataaaaaagaaaataattgggcagacattaaaatgctggaatgatgttactaactatgcaagggtgttgtcactgcctttagtttgtcaatttgcaaaatatttttcttgcaacacgctccattttttgtcattttcatatttggggaactacattataggaaattacttttgtccaaatgtctacaattagtgaaaatgtaaacgttggccctcaaatattttaactacaaaatctagagatatcttaataataacgaattttgatgaaaaatgctgtcgtgttctataaaataacttgtcagtgcctttttatcattcaatagtgatcagataaggaatcagttttctttatagtttcaatgaaggcatattttagattagtatattatttaaatgtgcaaactacaaattgacaacatctggtactttaatgaaagaggatatggcactggttgtaagatcaagcttttaggatttgacacaggatctttatgcattaaaaatagcaatgattaattcaaggctgaaactgactgcagtttgatgccctttgaactttgaaatgagaagatctgtagtatcctcttaactggtacacaaaagtaacagaaatgaataatggaaatatgacatactttaaaaatgagaatagctgcatgattaataaattttgcattcaggaccattaaacaaaatattttttctaagtggtcattgagatctaatatattactgactatctcactataaatcaatgatatttcattattaagattattttgaggtaagttatttgttcatataacgagattcaaaaataacatgttatttgaaagaaaaattatatgacattgggcaattaaacaacacaaatatgttttacatatacaagtgaaaattaatataaaataatattatctataggtatctaataatttcttcaaaagtatttaaaggaagacaaaattatttttaaagattaactcaaaagaaagccataataaataacaaattttactcactaattagggctctgtcagttggtgagaaatgcctcaatatacatttttcttttactaagcacgttataaatataattacatttcattaccaagaaaaaaatatatttaacctttttatctacttcaagtgagtgtaaaaaattatataaagctgaaacctttatttgttgaaagcaacaaataaagaaagtcattaagataatggaaagaaatcaagttttttgtccttaccaccaatttattaatttattcaacaacaccttgaaacaatctatatttatttctacatctgaaatgtcattaaaaatcacttctaagagctttacaaacagcagggaaaaaattttgtaaagaagaatcaataagacaataaatatggaattttataaaattttgattttctttacaatttcaaaargtattgaaatatttttattgatattagctgtgtaatctgaaaaatgcaacatagtttagtacttaaaagagggcatcataagtcattaattttattcccaatttctatatctctgaaatgctttcagaatagcttcttgttttttttttttttttttttgagaagaaatctcactctggcacccagacaggagtgcaatggcgcacaatcttggctcactgcaacctccacctcctgggttcaagcgattcttctacctcagcctcccaa

SEQ ID NO: 684326 - DNA, 1891 bp, Homo sapiens
caaaaggaaaatccatatcgaagttagaaagtgacacatcttggctcaggatagcatctttcatgtcattatatccagtacttgcctcaaaggtatcctttttctagatgttgattgaatatatggcttgcttactggcttgcaccccattacagccttaatgaacgtaaagatccaacataaaaaagaaaataattgggcagacattaaaatgctggaatgatgttactaactatgcaagggtgttgtcactgcctttagtttgtcaatttgcaaaatatttttcttgcaacacgctccattttttgtcattttcatatttggggaactacattataggaaattacttttgtccaaatgtctacaattagtgaaaatgtaaacgttggccctcaaatattttaactacaaaatctagagatatcttaataataacgaattttgatgaaaaatgctgtcgtgttctataaaataacttgtcagtgcctttttatcattcaatagtgatcagataaggaatcagttttctttatagtttcaatgaaggcatattttagattagtatattatttaaatgtgcaaactacaaattgacaacatctggtactttaatgaaagaggatatggcactggttgtaagatcaagcttttaggatttgacacaggatctttatgcattaaaaatagcaatgattaattcaaggctgaaactgactgcagtttgatgccctttgaactttgaaatgagaagatctgtagtatcctcttaactggtacacaaaagtaacagaaatgaataatggaaatatgacatactttaaaaatgagaatagctgcatgattaataaattttgcattcaggaccattaaacaaaatattttttctaagtggtcattgagatctaatatattactgactatctcactataaatcaatgatatttcattattaagattattttgaggtaagttatttgttcatataacgagattcaaaaataacatgttatttgaaagaaaaattatatgacattgggcaattaaacaacacaaatatgttttacatatacaagtgaaaattaatataaaataatattatctataggtatctaataatttcttcaaaagtatttaaaggaagacaaaattatttttaaagattaactcaaaagaaagccataataaataacaaattttactcactaattagggctctgtcagttggtgagaaatgcctcaatatacatttttcttttactaagcacgttataaatataattacatttcattaccaagaaaaaaatatatttaacctttttatctacttcaagtgagtgtaaaaaattatataaagctgaaacctttatttgttgaaagcaacaaataaagaaagtcattaagataatggaaagaaatcaagttttttgtccttaccaccaatttattaatttattcaacaacaccttgaaacaatctatatttatttctacatctgaaatgtcattaaaaatcacttctaagagctttacaaacagcagggaaaaaattttgtaaagaagaatcaataagacaataaatatggaattttataaaattttgattttctttacaatttcaaaaggtattgaaatatttttattgatattagctgtgtaatctgaaaaatgcaacatagtttagtacttaaaagagggcatcataagtcattaattttattcccaatttctatatctctgaaatgctttcagaatagcttcttgttttttttytttttttttttgagaagaaatctcactctggcacccagacaggagtgcaatggcgcacaatcttggctcactgcaacctccacctcctgggttcaagcgattcttctacctcagcctcccaa

SEQ ID NO: 684327 - DNA, 1325 bp, Homo sapiens
cgtaatttttcaaaattattcctaagccaaaataaatttccagcagttctttttattaagtagttaagtacaaaaagttaatagtagaagtcgtggatatccaaaggtactgttgtgtttccctagaaaattaaaagtatcccattgtgccttttgaatacattgctgcacaccaggatggcagtttggaagccacaggactaaagttattttgcttgtgaatcttcattacaattggtttataaataaatcaggcttagaaatatgttaaatcaacttttattttaattatatttgtacagtaggtgtaaaagttgcattaaaaaaaaactactacaagcagaagcagggcaaagagctgaaggtaattttcacttccctttactttttaaaggtattatcatttattcaaatatgcattatcaagtaatttatatatacttcatgtaataataatattcctatcccataggcatgtttttccatatccttcctgcctggtcatgtagaactcaaatgaactttcttcaatttgagctttaacaaagaaaggggacatgtaagaaatccacagcatgaaaaacaattatttttacttcggaataacaactaaatgttggtgatataggtaatgggaaatgaaatacatattgtgcagttggaattgcaaagcatttgctctaaatatatgtaatcttcaacctaggtacaaacccagtgacaatattttattcatttaaaaatttgcacagtggctcacacctgtagtcccaccactttgggaggctgaggcctcaggtgatcagttgcatcaccttaggtcaagagttcgagaccagccaatatggtgaaactccatctctactaaaaatacaaaaattagctgagtgtggtggcacacacctgtaatcccagctactcaggaggctgaggtagaattgcttgaacccagcaggtggaggttgcagtgagccgagattgccccactgtgctccagcctggaaggcaaagtgacactccttctcaaaaaaagaaaaaaattataataattcaaacttaactgtgatctatgtcaatgtctgtcaacatcataagacacaatgaaagcaggtaggttgtgccatattctaatgccatcattgccaaagcaatgctaatgtttatgtctgtagctactgcacatattyatcactatgaccaagtgttacaaagcactagagagggagagcatggatgaatacagatatgttcacatactagcaagaatattgttgaaagttactgaattttaaagatttgaaataataaatgagtgtcacagaaga

SEQ ID NO: 684328 - DNA, 1397 bp, Homo sapiens
ccgaaggctatgcactatacgcccaggtaaatgttttttcaggttttttaaaaataactgcatacataygccaaatctcagtatggaaatcagaaaacagtgctatcatggttgcagcttctttggaagcaggtggctttgttcctgattgattctcatggcccctggttggtcccgaatcacctcagaagaggctcctttgttacacaatttggaaatcatggccctaaactcaatatggggaagcttaaggcgagaatttccctcctgtcttcatttggattggttttgcaaaaagtaattaccttaggaaaatttaccgtatgcaattggtggagaaaatatccacggaaaggcttttctttctatctggtcactgcctttttatatggctaggttgttgtaacggtttattttaatttatctttgctttatctaaaattcctgaaactctcttggtttaggattgaagctatggaaagcaggatttaaatctgaatttttttattgtagtctgaaattcttgaaaacttcttagttttaaatcatccatttaaatgaaaatgattagcttcttgtagtgacggtcatacattttcccctcaaataaaagatctctgaatgactcagttttctttcttaaagctgaaaattggttttggtgtctacataaactagccatctcaatactctatatcaggggtacagctgctttgtggcctcttaggaatggggctgcacagcaggtgagccttgggcaagcatcaccacctgagctccacctcctgtcactgtcaaatctgcagcagcattagattctcatgcctgatgatctgaggtggaacagtttcatcccaaaaccatccctcctcctcctacccccatccatgcaaaaattgtcttccacaaaaccaatccgtggtgccaaaagtgctgggaaggtgttggggactgctgctctatgtaatttatttttctttttttttctctttttaattacaaaagacatgttgggtttttccccacagcacagaaataggaaacgataacaaattactatcccctggctgggtgtggtggctcctgcctgcaatcccagcactttgggaggctgaggcaggcggatcacttgagccaggagttttgagactagcctggccagcatggagaaaccccatctctactaaaaatacaaaaattagctgggtgtggtttggcgcacacctgttatcccagcaactcgggaggctgaggtaggagaatcgcttgaacccaggaggcggaggttgcagtgagctgagatcacactaccacactccagcctgggcaagagtgagactccatttccaaaaaaaaaaaaaaaaaaaaaaaataccatcgctggttgacccctctcc

SEQ ID NO: 684329 - DNA, 844 bp, Homo sapiens
atgtctgttctctttttactgcaccatgatgctctcataagaggcaaattttcctcctttctgaggacccccaataatcatggcttcagtggctgtcctcctccagactacaaactgtgtgagggtagagattgagacaatcttgtttgycactgtctatgcaatgtttagcatgtcgtttggcatgcagtaggtgctgaatagtaattctcgctgttttggacacatgtgctaggggtagccacttcattctatcacagtttcccccagcatttatgagcatcagtcttaaatttataaggtatactcattttctcctttcctttttggaagtgagtatcactctgccccctgaatgcagcaatttggagacattagcacaccttctgttcacacaaccactcagcgcccccgaaaaccatcttcaaatacccaaaacttcttctccaggccaaacccatcactcagacttcctgcaaagaggcaagagaatacctatggagggtattctatggagggtgatatgctgggagaaaacacagcctcggtttgtttaaggatgtagagtcagctagacctggatgttcatcctaactcccacaatgattggctgtgtgacatagggtaaggtcttttacctctctgagtttgtttctttgtgggtaaagtggggatgctaaaccccagctgtcagggttacagagaggactgaataggatgataggtggagaatttgcattccagcattgggttaatagtagatacccagtaagctctcctatggtttcttttttctgcaacatgcaaagcactgagctaggccattgcaggtgggtctctgcga

SEQ ID NO: 684330 - DNA, 844 bp, Homo sapiens
atgtctgttctctttttactgcaccatgatgctctcataagaggcaaattttcctcctttctgaggacccccaataatcatggcttcagtggctgtcctcctccagactacaaactgtgtgagggtagagattgagacaatcttgtttgtcactgtctatgcaatgtttagcatgtcgtttggcatgcagtaggtgctgaatagtaattctcgctgttttggacacatgtgctaggggtagccacttcattctatcacagtttcccccagcatttatgagcatcagtcttaaatttataaggtatactcattttctcctttcctttttggaagtgagtatcactctgcccyctgaatgcagcaatttggagacattagcacaccttctgttcacacaaccactcagcgcccccgaaaaccatcttcaaatacccaaaacttcttctccaggccaaacccatcactcagacttcctgcaaagaggcaagagaatacctatggagggtattctatggagggtgatatgctgggagaaaacacagcctcggtttgtttaaggatgtagagtcagctagacctggatgttcatcctaactcccacaatgattggctgtgtgacatagggtaaggtcttttacctctctgagtttgtttctttgtgggtaaagtggggatgctaaaccccagctgtcagggttacagagaggactgaataggatgataggtggagaatttgcattccagcattgggttaatagtagatacccagtaagctctcctatggtttcttttttctgcaacatgcaaagcactgagctaggccattgcaggtgggtctctgcga

SEQ ID NO: 684331 - DNA, 844 bp, Homo sapiens
atgtctgttctctttttactgcaccatgatgctctcataagaggcaaattttcctcctttctgaggacccccaataatcatggcttcagtggctgtcctcctccagactacaaactgtgtgagggtagagattgagacaatcttgtttgtcactgtctatgcaatgtttagcatgtcgtttggcatgcagtaggtgctgaatagtaattctcgctgttttggacacatgtgctaggggtagccacttcattctatcacagtttcccccagcatttatgagcatcagtcttaaatttataaggtatactcattttctcctttcctttttggaagtgagtatcactctgccccctgaatgcagcaatttggagacattagcacaccttctgttcacacaaccactcagcgcccccgaaaaccatcttcaaatacccaaaacttcttctccaggccaaacccatcactcagacttcctgcaaagaggcaagagaatacctatggagggtattctatggagggtgataygctgggagaaaacacagcctcggtttgtttaaggatgtagagtcagctagacctggatgttcatcctaactcccacaatgattggctgtgtgacatagggtaaggtcttttacctctctgagtttgtttctttgtgggtaaagtggggatgctaaaccccagctgtcagggttacagagaggactgaataggatgataggtggagaatttgcattccagcattgggttaatagtagatacccagtaagctctcctatggtttcttttttctgcaacatgcaaagcactgagctaggccattgcaggtgggtctctgcga

SEQ ID NO: 684332 - DNA, 603 bp, Homo sapiens
taaaatacttctgggaaacctacattcttgatatttaatttagcctttaatgcaatttctctccttccgttttttagacagyagaagagattttatgcctcaccttaacaaatgagttttaaaagtaaacttaaaacataatattgaaactgcacaaatcttatgcagcgtatgacccaataaagtttcaaatttaacccaactgtgtaaccagcattcatataaaaaaatagaacattctcagctcctcagaagccctcggcacaccctgcagaatcactaacttactccaaaagtattcactgttctgactgctagattagttttaactatttctgaattttacgggagtgctcttcttccacccaccatttgttttgtggaatacattcatgttgtgcatataacaaatttctcctgtaaataatgagatattttaggctttgagggtctacatttcagcatgtatggtgttttgggtttttcgtttgtttgtttgttttttgagatggggtctcactctgccacccaggctggagtacaggggcacaatcttggctcactgcaacctccgcctcctgggctcaggcaatcctcccacct

SEQ ID NO: 684333 - DNA, 1048 bp, Homo sapiens
gtggatttgagcagcaagatgctggtgggagtaatatccagacaaagcctcccccaaggcgatggcattgctgagaaagaatgaggggaccagccaggagctgtggctcacgcttgtaatcccagcactttgggaggccaaggcgggtggatcacttgagggcaggagtttgagaccagtgtgacaaacatagcaaaaccccgtgtctactaaaactacaaaaattacccgggcgtgatggcgcgcgcctgtaatcccagctacttgggggtggggttgaggaaggagaattgcttgtacctgggaggtggaggttgcagtgagccaagatcatgctactgtactggagcctgggtgacagagtgaaactctgtcttgggggaaaagacaatgaggggaccttgcttgaatgtgaaatgtgtaggcttgtggcacatcatgaacttyggccaggcatgctaaagatgatgccttttggtttaggacctccagaattccctcttcccgttccccctgtaatctgtaccttgtaaccatttgcttaaatgtcactttcccctactgagttgagttctctgagcccacgaccacagatattattagcatttttatgtccctaattattatttaattaaggtctataaaatggaagcggggtgaagggaaagggggctgggcatggagtgtggcttgggcaaggaacatggtccttgtcccagtgtggctggggctggcagggctgggcagcaggagggagcggcaggaggggaggggacaaacctccctgccctgggcgaggtagagtggagcccgagcaggcagaggtggaagatttgactctccatcgtggccctggtttcaccactgagtgatctggggcaaaccatcgcattctgtctatgcttcattttcttcaggagggtgccagcagcagcaatctctttaaatggaacattgaacgattatttttggtctataggtaagaggtacaatttaaagaaaaggtagggagtgatgaactcaaactcagaagactcacaagtagtcc

SEQ ID NO: 684334 - DNA, 1048 bp, Homo sapiens
gtggatttgagcagcaagatgctggtgggagtaatatccagacaaagcctcccccaaggcgatggcattgctgagaaagaatgaggggaccagccaggagctgtggctcacgcttgtaatcccagcactttgggaggccaaggcgggtggatcacttgagggcaggagtttgagaccagtgtgacaaacatagcaaaaccccgtgtctactaaaactacaaaaattacccgggcgtgatggcgcgcgcctgtaatcccagctacttgggggtggggttgaggaaggagaattgcttgtacctgggaggtggaggttgcagtgagccaagatcatgctactgtactggagcctgggtgacagagtgaaactctgtcttgggggaaaagacaatgaggggaccttgcttgaatgtgaaatgtgtaggcttgtggcacatcatgaacttcggccaggcatgctaaagatgatgccttttggtttaggacctccagaattccctcttcccgttccccctgtaatctgtaccttgtaaccatttgcttaaatgtcactttcccctactgagttgagttctctgagccyacgaccacagatattattagcatttttatgtccctaattattatttaattaaggtctataaaatggaagcggggtgaagggaaagggggctgggcatggagtgtggcttgggcaaggaacatggtccttgtcccagtgtggctggggctggcagggctgggcagcaggagggagcggcaggaggggaggggacaaacctccctgccctgggcgaggtagagtggagcccgagcaggcagaggtggaagatttgactctccatcgtggccctggtttcaccactgagtgatctggggcaaaccatcgcattctgtctatgcttcattttcttcaggagggtgccagcagcagcaatctctttaaatggaacattgaacgattatttttggtctataggtaagaggtacaatttaaagaaaaggtagggagtgatgaactcaaactcagaagactcacaagtagtcc

SEQ ID NO: 684335 - DNA, 1313 bp, Homo sapiens
gtcttacccatggcatcatgaagggctgtttccctgttgcttgtctagcttcctccagggaggccagggtgagtggctcagcctccaggacttgcagagccaccaacagcaacgtacctagtagccatgtctgagacaaaacaggaaggttgctgtggtaccccgcactgcagcactgtaagcactgggccagaacttcgggcacctgtggggcggtgggggagtgggaggggcggttgctaaacctgtctctccattggccaatgtgtggccttagcagaggctcttccctcwtgcatgactgttttatctgacaatggaggtaccaatggctgctcattgggtggccatgaggacttgatttcattttggaaaagagggaacaagggaggttttaaaagtagagagagaccaggcatggtggctcatccctgtaatcccagcactttaggaaaccaaggccagtggatcacctgaggtcaggagttcgagaccagcctggccaacatggagaaaccccatctctgctaaaaatacaaaaattagccaggcaaggtggtgtgtgcctgtaatcccagctacttgcaaggctgaggcacgagaatcgcttgaacccaggaggtggaagttgcagtgagccaagatcgcaccactgcactccagcctcggcaacaaagcgagactccatctcaaaaaaaaaaaaaaacaaaaaacaaaacaaaacaaaaaaaaaaactctaaaggcaaaatattgctcttctgtagatgagagcagctatttctttttttcctccctgaaggtagcactgccagctggcatccccaggggattatcaggtgagcaacaggcttgacacactggatttctctcggggtcccattggttcaggcagggcacagggtccagtcattaaaggggccaaatatgcaaaagagaaagcccctcagggcctctgcatacacttacagcctggccctccaggtggcctcacagaccatcctgtgcaggtaacattttattactcttctcttcctctggccctgcccttcccacagtaacaggttctttctgactcatggcagccatagcatcaacatccagccctctagcttcctcctgcttgtgttttttttttcttccaaaggcctgtctctcactcgtccatgtttccttagggtccacaggtagttccgattgaaaggtctcagcaaaattcagcaagcccctggctttttatagaggaagaaaataaagcccggagaggagaagctgcactcagagccaattagcaatgaattccagagtagaatct

SEQ ID NO: 684336 - DNA, 596 bp, Homo sapiens
gaaaagctgctatttggaaacccctgtatcgaataaaaggagtcccgtacctcaaaaccaaagaataacaagagaaatttgtgatctgcttaaagtgtattggtttcacactgacccagttcaagagatttttctagggttaggattccttatgctaaattacgagataattattattatctttttcagtttggggacacaggaggtaaagagccccatgaagttaaaagtaggtaagcgaagacaatatttggttaatgtttactttttcctctttccttttttgagcttaaaagattcaggaaggctagttcctgaaaaagcctgcaaggccagttttccactgcaatagatgactgatacaattaaaaaaaakcagtcccaaatctctttctctgtattatccttataattgtgccaatattctgtcccacaccaaacccatttactctctctttagatgctgatctcaacttactctgatcctatgaatgtattttctgctggtatttgaaaaatgttattcacaaaacaaaaatcctagatgtggatctccaactattttctaagactgtctctaaaccctattcttagca

SEQ ID NO: 684337 - DNA, 1186 bp, Homo sapiens
gcaatttatatctcattgacttgctttgtcttttatagcatatatattaattttgcattgttgctgcatataaattatctaagactgttagcttcttgaaggcagggattgtgcttttctcttgctcagcataacgttgtgttgactaaagaaaacaaattatttcattgaaaactattttcgtgtaatttatgatgtgtgtgtgctcataaacaattcctttgagttttaaatttggttttcttatacattcaatgtcttttaaaaattgttgtttattaaatgtggaatagttgtgtaggtaaaatactttattaaacgatgctaaaaaaactataaaggactacttaaataagctattaaaagtatatttgtgatatataaacccacaagttaatataaacttattgtgtaagtttatataataaacttagtttgtctaggaatacatatttttaatttcatttttcctttcatcttttttttttcttttctatacagtatcgggaaaattgcctggcagcaaaagcactttttcctgacttctgcctaccagctttatgcckccaaactcagctattgccataccttgctctactaaccattccaatgagaaatcaaggtaataacataggtttttcttttcttttaagaagtagggtttatttatttatttatttatttatttattttatttttttagggggagtctctactgtccaggctggattgcggtggcacgatctcggctcactgcaacctctgcctcctgggttcaagcaattctgttccctcagccttctgagtagctgggaccacaggcacgcgcccccacacctggctaatttttgtatttttagtagagatggggtttcactgtattagccaggatggtctcgatctcctgaccttgtgatctgcctgcctcggccccccagagtgctgggattacaggtgtgagccaccgcacgcggccagaagtagggttttatagcaatatctttttgtgggccaatttattgctatatgcagtgagatactttttttccttttattttttgatccagataattctggatcctttatgtttttttttttaaaacgcatcaaacaggccaggtgcagtggctcatgcctgtaatctcagcactttggaaggtcaagacagggagatcactggaggtta

SEQ ID NO: 684338 - DNA, 657 bp, Homo sapiens
tttgcccttcctctgcctttgtgttctatccaggtcctcaacgacgggaagatgctcattcacacaggtgagggtgatctctactcagtttgattcaaatgctaatctcttctagaaacaccctcacagatgcatccagacatgatgccagctatctgggcatccctatgtccagtcaagtttaacacataaaattaaccaccatatggtgtaagtaaggtaagggtccaattttattttcttgcatgtggatatccaatattcccaacatcatttgttgaaaaaaaactgtcctttytccattgaatggtacccttgttgaaaatagctatatatttctagcaaaacaataaacatgttctcaatgtcatatcacaatatgataccatgatgtacactagggatacaattgataggcttttacccataaacaaattggggtggatatgttgctggatacaaaatatacaatcacttggtatttacttgataaaaagaatatgagcttgtccacatggttttatattgtacaaagtgccttatacatttaaaaataacccagtcatcggacgggtgcagtggctcacgcctgtaatctcagcactttgggcggctaaggcagatggatcacttgaggtcaggagttcaagaccagcc

SEQ ID NO: 684339 - DNA, 596 bp, Homo sapiens
ctccaatataatcaatgtccaaatcatggtaacgcttggcgcccacaatccaggtcacgacataataggcagtcagctgaagattgacataaggccagtcgaaaccttttcccagccatccagggaatgaccatggcaaccctgcagagagaagggaggaggcaaaggtagaggaggtataacggtgctggcgctattgaaaataaaacaaattttttttaagaaaagcattcaactagcaaaaaaccaatacagatctgactaaaggaaagtttatataccatataaaaattattgaaatcctttccaatctatagacactataattccttattgatccctagagtcaggtcccataatttcaaatgttctttccaagaagaagaaaaataacaaatacaaacacctctctccaagacccttaccaatagaaagaaatgtaccatatgttttaacttaacatgtccactcactgttggaatgttcaatattcaacttctgttctttgaggtcaaatcaaagaattmtaaaaggcttatgccaaactactcttgagttatgtataacacaaatttatcattcaattgtacatcttc

SEQ ID NO: 684340 - DNA, 858 bp, Homo sapiens
tttatctctaaagttttgtggatctggtttactttgttgtttctgctcaatctgacacgtagttgcttattattctctctgtgtgtatgtgtgtgtgtgtgtgtgtgtgtgtgtgtgaataaggtcatatttgttagaactctatctgtaggattctttgaggcctgagttaaagaggacttgttcaaggggggatctgtgtcaacttcttccaggagcctagaatttattttttcatatatagttaacctttatttttggtgaagttattttcataattaggtaaattatttatttattgttttctctcaattacattttatgtatgaggatagaaataaratcagatttcttaaaaaggcatatatgttccatctgtgggtaaaacagatgtttgtttgtcaagatgctctacatgccatctcacacagccttttgattccactttttaatgtttccattgcaatacaatacacatgcagcaaaatgcacatatcctaagtgtacagcttgatgcatttctacaaactgagcatgctcatggaaccagccacccctaccaagagatagaacattgccaaatctcagaagtcctcctcatgccctcttccaacagtactcagcctttccccagaggtagccactacccagactcctaacatcatagattaactttgcctggtttgtatcagataatacatactcttttgtgtctttttttttatcactcagaattacatttgtgatcttcaaccatgcgattgcatgtagcaataatttattcatcttcattgaggtgtagatttcagtggtgttactatatcccaatttactcatctattatactgctagtgggca

SEQ ID NO: 684341 - DNA, 858 bp, Homo sapiens
tttatctctaaagttttgtggatctggtttactttgttgtttctgctcaatctgacacgtagttgcttattattctctctgtgtgtatgtgtgtgtgtgtgtgtgtgtgtgtgtgtgaataaggtcatatttgttagaactctatctgtaggattctttgaggcctgagttaaagaggacttgttcaaggggggatctgtgtcaacttcttccaggagcctagaatttattttttcatatatagttaacctttatttttggtgaagttattttcataattaggtaaattatttatttattgttttctctcaattacattttatgtatgaggatagaaataagatcagatttcttaaaaaggcatatatgttccatctgtgggtaaaacagatgtttgtttgtcaagatgctctacatgccatctcacacagccttttgattccactttttaatgtttccattgcaatacaatacacatgcagcaaaatgcacatatcctaagtgtacagcttgatgcatttctacaaactgagcatgctcatggaaccagccacccctaccaagagatagaacattgccaaatctcagaagtcctcctcatgccctcttccaacagtactcagcctttccccagaggtagccactacccagactcctaacatcatagattaactttgcctggtttgtatcagataatacatactcttttgtgtctttttttttatcactcagaattacatttgtgatcttcaaccatgcgattgcatgtagcrataatttattcatcttcattgaggtgtagatttcagtggtgttactatatcccaatttactcatctattatactgctagtgggca

SEQ ID NO: 684342 - DNA, 949 bp, Homo sapiens
cagcctccaaagtaggtgggactacaggcgcccgccaccacgcccagctaattttttgtatttttagtagagacggggtttcactgtgttagccgggatgtcttgatctcctgacctcttgatccgccctcccaaaatgctgggattacaggcgtgagccaccgcgtctggccgcaaataattattttaagcagaagaaaatgcttactgatttttgtttctcatcyttctgaaaaccaagagaaacactttggtttcattgtaaactcatttgtattaaatgattttttctccctaaatcgtaagagaaatttaaaacatgcattcttaaatgaaggacattgaaagggttgtcaacaacagttttacttttttacaacttgcagaaaaattctccttatggccaaggacctcaaaataaatcgaaagctaagggaagtatttcggccagaataaagcttatgtagcccaggtgtttttgatgatttagcaagacaacaggacatctcttagagaaggcactcaaccaaggaatagaactcagatggtggccagctggtcagcagcctatttctggtaagtactatctcatgagatcatctgttaacgtccttctggtttaagactcatacatcttaagaaccacatcatacatatttgaaaggatgcttattttccctttttttttgtttcttagaaggtggcaaatctatgaatgggatcaagttattaatcaacaatttaagaaggaaaaaggggaggggacaaaacactctctggatttccacaaacaacttctttttttaaaaaattgaaaatagttatgggtacatagtaggtatgtatatttatggggtacatgagatattgtgatgcaggcatacaagatgtaataatcacatcagggtaaatggggtatccagcacctcaagtatttataatttctttg

SEQ ID NO: 684343 - DNA, 601 bp, Homo sapiens
gagctctgagaaattggggttttcctgagggctcacagaacaaagtcaggaataggcctcatggggtctttttctgcaacactactactctgtgacatggtcttctagagagaaataaagtactggtattattgggcttctgttctttctgcatttttgatgatcactcagtcaactccctcctaacatgagagtggaagaaaagttggcagcagctttggtttccttagtatgctgtggatggaacacaagaacacaagtctgagcatccttgatgactcccatcatcaccctgcctgtagctgactgctctccatctccagatgaacttctctttgttcccactaaaatcagagccaaagaaatgaagctaaaactctgataatttgtgtgtttttgtaacacagtggtccagataaagatgaacagatttaagcaacatcaaatttttagtaaagctaacagtaatktctcctttgcaaatgccaagcttcacctttatgtgccttgaaattctttggcaacacacttaatcttggggaatctgagtttattagaggaatgtagggaggaagcaggctgcatgccctcccagcttaga

SEQ ID NO: 684344 - DNA, 601 bp, Homo sapiens
gagctctgagaaattggggttttcctgagggctcacagaacaaagtcaggaataggcctcatggggtctttttctgcaacactactactctgtgacatggtcttctagagagaaataaagtactggtattattgggcttctgttctttctgcatttttgatgatcactcagtcaactccctcctaacatgagagtggaagaaaagttggcagcagctttggtttccttagtatgctgtggatggaacacaagaacacaagtctgagcatccttgatgactcccatcatcaccctgcctgtagctgactgctctccatctccagatgaacttctctttgttcccactaaaatcagagccaaagaaatgaagctaaaactctgataatttgtgtgtttttgtaacacagtggtccagataaagatgaacagatttaagcaacatcaaatttttagtaaagctaacagtaatttctcctttgcaaatgccaagcttcacctttatgtgccttgaaattctttggcaacacacttaatcttggggaatctgagtttattagaggaatgtagggaggaagcaggctrcatgccctcccagcttaga

SEQ ID NO: 684345 - DNA, 442 bp, Homo sapiens
ggaccccccacccaggggccctgctccatgagataatgtgaaataygactgtggaccaaacacaataaaacctctgtctgtaaggaaaaaaaaaatcttatccaccacaatccagtcggctttatccctgctatgcaaggctggttcaacatatgcagatcaataaatgtaatatatcacaaacggaaccaatgacaaaaaccacatgattatctcagcagatacagaaaagtccttcaataaaattcaataccccttcatgctaaaaatccaataaactaggtattgatggaccatatctcaattagagctatttaagacaaacccacaggcaacatcgtactgaatggacaaaagctggaagcattccctttgaaaactggcacaagaaaaggatgccctctctcaccactcctattcagcatagtattggaagttctgg

SEQ ID NO: 684346 - DNA, 600 bp, Homo sapiens
tgagtggggtgggtctgccactgcccatctcagtagtctcctgtcttcctttagaaactgaacctcaaattgcagccttgtaaatcgctgctcagaaaagacaacatttcccaagtctgaaaaatctayacctcagcccattccccctgccttgagttgggcaaagccagaccacagagtgggggaaggggaagggaagggacacttatggggccactgatgggaaggacagttttggctatccggctcctgcccatcacaccctccgagagaagcctctgggcagggctcaaggacccagttcttactgcagggcccgctctggcccctgtcaccagacctagaggagtcatcaaataaatccaacatttagataagggggtcggggtgggctactgcagctgacattttcctgaaatccaacagcaataacagagaaaaatgggccagctcactccagataaccaccgccagagaagtaattaccctacttctggtcctgagcgaggatactggcgccagaggcacctgcacaggtaattcatcagccctagatttgtggacagagtccgccctctagttcacttgagacaatgctat

SEQ ID NO: 684347 - DNA, 600 bp, Homo sapiens
tgagtggggtgggtctgccactgcccatctcagtagtctcctgtcttcctttagaaactgaacctcaaattgcagccttgtaaatcgctgctcagaaaagacaacatttcccaagtctgaaaaatctacacctcagcccattccccctgccttgagttgggcaaagccagaccacagagtgggggaaggggaagggaagggacacttatggggccactgatgggaaggacagttttggctatccggctcctgcccatcacaccctccgagagaagcctctgggcagggctcaaggacccagttcttactgcagggcccgctctggcccctgtcaccagamctagaggagtcatcaaataaatccaacatttagataagggggtcggggtgggctactgcagctgacattttcctgaaatccaacagcaataacagagaaaaatgggccagctcactccagataaccaccgccagagaagtaattaccctacttctggtcctgagcgaggatactggcgccagaggcacctgcacaggtaattcatcagccctagatttgtggacagagtccgccctctagttcacttgagacaatgctat

SEQ ID NO: 684348 - DNA, 1389 bp, Homo sapiens
agggtgaaagagagagggagagagaggagaagcaaagacagacactgatgcatattaaggaaccttcatctgaaaccaataattagagaatatacattcattcttttatttgtttaatacattttttgctattatgtgtcaggtactgttaaagattctaatgataaaagtggtaaatgtgagacttaagcctctttctcatggagattwtattctagtgagacaagttgtcagtgaataaacaaagatatattataattgaggataataatgagtcatgtgaagcctcaagagtagaataaagggttaacttgtgagtggagaggagagaaaaggcctctgtgataaggtaaccttttcagagcctatgctaggcaactaacactactaattttctgttttacaattatttccctggagttgctagctcagtaattatatgatcataagttgctgtaggtaatagcataatcacatgttttctttctgtatacgaaggattaatacatttacaacctccactatccctttcttggctgtcctgacatttgactcctgagcagacaccacatatttttgttttcatttttgttagagaagtccccgcccattcctggttctgatcttgttattttttagagtaattaatgctagctgctacaaaacacaaatcccataatctcagtggcttgacccaatataagtgcatttcttatctcacagtccaaagcagtttgggaagctctccaaagtggccctcctccaaatagtgactcaagaatctcagcatcttcaatcttctagctatgccatctggaacatgtggcctttaaggtcactacagctgaggaatagggagctagaggatgtccaccatttcctaattgccttggagatagtcactgttgccattcaaatttctttgaattaatcccatggctccaacctaactatatggggattaggaaatgtgcaaaagaatggggatatttgttgaacattaacaatgacttctacaagggatatattttgaaaacagagccacaggttttggtggtggatggaatgtaaggatgggagagaaagtggaaaagcagagatgattcctaagttttggcttgtgtaattgggagaatggttgcaaaaggtcattggtataagtacaaacctggctttgacagtattcagaggtgggctttactatagctgcagccatagctgttatttcttggtaccattataattgatttagagatatgattatatatcttattttataaaattctttttagttcataaagatgggtgcttattttctctaaatttgattttcagctccatattcagcttttatggcatgaagaattttgttacatttatttattcaat

SEQ ID NO: 684349 - DNA, 623 bp, Homo sapiens
cactacagtatttgtgtactgctacatttttgggggtgttttggctttgcktgtggtttttatttatttattttttgccttttgtcttaggcactccattcatttctaaatttactgagatcagcatcttcctcacacctgcctgtcttcatccgggttttttaatacacttgtattataattagtttgtttttttcatattctgtattccaccctggaatcctttgatctaccaaatgatattggcaaaatttgcatacattaaagtttactctttgtgctatatataaagttctatgagtttcggcaaatgtatagtgtcatgtgttcaccattacagtgctatacacaggtttaccaacctaagaagtccctgtgcattaacttttcaaccctgccccgctcctcacaaactcttggcagctagtaatttttttaatgatctctgtcattttgccttttccagaatggttgtataattggaatcagatgctgtgtaggtttttagactagcttcatttacttagcaatatgcatttcggattcatccatgatattttgaggcttgatagctcatttctttttattgctgaataacatgtcattgtattgatgtccatcca

SEQ ID NO: 684350 - DNA, 1118 bp, Homo sapiens
tgtatttgtcatctagtttattttctcctatataaattatttgttcatttcttttacgtgctagctgcaatattttaatgctgcttcttctaaaaaaaaaaaatcatgcttttgtatttgccctaacagcttctattttaaaatagtgggtttaaaaatgcaatttaaaggaatcaaatttttgaggggcacctcgcttctccttttatcaatgttataataaattatttcaaaaccagctataagaaggaaacaattcaaaatgaaaaattaggaattaagttgagtaaaaacctgatgaaccataaggaaaattatacaattattctcaccaaactctttgttggttgggcttcacccagggcagctggttttcttcctttaaccttaaaaacaaagtcacatttataatattgaatatttcttcattgctcctccagttgtttgtaattgctaattttcatattgccttcagctcatctaatctatttgagactctactttaaatttcttattgttaagaaagtaaaatattaatatgatttagaaatggaatatcagggtaaaggaagaagcaagatagttcagtcttctgaatacccagaatccataattttgtaggtctgcctagtactgtgttaactactgtgaggtatgaaaaattaacatagtagggtatastagcagagataaaacttgaattttaatcaatataaaaataaagttaacaagaaattgttaaatcctggccatacattttattaagcttcacttatcagaaacaaaatgaaataaaacaatagtaaaaagctagtagcgtgcctggctcatgaagaaaattcagtgtagctgactgctttaacatcttgccttgttatttcaagaaaaaggttacttgtatcaagttaatcaatgtaatataatttaatttcaaagatttaaattatttgcatattttctttctctacagttaattttggaacatgatgatccatataaagctcaatacataagagaaagaatcacaaatatataacatacctaagacctttacctcttagtagaccaagaggtgatatcagttttccgttttacactcttttcagttgaaccaagag

SEQ ID NO: 684351 - DNA, 1118 bp, Homo sapiens
tgtatttgtcatctagtttattttctcctatataaattatttgttcatttcttttacgtgctagctgcaatattttaatgctgcttcttctaaaaaaaaaaaatcatgcttttgtatttgccctaacagcttctattttaaaatagtgggtttaaaaatgcaatttaaaggaatcaaatttttgaggggcacctcgcttctccttttatcaatgttataataaattatttcaaaaccagctataagaaggaaacaattcaaaatgaaaaattaggaattaagttgagtaaaaacctgatgaaccataaggaaaattatacaattattctcaccaaactctttgttggttgggcttcacccagggcagctggttttcttcctttaaccttaaaaacaaagtcacatttataatattgaatatttcttcattgctcctccagttgtttgtaattgctaattttcatattgccttcagctcatctaatctatttgagactctactttaaatttcttattgttaagaaagtaaaatattaatatgatttagaaatggaatatcagggtaaaggaagaagcaagatagttcagtcttctgaatacccagaatccataattttgtaggtctgcctagtactgtgttaactactgtgaggtatgaaaaattaacatagtagggtatactagcagagataaaacttgaattttaatcaatataaaaataaagttaacaagaaattgttaaatcctggccatacattttattaagcttcacttatcagaaacaaaatgaaataaaacaatagtaaaaagctagtagcgtgcctggctcatgaagaaaattcagtgtagctgactgctttaacatcttgccttgttatttcaagaaaaaggtkacttgtatcaagttaatcaatgtaatataatttaatttcaaagatttaaattatttgcatattttctttctctacagttaattttggaacatgatgatccatataaagctcaatacataagagaaagaatcacaaatatataacatacctaagacctttacctcttagtagaccaagaggtgatatcagttttccgttttacactcttttcagttgaaccaagag

SEQ ID NO: 684352 - DNA, 588 bp, Homo sapiens
caactgatctgataactgaggtggctagtatgtaactagcgggtggggagcacatacagcatgaatatrttggacaaagggatgattcgtgtcctgggtaggacggagcaggaggctgtgagatttttatcatgttattcagaactgtttgcaatttaaaactcatgaaatgtttatttatataatcttccattcaatatttttggaccacgggtgacgcaggtaagtaaaaccacgtaaggcaatactgtggataagaagggactactgtaccagcaacgaacaatcagaaaaggaaattaagaaagcaattccatttacaatcgcatctaaatgaaaaaaatgcctgggaataaatgtaaacaaggaggtgagagacttgtatgcttaaattacaaaacgttgctcaatgccaggctaacacctgcaatcccagctctggcaacagagcaagactccatctcaaaaaaaaaaagaactatagcaatcttaacaaaaataatacacaacagtcaggacagcacgtataggaacaaggcttgttccccccttcctttttttgtttttgagatggagtcttgctctgtc

SEQ ID NO: 684353 - DNA, 588 bp, Homo sapiens
caactgatctgataactgaggtggctagtatgtaactagcgggtggggagcacatacagcatgaatatgttggacaaagggatgattcgtgtcctgggtaggacggagcaggaggctgtgagatttttatcatgttattcagaactgtttgcaatttaaaactcatgaaatgtttatttatataatcttccattcaatatttttggaccacgggtgacgcaggtaagtaaaaccacgtaaggcaatactgtggataagaagggactactgtaccagcaacgaacaatcagaaaaggaaattaagaaagcaattccatttacaatcgcatctaaatgaaaaaaatgcctgggaataaatgtaaacaaggaggtgagagacttgtatgcttaaattacaaaacgttgctcaatgccaggctaacacctgcaatcccagctctggcaacagagcaagactccatctcaaaaaaaaaaagaactatagcaatcttaacaaaaataatacacaacagtcaggacagcacrtataggaacaaggcttgttccccccttcctttttttgtttttgagatggagtcttgctctgtc

SEQ ID NO: 684354 - DNA, 622 bp, Homo sapiens
tgtaacttattacagattcaagtgtcaaaggtaaataagtaatccttctagaaatgtaacatgggagaacatatttataacctataggtagggaaaatattcyttaaatggacacctaatgcattaaacataaaacaaagaattgagaacttttataattgaataatgaaaagtaatctgatgaaaaatggacaaggaaaaaacaaaacaacaacaaaaatgggcaaattacctggctaggcatttctccaaagaagattgcaaatgtcaataagcacatggaaaaatgctcaaatgctcaacattagtcatcagagaaatgcacatcaaagccacaatgagacaccacttttcacccattaggatggctataatcaaaaggacatcataagtattgtccaggatgtagagaaattgtaaacctcatacattgctggtgggactataaaatgacacagctgctttgaaaattagtctggcaattcctaaaaatgttaaatgaagttaccatataacccagcaatttcactcctaggtatatacacaagaaaaatgaagacatacatccacacaaatacttacaagtgaatgttcgtagcagcatttttcataataacaaaaa

SEQ ID NO: 684355 - DNA, 1165 bp, Homo sapiens
gaatatctgatatagttgtaggaagaatggcatcataataggctgtggaagaaaaggtagaatggagagatttttgaagacctcaacttacatctaactcacagttgaacaactatttatgatctgtctctttttaactttaacttttatcttatcccaagacaattatatatagctcaaattataaaactgaccctaatcttaactctacctgcaaattcaactccaactctaaccatgaacactatattaatgtacactgatgtgcgttcatttatttctgactgatatatattgatataatcaattgatgattgattagaatgaatcatactttgctgatggggtataatttgaattttaacaaacaatttttctggaaaactagttgaaatacatattcatgtttttatattatagaaactatggtatatttacagccttttaatcatgtatataaagaatttttattgattaaagtaatcaataaatgtaatacatcataaatactaaatcataaatattatcttgaaaaactcaagagtaaatgcttagtaaatattgctagatatttatgggcttataggtgaggtttcttttctctctctctcccttttctcttttttccatatttttctaatatgtacaaattaattttrtaatcagaaaaataataggagaagatggcattgcaattatgaaaaaagtagaagctaaattatatatcagttgggttttatataaagacagaatgcagacttcaagtaaatgcagagtttagttgattcatcaaacgtttatatgggtaggaaatctatatttatacttccctataatccctttgacaagaaaacttttttttggtaaacttattcttgttgaaatttagtcaagaacaaagatagactgggcatgatggctcacacctgtaatcatagaagtttgggaggctgaggcaggaggagtgtttgagtccaagagttcagaccagcctgagcaacaatgaaacatcatctttacaaacatttaaaaacaaaactaaactaaacaaaaaaacaggcatggtggcatgcacctgtaatcctagttactcaagtggttgaggcaggaggattgcttgaacccaggaggtcaaggctgcagtgagctatcattatgccactgc

SEQ ID NO: 684356 - DNA, 1165 bp, Homo sapiens
gaatatctgatatagttgtaggaagaatggcatcataataggctgtggaagaaaaggtagaatggagagatttttgaagacctcaacttacatctaactcacagttgaacaactatttatgatctgtctctttttaactttaacttttatcttatcccaagacaattatatatagctcaaattataaaactgaccctaatcttaactctacctgcaaattcaactccaactctaaccatgaacactatattaatgtacactgatgtgcgttcatttatttctgactgatatatattgatataatcaattgatgattgattagaatgaatcatactttgctgatggggtataatttgaattttaacaaacaatttttctggaaaactagttgaaatacatattcatgtttttatattatagaaactatggtatatttacagccttttaatcatgtatataaagaatttttattgattaaagtaatcaataaatgtaatacatcataaatactaaatcataaatattatcttgaaaaactcaagagtaaatgcttagtaaatattgctagatatttatgggcttataggtgaggtttcttttctctctctctcccttttctcttttttccatatttttctaatatgtacaaattaattttgtaatcagaaaaataataggagaagatggcattgcaattatgaaaaaagtagaagctaaattatatatcagttgggttttatataaagacagaatgcagasttcaagtaaatgcagagtttagttgattcatcaaacgtttatatgggtaggaaatctatatttatacttccctataatccctttgacaagaaaacttttttttggtaaacttattcttgttgaaatttagtcaagaacaaagatagactgggcatgatggctcacacctgtaatcatagaagtttgggaggctgaggcaggaggagtgtttgagtccaagagttcagaccagcctgagcaacaatgaaacatcatctttacaaacatttaaaaacaaaactaaactaaacaaaaaaacaggcatggtggcatgcacctgtaatcctagttactcaagtggttgaggcaggaggattgcttgaacccaggaggtcaaggctgcagtgagctatcattatgccactgc

SEQ ID NO: 684357 - DNA, 655 bp, Homo sapiens
ataatcaatatcataatcacatctgaaaaaactaataatttcttcctcatgatcctgaggtcatctgggtgtctctatcattagaatgcttagggatggccaggagtctctcctgctaaaatgcctgaggttggccaggagtctctcctgttagaatgcctggggtcggccaggtgtctctccttagaatgcctggggttttcaatgtttaattttgctcaactgaatcataaatttacacattgttcaaatcaacatatatatgttttatgcattataattggttaatatgcctcttgtctctcaggtctctcttatctatgcattcccttcttcacrtatccatgtctctctgtccttctgttggtccctgctcccctccccttctctctctctctccaaccccccatgtcaataactttgttgtagaaaccaggccatttgtcccgcagagatttccacaatctggaatttgaaaattgcatcactacaatattatttagcttattcctctgtccccaaaaattggtacttagatctagaagcttggtaagattcaggttagacgtttttgcaagaatactacaggtagtattgtgtacttccatcagggggcacataatgtctaattgtctccccttggcgctattagcag

SEQ ID NO: 684358 - DNA, 655 bp, Homo sapiens
ataatcaatatcataatcacatctgaaaaaactaataatttcttcctcatgatcctgaggtcatctgggtgtctctatcattagaatgcttagggatggccaggagtctctcctgctaaaatgcctgaggttggccaggagtctctcctgttagaatgcctggggtcggccaggtgtctctccttagaatgcctggggttttcaatgtttaattttgctcaactgaatcataaatttacacattgttcaaatcaacatatatatgttttatgcattataattggttaatatgcctcttgtctctcaggtctctcttatctatgcattcccttcttcacatatccatgtctctctgtccttctgttggtccctgctcccctccccttctctctctctctccaaccccccatgtcaataactttgttgtagaaaccaggccatttgtcccgcagagatttccacaatctggaatttgaaaattgcrtcactacaatattatttagcttattcctctgtccccaaaaattggtacttagatctagaagcttggtaagattcaggttagacgtttttgcaagaatactacaggtagtattgtgtacttccatcagggggcacataatgtctaattgtctccccttggcgctattagcag

SEQ ID NO: 684359 - DNA, 2247 bp, Homo sapiens
gtgtggtggcagaactgactgaggggtgtgcaaggaacagtggggactggggctgagggacctgttgtgttragggacgtgagatggtagatgccacagggcccggctagtctggaggggctccatggtctatgcaggggataatggaaggacttgtctttagctttgggccatgcatggaaagtaagggctaattcttaggcaaatttttgtcttcagccctaagcatagtatctgggtcatagaggcaaatgataaatacatgctaaataaatgaataagcacaggaacaggttttgtcaactgtgaaagagatttaaggcattaggggttaggtggatccaagaggccattttgtaatccatggaatcccactctgtagacatctaccttaaggtcagctctgggttaaaaaagggctgtctctgctccccactgggcaatccctggggaccagagctgactgagcccacaggacctggactggtgaggcccatcagcctgcaagcccctgagggagttagcctgctttattcagcattgtatctccagccccagcacacatggggctttaggagttcgtgaaatgtgccccaaaggaaattcttccaaatagagactgttgtggccaccgggtggtgccattgttccagccgaagcccacagagcctactgggaagaccacattgtttggaactttgagttgaagccaaggttcttcaacatatctctcaggctctaatctcaatgcagtatattctcatcccataacaaggggattaacaacacaattgtagttaatttgaattgagaaaatctatttcagaaagcaaaattccaagaccattctttctctcagccagccaagaagggcccaacttgttgataggggaaggttctgcacaaactggcaaatcggcttgcaggctgaacttcctacacagctcactactgtgctgattcacagaactgcagaactcactaagcattccggcccctgtgcactatcttggtacccatcataaaggcagctggagacaaatacaggaaggatcctcaacctaaattcccatcactccttccacagcactctttgctcgcaagctcttggtgtaggatgcgtctctactcttctccatatgttcatatcctacctttcctttaacgttaatttcccaaagaggacttttgtgtgccccctgctcctaaaaccaaaaccttctctgaatcctggaagcactctgaccaaatgggctctgagaaacagcactgtgacccacatttttctgtacctgttgtttcttgactcatgattaaggtggtaattccctttaggacaaacttcattttttgagtttgttgtgttcctgcacacaaaaagcactcagtagatatttatggatgttgaacagcaaagtaaaacatactgcttcatattcaaagggctgagagatgtttaatagctaaacataaaaagagagagttccgtgggtcattactcttgttctcagatagctatagattatgattttagattataatctgtacactagcagtatgactttgtattatattattattagaaataatattaataataagtgcatttattgagtgcctaatatatagtagtcactgtgctgtgcattttacatatgtacctaatttttttctcaacaaccctgggaggcattatttccattttccacagggggaagagtaaggctcaggaagattaagtaaactgttcaagtttctaagttaatgctggctgagctctgtggagttgactgtggggttcgaaaacccaagctgcttttcagaatccttgtccatagggaccaggtcccatagtgggtgttggggtcatgcaaagctacacttaattagatccgactcttaaagagctcacgggcacagagaacactatggctggaggagcagcagcctagggtgatggccagaaacaatgcatcttggaacttttacagaagtgaatccctcaaattgtccttcagtaggaaccagacaaatctcaaagtacaatatacttgcctagtagagcatgtgcaaggaaagtgtatcattgcttatatggtatgatttggaggccacctgggagactttcctatccccaaataccttcctttcttgcctgttatgatgccctgaatgtcaccaatagttcttatttcctttgagttttaagtgtttttacatttctcaacattcttcatgacctatcca

SEQ ID NO: 684360 - DNA, 2247 bp, Homo sapiens
gtgtggtggcagaactgactgaggggtgtgcaaggaacagtggggactggggctgagggacctgttgtgttgagggacgtgagatggtagatgccacagggcccggctagtctggagggrctccatggtctatgcaggggataatggaaggacttgtctttagctttgggccatgcatggaaagtaagggctaattcttaggcaaatttttgtcttcagccctaagcatagtatctgggtcatagaggcaaatgataaatacatgctaaataaatgaataagcacaggaacaggttttgtcaactgtgaaagagatttaaggcattaggggttaggtggatccaagaggccattttgtaatccatggaatcccactctgtagacatctaccttaaggtcagctctgggttaaaaaagggctgtctctgctccccactgggcaatccctggggaccagagctgactgagcccacaggacctggactggtgaggcccatcagcctgcaagcccctgagggagttagcctgctttattcagcattgtatctccagccccagcacacatggggctttaggagttcgtgaaatgtgccccaaaggaaattcttccaaatagagactgttgtggccaccgggtggtgccattgttccagccgaagcccacagagcctactgggaagaccacattgtttggaactttgagttgaagccaaggttcttcaacatatctctcaggctctaatctcaatgcagtatattctcatcccataacaaggggattaacaacacaattgtagttaatttgaattgagaaaatctatttcagaaagcaaaattccaagaccattctttctctcagccagccaagaagggcccaacttgttgataggggaaggttctgcacaaactggcaaatcggcttgcaggctgaacttcctacacagctcactactgtgctgattcacagaactgcagaactcactaagcattccggcccctgtgcactatcttggtacccatcataaaggcagctggagacaaatacaggaaggatcctcaacctaaattcccatcactccttccacagcactctttgctcgcaagctcttggtgtaggatgcgtctctactcttctccatatgttcatatcctacctttcctttaacgttaatttcccaaagaggacttttgtgtgccccctgctcctaaaaccaaaaccttctctgaatcctggaagcactctgaccaaatgggctctgagaaacagcactgtgacccacatttttctgtacctgttgtttcttgactcatgattaaggtggtaattccctttaggacaaacttcattttttgagtttgttgtgttcctgcacacaaaaagcactcagtagatatttatggatgttgaacagcaaagtaaaacatactgcttcatattcaaagggctgagagatgtttaatagctaaacataaaaagagagagttccgtgggtcattactcttgttctcagatagctatagattatgattttagattataatctgtacactagcagtatgactttgtattatattattattagaaataatattaataataagtgcatttattgagtgcctaatatatagtagtcactgtgctgtgcattttacatatgtacctaatttttttctcaacaaccctgggaggcattatttccattttccacagggggaagagtaaggctcaggaagattaagtaaactgttcaagtttctaagttaatgctggctgagctctgtggagttgactgtggggttcgaaaacccaagctgcttttcagaatccttgtccatagggaccaggtcccatagtgggtgttggggtcatgcaaagctacacttaattagatccgactcttaaagagctcacgggcacagagaacactatggctggaggagcagcagcctagggtgatggccagaaacaatgcatcttggaacttttacagaagtgaatccctcaaattgtccttcagtaggaaccagacaaatctcaaagtacaatatacttgcctagtagagcatgtgcaaggaaagtgtatcattgcttatatggtatgatttggaggccacctgggagactttcctatccccaaataccttcctttcttgcctgttatgatgccctgaatgtcaccaatagttcttatttcctttgagttttaagtgtttttacatttctcaacattcttcatgacctatcca

SEQ ID NO: 684361 - DNA, 2247 bp, Homo sapiens
gtgtggtggcagaactgactgaggggtgtgcaaggaacagtggggactggggctgagggacctgttgtgttgagggacgtgagatggtagatgccacagggcccggctagtctggaggggctccatggtctatgcaggggataatggaaggacttgtctttagctttgggccatgcatggaaagtaagggctaattcttaggcaaatttttgtcttcagccctaagcatagtatctgggtcatagaggcaaatgataaatacatgctaaataaatgaataagcacaggaacaggttttgtcaactgtgaaagagatttaaggcattaggggttaggtggatccaagaggccattttgtaatccatggaatcccactctgtagacatctaccttaaggtcagctctgggttaaaaaagggctgtctctgctccccactgggcaatccctggggaccagagctgactgagcccacaggacctggactggtgaggcccatcagcctgcaagcccctgagggagttagcctgctttattcagcattgtatctccagccccagcacacatggggctttaggagttcgtgaaatgtgccccaaaggaaattcttccaaatagagactgttgtggccaccgggtggtgccattgttccagccgaagcccacagagcctactgggaagaccacattgtttggaactttgagttgaagccaaggttcttcaacatatctctcaggctctaatctcaatgcagtatattctcatcccataacaaggggattaacaacacaattgtagttaatttgaattgagaaaatctatttcagaaagcaaaattccaagaccattctttctctcagccagccaagaagggcccaacttgttgataggggaaggttctgcacaaactggcaaatcggcttgcaggctgaacttcctacacagctcactactgtgctgattcacagaactgcagaactcactaagcattccggcccctgtgcactatcttggtacccatcataaaggcagctggagacaaatacaggaaggatcctcaacctaaattcccatcactccttccacagcactctttgctcgcaagctcttggtgtaggatgcgtctctactcttctccatatgttcatatcctacctttcctttaacgttaatttcccaaagaggacttttgtgtgccccctgctcctaaaaccaaaaccttctctgaatcctggaagcactctgaccaaatgggctctgagaaacagcactgtgacccacatttttctgtacctgttgtttcttgactcatgattaaggtggtaattccctttaggacaaacttcattttttgagtttgttgtgttcctgcacacaaaaagcactcagtagatatttatggatgttgaacagcaaagtaaaacatactgcttcatattcaaagggctgagagatgtttaatagctaaacataaaaagagagagttccgtgggtcattactcttgttctcagatagctatagattatgattttagattataatctgtacactagcagtatgactttgtattatattattattagaaataatattaataataagtgcatttattgagtgcctaatatatagtagtcactgtgctgtgcattttacatatgtacctaatttttttctcaacaaccctgggaggcattatttccattttccacagggggaagagtaaggctcaggaagattaagtaaactgttcaagtttctaagttartgctggctgagctctgtggagttgactgtggggttcgaaaacccaagctgcttttcagaatccttgtccatagggaccaggtcccatagtgggtgttggggtcatgcaaagctacacttaattagatccgactcttaaagagctcacgggcacagagaacactatggctggaggagcagcagcctagggtgatggccagaaacaatgcatcttggaacttttacagaagtgaatccctcaaattgtccttcagtaggaaccagacaaatctcaaagtacaatatacttgcctagtagagcatgtgcaaggaaagtgtatcattgcttatatggtatgatttggaggccacctgggagactttcctatccccaaataccttcctttcttgcctgttatgatgccctgaatgtcaccaatagttcttatttcctttgagttttaagtgtttttacatttctcaacattcttcatgacctatcca

SEQ ID NO: 684362 - DNA, 2247 bp, Homo sapiens
gtgtggtggcagaactgactgaggggtgtgcaaggaacagtggggactggggctgagggacctgttgtgttgagggacgtgagatggtagatgccacagggcccggctagtctggaggggctccatggtctatgcaggggataatggaaggacttgtctttagctttgggccatgcatggaaagtaagggctaattcttaggcaaatttttgtcttcagccctaagcatagtatctgggtcatagaggcaaatgataaatacatgctaaataaatgaataagcacaggaacaggttttgtcaactgtgaaagagatttaaggcattaggggttaggtggatccaagaggccattttgtaatccatggaatcccactctgtagacatctaccttaaggtcagctctgggttaaaaaagggctgtctctgctccccactgggcaatccctggggaccagagctgactgagcccacaggacctggactggtgaggcccatcagcctgcaagcccctgagggagttagcctgctttattcagcattgtatctccagccccagcacacatggggctttaggagttcgtgaaatgtgccccaaaggaaattcttccaaatagagactgttgtggccaccgggtggtgccattgttccagccgaagcccacagagcctactgggaagaccacattgtttggaactttgagttgaagccaaggttcttcaacatatctctcaggctctaatctcaatgcagtatattctcatcccataacaaggggattaacaacacaattgtagttaatttgaattgagaaaatctatttcagaaagcaaaattccaagaccattctttctctcagccagccaagaagggcccaacttgttgataggggaaggttctgcacaaactggcaaatcggcttgcaggctgaacttcctacacagctcactactgtgctgattcacagaactgcagaactcactaagcattccggcccctgtgcactatcttggtacccatcataaaggcagctggagacaaatacaggaaggatcctcaacctaaattcccatcactccttccacagcactctttgctcgcaagctcttggtgtaggatgcgtctctactcttctccatatgttcatatcctacctttcctttaacgttaatttcccaaagaggacttttgtgtgccccctgctcctaaaaccaaaaccttctctgaatcctggaagcactctgaccaaatgggctctgagaaacagcactgtgacccacatttttctgtacctgttgtttcttgactcatgattaaggtggtaattccctttaggacaaacttcattttttgagtttgttgtgttcctgcacacaaaaagcactcagtagatatttatggatgttgaacagcaaagtaaaacatactgcttcatattcaaagggctgagagatgtttaatagctaaacataaaaagagagagttccgtgggtcattactcttgttctcagatagctatagattatgattttagattataatctgtacactagcagtatgactttgtattatattattattagaaataatattaataataagtgcatttattgagtgcctaatatatagtagtcactgtgctgtgcattttacatatgtacctaatttttttctcaacaaccctgggaggcattatttccattttccacagggggaagagtaaggctcaggaagattaagtaaactgttcaagtttctaagttaatgctggctgagctctgtggagttgactgtggggttcgaaaacccaagctgcttttcagaatccttgtccatagggaccaggtcccatagtgggtgttggggtcatgcaaagctacacttaattagatccgactcttaaagagctcacggrcacagagaacactatggctggaggagcagcagcctagggtgatggccagaaacaatgcatcttggaacttttacagaagtgaatccctcaaattgtccttcagtaggaaccagacaaatctcaaagtacaatatacttgcctagtagagcatgtgcaaggaaagtgtatcattgcttatatggtatgatttggaggccacctgggagactttcctatccccaaataccttcctttcttgcctgttatgatgccctgaatgtcaccaatagttcttatttcctttgagttttaagtgtttttacatttctcaacattcttcatgacctatcca

SEQ ID NO: 684363 - DNA, 670 bp, Homo sapiens
caaattaaatatttggtgaacattactgtatattatatttctcttgcactggcaatttttaagttattagttcactaagattcagcatttcttttagggaaagaaatattattagttttttgctaattcatcactatttgcaattaaaataagcagctaaatttactttttctaaaagacattagtccttcatactggctctgcacttacaatacattccaagggtttttgagctattcatgtcatgagtatttttaatcatatttcatctaacactaatttatccaatttgtagaaattgcttatctgaaaaaaaatacwatttttctttgtgcagcaacaggttcactggcagtctgattagctggttcaccagatctgtgaaacggctgtcacaaactcccaaatcctcaaatcttctttttaagcaagggtcaaaaaattttatacctattcaccaccttcagcaacagaagatagaaaagaaaaacacttctacattcaatatatgttttgcacttttaaagaaagtcacagataatacatattttacatgttcatgattgttggtgatcaaaggagtaatacggtgctaagaaagttgcttttatagaaaccatcttttgtgaaatgacagtatttcttaagagttagctgtgaccaagtctca

SEQ ID NO: 684364 - DNA, 674 bp, Homo sapiens
tgagatgtgcctttcaccttctgccatgattgtgaggcctccccagccacatggaaccatgagtccattaaacctctttcttttgtaagttacccagtctgatgtatgtctttatcagcagcatgaaaatggactaatacacagaccaaccccaaatcttattgaaatrtcaaccaaaattttaaatgtgcatactcaacacttataaaactcaacatttgtaagctcaacacttgtaaaactcaaaagaataaaatttgtatacttacataccaggacattcaagtattgtttgtattaccaaaagattgaaaaataactggaaatgacacaaataacatcaacaagaaaatggcaaagattgattttcaccctttaaatcattggttaatgtattgttggtatgtatgcagtaaatgactaactcagtaactgtttgttgtccctgcctatctcaaagaaaggtatgacacttgttcctcactcctgaaaggaaatctctaaatccctggaatatcctgtttctgaagaatgtctttgttttcatagagactttgggccatgacagaaagggcttggaacacttgacatcagcttgacctaccttggagcttccctggtttggaatatagtctcgcaccacataacaacgttttagtcaaagagactgcata

SEQ ID NO: 684365 - DNA, 674 bp, Homo sapiens
tgagatgtgcctttcaccttctgccatgattgtgaggcctccccagccacatggaaccatgagtccattaaacctctttcttttgtaagttacccagtctgatgtatgtctttatcagcagcatgaaaatggactaatacacagaccaaccccaaatcttattgaaatgtcaaccaaaattttaaatgtgcatactcaacacttataaaactcaacatttgtaagctcaacacttgtaaaactcaaaagaataaaatttgtatacttacataccaggacattcaagtattgtttgtattaccaaaagattgaaaaataactggaaatgacacaaataacatcaacaagaaaatggcaaagattgattttcacyctttaaatcattggttaatgtattgttggtatgtatgcagtaaatgactaactcagtaactgtttgttgtccctgcctatctcaaagaaaggtatgacacttgttcctcactcctgaaaggaaatctctaaatccctggaatatcctgtttctgaagaatgtctttgttttcatagagactttgggccatgacagaaagggcttggaacacttgacatcagcttgacctaccttggagcttccctggtttggaatatagtctcgcaccacataacaacgttttagtcaaagagactgcata

SEQ ID NO: 684366 - DNA, 613 bp, Homo sapiens
tcctgctgatgtccacatgggggtgttgacacccaagactgatggcacagatatttgttcaaagacactgatgtctaatgtggaggtgctacaagggtggccaccaatataatcaccatcctaatgttgctgtttcagtaacatcttcatcaccactaccaatgttgtaattactgatgtctcacattctaaatgtcctaaagaaattgtgggaaaaaaatagctctctctttttttttcactcttctttgacattccttaaacctgttatttggtcctgaggctatgagatagtttgattgacattgctgtgctatttaaaaaatcatgccatttcagctgggtgcaggggctcacacttgtaatcccaraactttgggagactgaggcaggcagattgcttgagcccaggagtataagaccagcctgtgcaacatggtgaaatcctgtctctacacaaaaatacaaaaattagctgcacatgatggcagatgcttgtagtcccagctactcgggaggctaaggtgggaggatcacttgggcccacaaagcagaggttgcagtgagctgagattgtgccactgagctccagcctaggtgacacagtgagagc

SEQ ID NO: 684367 - DNA, 584 bp, Homo sapiens
tcaaacggatccttgtttatattcaygtatgcagagtttgcattgaggattgtaatgactcaaacacagactcacaggtgttctctttccagtaatggtgtactacatattttgcaataagtctctcattgagaacacctaagaaaggtaggcagaacttttagaaattatgtttgaatgcatcagagagctgctaagataaatgattatgaggtctaaatccaatccaggaacatttttaggacttctggacccatttcctcacagaggttatattttgtagagggccagatagtaattgtttctgattttgtaggccatttggtcactggcacaactgatcaactctgccactgtagcaccaaaagtagccatagacaatattacatcaatggatatgactgtgtttcagttaaattttattgataaaaacagatttgatgaatgggccgtaattccctgacctctactccagaaacatttgtcagttatgaatgaggtgagctttcaatatgctcatagcactagggggacaaaatttagtgctagaggcccacaaagaagaagatgtgagcggctttgga

SEQ ID NO: 684368 - DNA, 1228 bp, Homo sapiens
tctgttttgttctcaagatgagaagaaaaattactatatgtaattctctatgtcttatcgcttatgggtatacatgccttcctttgaaactttctagagaagttagcagagtatctgtaagacatccagttaaagccttcagccagctaccaacccatgcctatctcttcagctgctgtaagtgatgaaagaattttgaggtcatggcttacggcactgatcatatgaaggtgatgatgatcttataacaatagcaggttatgaagaagtataattagtcttcattttcccctgccctgatgtgcctgtcaaatgccayaaagctatttctattactctcctatcattttctaggctacagagaattcttatcttgatttttaataattttttttcaagttccggttatatgtctcttaggaaagcttggtgaacccaagtgtctggcagctacaaacaaatgattaattatcattacagagaactaataaatacggcaggtataatgtaatatgcttaagtatatcaacataaacatttttgaaggtactcagcctcctattcgactatgttttaacttgttccacatagaaacggtctaacagtgatcttacgcaccttttatttctcttgactgacgaacgaggagcaatcattccatcatccctgtactatgacaaggtttcttagtagctataaataacagctctataatcacttctaattgctaccttttcttccccttggcactgaattccattaggaacagtcaggttgagttttcttaaaagattaacaaaaaaattggatgcaaaaagagtatagcattcttatcttgtacttccccttctgtatgtggtttttattaacttcaaaagaagctgtaagcacagaaatcagtatccagagagatgtactaaaatctaatcattctctcatatatcttccagacggtcctgaatgggattcattggccaagcaacacatggcacagatggctgcaaacataacactgcacaatgcccaagagcatggtgtaatgggccaggaacacagtctcactattgttttccatgtagaggtaaatactattcaagtgtcttcagcctaaagagttgggcactagcagggcagtgctgaaaactgcatatgcaggtaggagagtcagaagggagaggtgggaaaaaggaagaaagagaaagaagcaaaagaaaggaagtaaaaataa

SEQ ID NO: 684369 - DNA, 665 bp, Homo sapiens
atcctttaccctgtgtctgagaccaatyataaagtgacatacagttttctaccccattaggaaaatagtcatggtgattgtagaaaacatgtgatgagaaaatagttatcactgatattaagcagttgtctcagaattaaccttagcgatatttctgagctgcaagggaaccactttgaaccccatttagcatcagggctctttgtaatgtgatatcatctgttgttattttaattcatataaatatttcttataataaaaactatggttcagattagtatataggtcaagagtcaaaaatcacccagagatttctgatgggaattggaataatccaatggcaaatagtcgtatgataaggtcaacaactttgctagtaatgggggagctctatttcatatccatctgattgacaaacttaagaataaagtttgacaataatatgtttgcaataagatcttgcatgcatagcgaagtggtacagccattttgataaaaagctaagttatagctaataaacttgaatttatgcatgcttcaatccaggaagtccagccctaagtttgcactctcacacatgtgtttgaaaagaattataaataaatgcttattgccacattgttttaacagtgaagaaaatttgcaaataacctaaatatttatca

SEQ ID NO: 684370 - DNA, 2049 bp, Homo sapiens
  misc_feature 33: n = A,T,C or G
cttgatccaactatttaaaatttgaagcctcantttctctatttgttaaagaaacaacttatacacctgaagatgaaaaggaaamctatatagaaagtgcatagagcctgtcagtttatttaatttctgagttatgtacccaatatccataattcatccattcatttactcattcaatgaatctttattaagtgcctaccttgtgtcaagcactgtattaagcacagtgaaataaaaaaaaaaaatcctgccttgtggagcttatattcttatttgtgagatgtgactaaattcttattaagaaagttaatcacatacttgcctgtgaaattataaatatgtataattataaaattatcttctctaagctaaaaagaaaccctatctctaaatctatatttcctttatctctttattgcctttctttagccattcctgtttcccttggcaattatgataatttttatgtgtctacttctgtattaggcttgaaatggagttagaaggttggatgggaaaggtatacaggaatgttattccctaccccaaaaatgctgaatgtcacagaaaataaaaaaatcagggccgggtgcagtggttcgcgcctgtaatcccagcactttgggaagccaaggtgggcagatcaccagaagtcgagagttcgagatcagcctggctaacatagtgaaaccccgtctctactaaaatatacaaaattagctgggtgtggtgtcgtgcacctgtaatcccagctactccagaggctgaggaaggagaattgcttgaacctgggaggcggaggttgcagtgagctgggatcgtgccactgcactccagcctgggtgacagagtgagacttcgtctccaaaaaaaaaaaaaaaaaatcatttaacgttgagtacataatgtgttaagtgaaataaaaatataattatgaatacagaaccatatgttaaacaataaatagaaatatacaaaatgagaattcagataaggaaaaaataagtcaatataaaattaatcaaaagaaaccttcacaaaagtggtggctttcaagccaactttgaaggatggatacattttcaacacatggagaagagaagaacaatcatgagagggtaacattttttttctcccagctcctaatgctcagatccttaattagtatcattactctagttgtgccagatttcagataaataaaataccttatctaattagcagaacacaacctggcaaccaatgttttttgttggtttcaccaataaatccaaatttaccaaatattttctatttttcaatttattcagccccgcagttctgttttcaatttattctccctgcagttctgttgttaaataacagacaggatccatacatagagtgtccagataccacctatagttgagtaggatctagccttttctactttctcagccagaaaataaggtatgtggccacagccttacggcaatttaagtctgacaggcctcagttccttctgcttccgtggttagggttgtctgaccaagctagagatgcatatgcagtttacagttcttatttggttctgaaatactctaccacatcccaccagaatcatgcgttattcccgaccatctactttttctcaatcctatgtatagtgatgtttttaggcagctaatcattccaaggcgtatgaagagaactgtctaaacctctcttgctgccatctacttcctgcacaggtcatcctcagagtactctctgaatgcacgcagggtttgagaactgattggctcagaaggttctggattctggttttgattcatttcaaagacagcaactgtatttaggggaagaaggcttttttctctctggtcttggtgtccctacatatcaaggttgggcactaaaagtatcaataaaccagtgtgttcatcctcatctccacctttatattttgtggccatctgccaaactatgattctgggcatgcaatattaggtatgttgtccaataatgtacttttgcattcatcttcttcaaggaagcacataattgaat

SEQ ID NO: 684371 - DNA, 2049 bp, Homo sapiens
  misc_feature 33: n = A,T,C or G
cttgatccaactatttaaaatttgaagcctcantttctctatttgttaaagaaacaacttatacacctgaagatgaaaaggaaaamtatatagaaagtgcatagagcctgtcagtttatttaatttctgagttatgtacccaatatccataattcatccattcatttactcattcaatgaatctttattaagtgcctaccttgtgtcaagcactgtattaagcacagtgaaataaaaaaaaaaaatcctgccttgtggagcttatattcttatttgtgagatgtgactaaattcttattaagaaagttaatcacatacttgcctgtgaaattataaatatgtataattataaaattatcttctctaagctaaaaagaaaccctatctctaaatctatatttcctttatctctttattgcctttctttagccattcctgtttcccttggcaattatgataatttttatgtgtctacttctgtattaggcttgaaatggagttagaaggttggatgggaaaggtatacaggaatgttattccctaccccaaaaatgctgaatgtcacagaaaataaaaaaatcagggccgggtgcagtggttcgcgcctgtaatcccagcactttgggaagccaaggtgggcagatcaccagaagtcgagagttcgagatcagcctggctaacatagtgaaaccccgtctctactaaaatatacaaaattagctgggtgtggtgtcgtgcacctgtaatcccagctactccagaggctgaggaaggagaattgcttgaacctgggaggcggaggttgcagtgagctgggatcgtgccactgcactccagcctgggtgacagagtgagacttcgtctccaaaaaaaaaaaaaaaaaatcatttaacgttgagtacataatgtgttaagtgaaataaaaatataattatgaatacagaaccatatgttaaacaataaatagaaatatacaaaatgagaattcagataaggaaaaaataagtcaatataaaattaatcaaaagaaaccttcacaaaagtggtggctttcaagccaactttgaaggatggatacattttcaacacatggagaagagaagaacaatcatgagagggtaacattttttttctcccagctcctaatgctcagatccttaattagtatcattactctagttgtgccagatttcagataaataaaataccttatctaattagcagaacacaacctggcaaccaatgttttttgttggtttcaccaataaatccaaatttaccaaatattttctatttttcaatttattcagccccgcagttctgttttcaatttattctccctgcagttctgttgttaaataacagacaggatccatacatagagtgtccagataccacctatagttgagtaggatctagccttttctactttctcagccagaaaataaggtatgtggccacagccttacggcaatttaagtctgacaggcctcagttccttctgcttccgtggttagggttgtctgaccaagctagagatgcatatgcagtttacagttcttatttggttctgaaatactctaccacatcccaccagaatcatgcgttattcccgaccatctactttttctcaatcctatgtatagtgatgtttttaggcagctaatcattccaaggcgtatgaagagaactgtctaaacctctcttgctgccatctacttcctgcacaggtcatcctcagagtactctctgaatgcacgcagggtttgagaactgattggctcagaaggttctggattctggttttgattcatttcaaagacagcaactgtatttaggggaagaaggcttttttctctctggtcttggtgtccctacatatcaaggttgggcactaaaagtatcaataaaccagtgtgttcatcctcatctccacctttatattttgtggccatctgccaaactatgattctgggcatgcaatattaggtatgttgtccaataatgtacttttgcattcatcttcttcaaggaagcacataattgaat

SEQ ID NO: 684372 - DNA, 1375 bp, Homo sapiens
ttttatatcaattaatttaaaagcaaagcagcatgtgcttatatttgtctgaaatattggaacagacgggacagacatcttattacatgctagtaaaaataagcacttgtgctattttggttgacatttttcctcttcgatctatgataaatagggttatatctagactatcttcgcttttcacaactttttattattaaacatttcatatatttaaaaatattggtaatgaataatacatttttaggcataataataaaacatatatatacccaccacccagattaagaaatagcacctttccaatactgctgtatctagctgtgtgaaaacactggcatttccactgtcttttcataaaaggtaaccacaagcatgggtatgttctatataattttccttattattccattatctagcaaagaatgagaaagaataaatagcctttcactggttatagaataaaaagtggtaattttttcaatttggaaagacagttggtcaaggtggacatgccatgaaatatagacatgtaatagaagtgagtgcctgccccaaaacagtcttagctttaattctttttttagataaagtatagctgtaacttttttcttttgtagatagtttctctttgaactttggtttcttattcaaaatttttggaaatgctgttgggtatattccattcgaaaatatagaatgatatgatataaaagatggtctcccttgttcctcaatattttttttgtatccttacacaagtttggatattttcattttcacaagatttaacatatttttaaaatattgcacagttcagggaggttacattcagatatattttatgaagcatggatgtatagtcatcaaatttatttaaggtaagaaaaatatttctccaattaaatattagtgaactatgtttgttaaaatatggcatgtctaaatttgtgatcttttacctcataagactggctaatggctactctagctggataatatattattaaccactmtggctgcttgaaatacaagtaacagggaggtattaaatatgtacactatattatgcaaatgagtgatgttaaatcaaggtcctagagctgactttcttaggatgtagttaacattagacaacatgagctaaagttgtggctttcaatgtcatatacagctattttaaggcagcacatattcgaacaactatttgtttcctggccttgtgcgcaaagctctggggatttaagtatctagaaagaggttataaattcaagggtggtgcctttattattaatggtatcatccagcagtcacttccacaatataaggtacataaattcaaaactgtcttttggttttggggctttagtagtta

SEQ ID NO: 684373 - DNA, 1594 bp, Homo sapiens
cgcctagctggtgtccactatgacccctctgcctgcagcaggccgaatcagacccggcgtgggcgaattcagaagtgcccagggagagacaagctagaggctctgcggacttctgcgggcggctgacaacgcgagggcgaggggttagaacaactcggccaaagcgatctgaactttctccccttgggtcagccggcgctgggccgacctggtgggcgcggggctgtgtttacagacacttgcctttgtttatagcatggggaggaggtgtgggggaggcgcgccctgattttctgttgctctcccaatcctcctgcgtttgatccagtggttccctccctctcctgattccagttgtcttccgcgtctttattttaatctgctcaggagaaagccatcaggtcctagacgtggaagaaaggagcctaccaaagtgttggagtaaacagtggcggaggaggtgaggttttaaaaacaggaaacggagaggagttatcttcaccatgcacctacgcttctctgcaccttgtgtagctggtctccgccatctgggccttaaggcacttctgcagatttaacactttctctggcttattaaacaacaacagagggaaaccaaaagaccctggcgcaccattgctacggagaaacttgctaatacacttgctttttaaacctgcgctcctctttggccccggccaagcacagcctgcctcctcttcctcagggccagcaacactaggcctggtcaccccacccgccctgccatttcaactcgccagaaaccctaaccagccagacacccagcagaccggacaccccagacggcagaatgcccagctgcctgacactgcaggcggctgaaccccctaaccagacgcacaccccaactgaccagatgcttcaacctgcaggacaccccagattatctgtcaccccagccgctctcagccacccaacatccccgccccaggttgtcaagtcccaggaagtgaaaggcgtactgggcagacgtttcttctgagcttccatgcttttctcttccaacacttatttctcttttaactttttcttctttgtttaaaaaaattttccaagcctctacttgcgggaccggctaaaaggcctctgttttaattgctcggataatgtggttgctgccattttgttaagagcaatcactcctgcagggaaatcacaagcgttctagacaggccggagccgacaaaaatgtargatttgacgttaaaagctaaatgggaagctgcggcggcggaaggtaaattgatggtagatctggctgtcagggctctgccccagaccgctgtgcaggcccagcgtctgataaccctggagcaccggaggggcaaaggcttggccagttgtagacggtgtgtgtgtgtgtgtgtgtgtgtgtgtgtgcgcgcgcgcaaaccccttctcagcttgggaagcaatttgaaaaactgcagagtgggggccccgctcccaattgcctgggcactgacagcaacttaaagggcttttccaggccgagacagcaagctccagctttcgggatgggttagccagcaggcccaggcatctaggaagg

SEQ ID NO: 684374 - DNA, 1594 bp, Homo sapiens
cgcctagctggtgtccactatgacccctctgcctgcagcaggccgaatcagacccggcgtgggcgaattcagaagtgcccagggagagacaagctagaggctctgcggacttctgcgggcggctgacaacgcgagggcgaggggttagaacaactcggccaaagcgatctgaactttctccccttgggtcagccggcgctgggccgacctggtgggcgcggggctgtgtttacagacacttgcctttgtttatagcatggggaggaggtgtgggggaggcgcgccctgattttctgttgctctcccaatcctcctgcgtttgatccagtggttccctccctctcctgattccagttgtcttccgcgtctttattttaatctgctcaggagaaagccatcaggtcctagacgtggaagaaaggagcctaccaaagtgttggagtaaacagtggcggaggaggtgaggttttaaaaacaggaaacggagaggagttatcttcaccatgcacctacgcttctctgcaccttgtgtagctggtctccgccatctgggccttaaggcacttctgcagatttaacactttctctggcttattaaacaacaacagagggaaaccaaaagaccctggcgcaccattgctacggagaaacttgctaatacacttgctttttaaacctgcgctcctctttggccccggccaagcacagcctgcctcctcttcctcagggccagcaacactaggcctggtcaccccacccgccctgccatttcaactcgccagaaaccctaaccagccagacacccagcagaccggacaccccagacggcagaatgcccagctgcctgacactgcaggcggctgaaccccctaaccagacgcacaccccaactgaccagatgcttcaacctgcaggacaccccagattatctgtcaccccagccgctctcagccacccaacatccccgccccaggttgtcaagtcccaggaagtgaaaggcgtactgggcagacgtttcttctgagcttccatgcttttctcttccaacacttatttctcttttaactttttcttctttgtttaaaaaaattttccaagcctctacttgcgggaccggctaaaaggcctctgttttaattgctcggataatgtggttgctgccattttgttaagagcaatcactcctgcagggaaatcacaagcgttctagacaggccggagccgacaaaaatgtaggatttgacgttaaaagctaaatgggaagctgcggcggcggaaggtaaattgatggtagatctggctgtcagggctctgccccagaccgctgtgcaggcccagcgtctgataaccctggagcaccggaggggcaaaggcttggccagttgtagacggtgtgtgtgtgtgtgtgtgtgtgtgtgtgtgcgcgcgcgcaaaccccttctcagcttgggaagcaatttgaaaaamtgcagagtgggggccccgctcccaattgcctgggcactgacagcaacttaaagggcttttccaggccgagacagcaagctccagctttcgggatgggttagccagcaggcccaggcatctaggaagg

SEQ ID NO: 684375 - DNA, 1594 bp, Homo sapiens
cgcctagctggtgtccactatgacccctctgcctgcagcaggccgaatcagacccggcgtgggcgaattcagaagtgcccagggagagacaagctagaggctctgcggacttctgcgggcggctgacaacgcgagggcgaggggttagaacaactcggccaaagcgatctgaactttctccccttgggtcagccggcgctgggccgacctggtgggcgcggggctgtgtttacagacacttgcctttgtttatagcatggggaggaggtgtgggggaggcgcgccctgattttctgttgctctcccaatcctcctgcgtttgatccagtggttccctccctctcctgattccagttgtcttccgcgtctttattttaatctgctcaggagaaagccatcaggtcctagacgtggaagaaaggagcctaccaaagtgttggagtaaacagtggcggaggaggtgaggttttaaaaacaggaaacggagaggagttatcttcaccatgcacctacgcttctctgcaccttgtgtagctggtctccgccatctgggccttaaggcacttctgcagatttaacactttctctggcttattaaacaacaacagagggaaaccaaaagaccctggcgcaccattgctacggagaaacttgctaatacacttgctttttaaacctgcgctcctctttggccccggccaagcacagcctgcctcctcttcctcagggccagcaacactaggcctggtcaccccacccgccctgccatttcaactcgccagaaaccctaaccagccagacacccagcagaccggacaccccagacggcagaatgcccagctgcctgacactgcaggcggctgaaccccctaaccagacgcacaccccaactgaccagatgcttcaacctgcaggacaccccagattatctgtcaccccagccgctctcagccacccaacatccccgccccaggttgtcaagtcccaggaagtgaaaggcgtactgggcagacgtttcttctgagcttccatgcttttctcttccaacacttatttctcttttaactttttcttctttgtttaaaaaaattttccaagcctctacttgcgggaccggctaaaaggcctctgttttaattgctcggataatgtggttgctgccattttgttaagagcaatcactcctgcagggaaatcacaagcgttctagacaggccggagccgacaaaaatgtaggatttgacgttaaaagctaaatgggaagctgcggcggcggaaggtaaattgatggtagatctggctgtcagggctctgccccagaccgctgtgcaggcccagcgtctgataaccctggagcaccggaggggcaaaggcttggccagttgtagacggtgtgtgtgtgtgtgtgtgtgtgtgtgtgtgcgcgcgcgcaaaccccttctcagcttgggaagcaatttgaaaaacwgcagagtgggggccccgctcccaattgcctgggcactgacagcaacttaaagggcttttccaggccgagacagcaagctccagctttcgggatgggttagccagcaggcccaggcatctaggaagg

SEQ ID NO: 684376 - DNA, 1594 bp, Homo sapiens
cgcctagctggtgtccactatgacccctctgcctgcagcaggccgaatcagacccggcgtgggcgaattcagaagtgcccagggagagacaagctagaggctctgcggacttctgcgggcggctgacaacgcgagggcgaggggttagaacaactcggccaaagcgatctgaactttctccccttgggtcagccggcgctgggccgacctggtgggcgcggggctgtgtttacagacacttgcctttgtttatagcatggggaggaggtgtgggggaggcgcgccctgattttctgttgctctcccaatcctcctgcgtttgatccagtggttccctccctctcctgattccagttgtcttccgcgtctttattttaatctgctcaggagaaagccatcaggtcctagacgtggaagaaaggagcctaccaaagtgttggagtaaacagtggcggaggaggtgaggttttaaaaacaggaaacggagaggagttatcttcaccatgcacctacgcttctctgcaccttgtgtagctggtctccgccatctgggccttaaggcacttctgcagatttaacactttctctggcttattaaacaacaacagagggaaaccaaaagaccctggcgcaccattgctacggagaaacttgctaatacacttgctttttaaacctgcgctcctctttggccccggccaagcacagcctgcctcctcttcctcagggccagcaacactaggcctggtcaccccacccgccctgccatttcaactcgccagaaaccctaaccagccagacacccagcagaccggacaccccagacggcagaatgcccagctgcctgacactgcaggcggctgaaccccctaaccagacgcacaccccaactgaccagatgcttcaacctgcaggacaccccagattatctgtcaccccagccgctctcagccacccaacatccccgccccaggttgtcaagtcccaggaagtgaaaggcgtactgggcagacgtttcttctgagcttccatgcttttctcttccaacacttatttctcttttaactttttcttctttgtttaaaaaaattttccaagcctctacttgcgggaccggctaaaaggcctctgttttaattgctcggataatgtggttgctgccattttgttaagagcaatcactcctgcagggaaatcacaagcgttctagacaggccggagccgacaaaaatgtaggatttgacgttaaaagctaaatgggaagctgcggcggcggaaggtaaattgatggtagatctggctgtcagggctctgccccagaccgctgtgcaggcccagcgtctgataaccctggagcaccggaggggcaaaggcttggccagttgtagacggtgtgtgtgtgtgtgtgtgtgtgtgtgtgtgcgcgcgcgcaaaccccttctcagcttgggaagcaatttgaaaaactgcagagtgggggccccgctcccaattgcctgggcactgacagcaacttaaagggcttttccaggccragacagcaagctccagctttcgggatgggttagccagcaggcccaggcatctaggaagg

SEQ ID NO: 684377 - DNA, 483 bp, Homo sapiens
ttccaaaaagaagcagaggagattcctcaaaataaaattctgatgctactattgtaaatggtccaacgcaggaaggaaaagaagaagaagaagaaaagaaaaaggaaggaggtagccaaaaagatttagtgtctttgggtaggaagctgtctgctgagatcagatatatttttaaatggtgtgtgttaaatgcaaaagctgatctagaaaaacaagcatggaaaaaaaaatctgtcaagaatatgtgagaagagtcagaaagtttaaaaggaggttaacattctagatgatgaaaagggctgtttgaatccaaagcaagaaagcctacgatacatggccagctgtgatggcattatgtcagtggtgaaggatgcaaaatggaacactctcagactctttggtaagaaagaatttaaggttaaaatcacctaggagcagattytaactgtcataaataagtttaaacactggcctggaaataac

SEQ ID NO: 684378 - DNA, 658 bp, Homo sapiens
cctgtttaaagacattagaactcataactatatttagaagttaggccaaggaactgaggtaaacagaaatgtagagaagtgatattaagagatcacagtagcattttaatggaactctgccattcatttaaaatcttctctacaccatctaaaacactgaagtttggcaagtcctagtcaaatgagctcagagaggctacattttttttttgatatagggaataataaaagaagagctatcattagaatcagaacaacatttttccttagtgatataggggagaaggaaaaaataatagagtatttcctgctctaaaggcacagttgttactttaaaccaacttatttttgtcatcaccttctttaggcatcacctcttacattttctcaaatggtattttgttaaggacttagttccccatctgatgtgcttacaaaataacttcccttacaagccattagagccaaggccaaaagcaaacacacctattcacagagtaagatacaaccttgtagtgatatgagatgattcattcttctcaattgyaaaaaaaaaattaattctgtaacttctaacacatttgttaatctatcatcagaaaatattttgagatctttgattaataaactcattactatagtttacacatttgcagta

SEQ ID NO: 684379 - DNA, 986 bp, Homo sapiens
gcatatttaataattaacatatttttcataacaataagtcagtgtttcccaaactgtggtccaagggccacctacattaacagcacttggcacgtgattgttaagatcgatttctgagcaactcttgaagaatagtcttaatattttcattttaatcaagttttccgggaaatttgtaggcatactaaagttcaaggattgtcgtagtaagtatgttaagtgaaggttggaatattttcgttgctcacagagaacaatgtataggtatctatgtgcatgcaaatgtgttccagggccacacgttcagccaacrcatctctaaaaattagaagatgcatgatatttaatagtctgtctcttaaaattatgtctatggtatattttgtgtggcatttggtctacatgatgaataaatatcctctatgtctacatctgattcattttgccatatcataataaacaaggcattctgatgtattgctttgactaataactagaaggtttctgacttttatgtgagactgtcttattggacgataatgacctgattgaatgtgttttaactaccattgttgctcaactgcaattcaaaccgatctgagattggtagactactacaaaagaaatatgctttgtgatacctgtgaatcatatctagatccaaagtagaattttgaatttaatacagcagaaaaaaatcctatgtcagcaggatagaatgttcaaactcctttctcttttgctctcacatataagcataaaaggataagacctgtaaagaaatagtgccagatccaagagctcactcaatgtaccctgagagttttaaagacttcctgtgctgtaataatccctttgtatggccttactccactgtggagatgcccacatctaataagaaggcttcatcactgctgccactgtgctttctgaggttccactctaagtcgttctacctaatgctgctgcataggattatgatgctc

SEQ ID NO: 684380 - DNA, 2866 bp, Homo sapiens
  misc_feature 724: n = A,T,C or G
aaaccaaacactgaatgttgttacttagaagtgagggctgaacaatgagaacacacggacatagggaggggaacaacacacactggggcctgtcagagggtggggttgggggagggagagcatcaggaaaaatagctaatgcattctgggcttaatacctaggtgatgggttgataggtgcagcaaaccaccatggcacatgttgacctatgtaacagacctgcacgtcctacacatgtaccccagaacttaaaataaatataaaaaatttaaaacagatataaagaggagatgatggtgaaaggggatgaaaaggttaaagaatatggagaatagacccataagtaggtaaaataaatgactaatagactaatagttccagaaggcgagaacagaattgagagatgaggagaggggtaaactatggactttagttaataaatatcaatattggctcatcaattgtaacaaaagcctcacactaatgtaagatgtaggatataaaagataagataatagcggaaactgtgtgggcagatgaagggggtatatgggaacctatctgatctttttatcacaatttttctgtaaacctaaaactgctcccaaaaagttattaaaataaataagtaaacaaattgtgcaatggaaaaaaaaacaaaaacaaaaagattttctttttttgcacttttgccgcacagtattttttcacttttgtgtaacnctaatacagagagtaatatcccatcatattgacagcttcctcccacattcaagggaagaatcaacaggagcattatgctgggggtcagggcaagaattttgagatcttacaattctgtttaccacaggagtgaagggtacagaattatagtgatatttgattatctatatcctgtcactttattataaaattacttgattcaagttttaataaatttttaccaatgctaatgttttcaatttggcttgcttaaataattcaccatccaaaacttttctactttcaacatttaaaactgaagactgctttttatagctgatgtcagtaaaaaatctattaatataattattaatcatacttttccaaaacttttccaactatactgttttccttgaaatagaacacccattatcttacatattacatttgaagtcttcacctgttacaaaccctataagacttttacattttttctaattctttacataatattgatcagaaatcggatttttaaactcattaggctcaattcaacagacaaaattcatctttataaacatatattgcatactttattagctagtcagtttgccaggatataaaactgaaaaagattattctgttctcaaatagtttgtgaaaaatttcctgatgatacattaggataatttttaatattttgtctggatgtcttctaaggtctggtgcaatatgtgtgatgtcttctttaataacacttatccagttttgattctctggacaccaactgggtgttcaacaattcaattcaattgtgcctttaatttattggagttagtgcagaccccacaggttaatggctcagtcttacaagattgccccccacttcagatgccagttgcaagcctcaagcttcctgtatttctgatcaacgggctacaaattgcaggctcccacgacatcttacacaggtttaataaattgctgtaatgtctcatagaactcaaaagaatgctacttactattaccagtttattatgatggatgcaactcaaaaacagccaaagggaggagatatgtagggcaagtatgggacaaggggcaggagcttccatactctctctaggcatgccactctcccagtaactccatgtgttcgccaacatggaagctctgcaaaccccagcatttagggattttaatggaaagttattacttacacatgattcattggccattggcagaaagtttgaggtggggctgagagttccaaacttctaatcaaggcttggtatttctggcaaccagctccctcatcctgaagctatctaggggcccacaaagagtcaccttattactacaaaagatacttccatcatctttaacactcaggaaattccaaaagctttaggagctccgtgccaggaacaggggacaaagaccaaatatctatgttaccactcagggtaatgtaactaccaattcagaaattatcactgtacaacataatttaaattactttggaaagaaacacatggctactttaaagttaattgaagcctatttgctaacttaaagaacatatcacattttcttgacatttgccccaactgagttggcttgtccatgttaagtttttttctctttctgcagacttaagtgttttggctgcatttgtctcagcccatttataaaacattagatgaaatgttttatctaatgctcctagcactaatccttagggaactctgattaaaagttttctatttagaaaaaaatacatactcatgwttaaatttgcctgtttaaaaaaaaagtagaaatgtctctcaagtacctagtgaaacatttttaaagttttttaatggaatcttgtttcataaattaagaaaataagtgtaagtaatttctactagttttctttctctttgatttttttttctcttagccagagattatttaggaatgtatcttccccttgaaatactgctggattgctccccagtgcaccattttattgtagaagtgagattcactcactctataataatccttaagaaccgttctgtgcctatttatatttaccaatttctttaaaagaaccctcttcaaaaaagttattttcagtttactcattaattttttattggtttcctttgagtt

SEQ ID NO: 684381 - DNA, 614 bp, Homo sapiens
agagaatgaaagtaagagtgagaggtgctaatatgagagagagagagagagagaggaggttatttcaaatactatctcaatcagtgtgcgtacatcctaccgaaaaaataaggtgagaaacatgagttggctcaacattgttataacaatgctgttacgttgactcgtcctagttcaggcataccttccttaaagtgagtagctatttgtgttgagtaaaattctattgtttaaagatatgcatttttcatatatgacttctaaaagcaagtcattaacttcatctggtgtttaataaagcaacaacatgctcacatggttaaaaattatatattgaaccttttaggtattttttttttgttycctaatgtgtcactgttctaagaatttttcaattgtaattttgatttaatatgatgactttttaaaataactttccaaatgcgttctcctcagcataagatatagatccatgcctgtatgcattagaaattaccatgacaaatgccaccctaaccatctcaagtagaaagaaatttaatatagagacttaagagtattaatcactacaagtgctgtagaagtaaaaggcattgaaagaacactttcggttt

SEQ ID NO: 684382 - DNA, 1497 bp, Homo sapiens
atcaattttcaaaaggaaattggagatcctaaagtaaaacagaagtttttcagttgtaagtgatggatatcaactcaaaataatttaaacaaacaaacaaacaagcaaaaaaccaaaatggaactaggctactcctaaagcttaactgaagaaggttataaaattgaagagttgcagtacccagggcccaaagtcagacagtagaaaccagtatatgccagagctttcccagactccatctaccattcctctttgctaatttcatttaacttcattcttcagataggtctcttctatgagataaaatatgcttcttaacagttacaaattctcatcctctgtgcttagcaattccagaggtaagagtcatttcttcctattttttttgtcatctccctatcaatccagaaaaggtactggattgacctacttagatcattagaacactttttgatcaggcactgcttccatgaaaataagatagagtgtattggttatccaagacaagtatgctagaagattaaaaaataaatgaatgaatatataaataaagaatatatttactrtgagtcagaagattatgtttaagggcacacaccatattataaaactgaaaaaaggcacagatgcccaagatagtagtgcagtttgaataaattatttattgttgtacacattgaaacatagaatcatttcatattgtgtttctctagaattttgatttttcctgtttgtttttttgtgttcttctgtgcaccttcttcacgtttaggggtcagatggagagactcaaaacacaatgaagtttgtagtcaaacatcaatacattcagggcaggaaagatgaaaggatgaatttttaaagtaatacctagattggtggtaactgtacttttaaagggataggagctctacaagggacttcaaatcaaagcagttgaatataaatacaagcccattttcagtggagaattgtcaagatatatttcattctgtattattctaggctcttataactaaaactatagtgaaagaatggcaattgtccagtgagttgaggtagtaaataactcagcctgaatcccagtatgccctccattttctaagtaatagaagtgaaaagtaaacgtgtaagaaatagttctcatttgtccttgtttgaggtattttcttcttaccattatcagttacctaagtaagaagaaatttcaaaagctatcaacattatttaactatctatacaatgattaagagaactccctcagtttcagcataaacatatagatatctcttcctactaaatgttttttaatgcttatggctttcatttgctcatttatacctgggatttctgccagtattctaatgaaataacacatatttatgactaagactgaaattcacagcttcaaaacactttaactatttacttgggaaacctgacatctaaaactcaatacctgagatatgtgcctctatgaaacttgacaagatttac

SEQ ID NO: 684383 - DNA, 667 bp, Homo sapiens
tgaaaacattttacataatacccttgagaaaaatgtctgcatttgatggtgtctaaggggaattcaaaagttgaytgatgtataggtatcaacttggaggccaggttgctagtgtcattctatgtggctctgttttattcaataattttgttaattatttagataagatatgaaagggtttgccaatcagatttgtgggaagcttgacattggggaagtttggaatcatgttagaaaattcatggcagatttaaacaaaaatagctaggaacacaaatcagaccaaatttaaaaagataaaaatatacaagtaagacctttgcttagggtttaaacaagcaaacaaacaaaaacccacattaactacacaaatgagggggtggcaatgcctgcttgaagaaaatgttcctgtggggctatgagttaacttcactcaagctgaatgagtgacttttttgccagaaaagatactgttgcaataggttatgttcaaggggatagaaatggacccactgtactttgcactttgtacctgtaagattgtgttcaattctgatctttatcatttgggtaggttattaataaactgtaggacaggtagagtatgtggctatattttatatttagcaaaaatgtttttgaatttctcttatatcctagctattgt

SEQ ID NO: 684384 - DNA, 672 bp, Homo sapiens
aaggcatacagagagctgcatatctttgtatcactgcattcagaatgactaacaaatctcctcatcaaccataacgccagctatgaactgaccccagtgcttgaacatttttggtaatttagaaggacatatgtgccattcattaaaatgcttttcagtgaagaacttattttcaagggctcacctccataatccatgtgtacctagtcacattagaaacacatttttttaaatcacttctgccaagtcagcacccagtaaaataaggagctgatactttcataagattcacactctccgtttctctcccaccttccctagcaatttctgaccatgtcattgttccctagcytttccaaccaagtaaagaagacattttaaaagatgaagctcagacaagaatttgatgttatctaaaagcagcaggtttggggaaagcttccattaggaagaggatgaaacctgatttaccaggaatttaagaaatatgcttcaactggccattcttttgaagtctcccaatgataatttttctgaattggccacccaactgaggcagtagatgtggattattagctactcgaaagtagggactttggaatctctgcctatggagccaagcacaacacttcaaattttgtttccctctaaggtgacactgtcacagagaca

SEQ ID NO: 684385 - DNA, 599 bp, Homo sapiens
cgcttcctccaaaccatcaaataggagtgcttaggaatttctagttctttagggttgccgaaggacctgaaaaggatctgaataggatgagattatgataatcctgatgatgaaaataataacaacctttattgagggtcaaaatgacagataccatgctaagtatatacagaccacaaccccattaggtaagtgtattagtccatttacacactgctaataaagacatacccgagactgggtaattcatacaggagaaaggcttaatggacttacagctccaagtggctggggaggcctcacaatcatggcagaaggcaaggaggagcaagtcatgtcttacatggatggcagcaggcaaagaacttcygcaggggaactctcctttttaaacccatcagatctcatgagacttattcactatcatgagaacagcacaggaaagatctgcccccctgattcaattatttcctactgggtccctcccacaacacatgggaagatgagattggggtggggacacagccaaaccatatcattccacccctggctcctcccaaacctcatgtcctcacatttcaaaaccaaccatgccttcc

SEQ ID NO: 684386 - DNA, 418 bp, Homo sapiens
gaagccttctaaccatcacgtttctgatcacagcaaatagcctcctgccttctggtaagtggggcttgcttgtaacaagcttaaattctatgaataataaatcaggaggctctagcatgtccctggaaattccactaagttttctacacatacaaaattgacatatgtctttgagctaggtctcatgactaaaaaaatcgtgtattgaaaatatatctgtttcaggaactaatcttcggggatacctccccaactctgagcaagatctyacttaaattcatttcaccgcaatcagatgggaatttctagactccaaaccagtgaacagtcacaggtttcctctctccactatttcctttccaacgcggcatctggatatggcaccctccactctcagtcctccagataaaggcaggga

SEQ ID NO: 684387 - DNA, 656 bp, Homo sapiens
gtcaggaagtagctggactccaaacccagcttcttggaagctcctaattgggctctacctgtcaagaggtaatagagagagacttattgatatgtttgaagtgcaactttgtgctttttgataactaataaataggatattggaactttcttattttgcagcccagtctacagaagacatgtgaaagatatttatagctttcataactgtgatcctactccttcctaattgccaagtagtcctccccacccccatccccctttttttttttctgtgaatcatctaggacttagagtcattgcaactggctagagagggactttaatcatcctgaagattcccagatagcttgggagacaataatatcatgtaaaagatagctgctttcttccctttggtttggggacttggttaaagaaatgttagtagatggacaatatttagattttatattctgtgccagtagtgctaagaaaagattactrgcttcaagagtgagcagttctaggagagcgagaaaccacagctaggagctccaccagcccttgaagatgcagagacatttatccagtccagagggatggggagataacacactgagtatggaatagtggttaagagccctggtttcacagttaggctaattcagttcaaat

SEQ ID NO: 684388 - DNA, 1175 bp, Homo sapiens
tattctttatgtggctgcttgggcttcctcatagcatggaggcttaatttccaagagcaagcatcccaaaagagccaggcacagctgtatctccctttagagtcccatagtgtcacttctgctataggcacaagactctatctcttgatggatgaagtttcaaagttatattgtgagaagagcatgtgggatgaaagatattctggcctctttggaaaatacagcatgccacatgggattatagatagccttgaaaaacggtccttagtctcaagtactgtgcagaagaagtagtgaaccatcagacctgcctgaatgagccatacagagaaacagtgaatgcttcaagtgtaatctgagtggacagatggccagcagcattcctcacaccgtctatctccccaccatgtgttggcacaacttagaacccaggaaccctgacctaatcccagggagtatggagggcaggaaagcctcaagaaggactaagatcacatttctgcmaaccaggcaaaaggaggctcaagattagaaattaggtagagttttggaatgcacgtttgaaaatatcttgcacacttggagcttatggtgtgaactttgcacttgttctgcattcattcatctctacaaagatggaaccaaggagataaggaacaaatgtgtaaacatggaggcaggatgaagttctaagtcaggcttcaggcctccccaagtctcaggttactccccgggcatggtgagattgtatgatgtagggtacatgacgcatgggatgcccgcatgggatgccctcatgggatgcacgctacagctccgtgcccgaaacatgctgaaactcaatgcacacgagccattgttactgttctttaggccaagcactaaggcgtcagtcccaagctggagagtggcctcacctgagatagagagactcctattccttcccccagggcctctgaaggtcgtgcagaatcactcatctcttccctgtcatgtgaaagcaacctgattatgtccaggtcattggttctcaatgagaggtgattttccccctcaccccagaggacttttagcaacatctggtgacatttttcatgtcacaactgggaaggaaggagggtgctactttggcatttagagaatagaggccaggaatgcttctaaacatcccacaa

SEQ ID NO: 684389 - DNA, 621 bp, Homo sapiens
caatctaattttggaccattttcctcaccgaaaaagaaaccccataccctatgcagtcgctccccatttcgtctctctccctccctaccccctcctcctttttcttcccccaccctaggcagccaaccactcatctactttctgtatctgtagatttgcctatttgggacatttcatataaatagaatcttataatatatggtcttttatgattggcttctttcacttagcatgatgtttttaagtttcatccatgtatcagtactatatgatgtttctgtgaaccatattcctctgctacttatgatattctaactatagccactgttaagagcccttgtgaaaagaartaagtgggcaggtggtagctgggagtgatgactgggcacagataatgtagagaatccctctgggcctgctagagaatgacatctcttcttgcatgccaggaaccttctggacctttactgtttttagcagtcacatccaaagttgaaaaagggctgggcccggtagctcacgtctgtaatcccagcactttgggaggccgaagtgggcagatcacctgaggtcagtagtttgagaccagcctggccaatatggtgagaccctgtctctaca

SEQ ID NO: 684390 - DNA, 621 bp, Homo sapiens
caatctaattttggaccattttcctcaccgaaaaagaaaccccataccctatgcagtcgctccccatttcgtctctctccctccctaccccctcctcctttttcttcccccaccctaggcagccaaccactcatctactttctgtatctgtagatttgcctatttgggacatttcatataaatagaatcttataatatatggtcttttatgattggcttctttcacttagcatgatgtttttaagtttcatccatgtatcagtactatatgatgtttctgtgaaccatattcctctgctacttatgatattctaactatagccactgttaagagcccttgtgaaaagaaataagtgggcaggtgktagctgggagtgatgactgggcacagataatgtagagaatccctctgggcctgctagagaatgacatctcttcttgcatgccaggaaccttctggacctttactgtttttagcagtcacatccaaagttgaaaaagggctgggcccggtagctcacgtctgtaatcccagcactttgggaggccgaagtgggcagatcacctgaggtcagtagtttgagaccagcctggccaatatggtgagaccctgtctctaca

SEQ ID NO: 684391 - DNA, 646 bp, Homo sapiens
ctgctttgggctgcgccgggccctctgctacgaactggggctgaagagaggagtcactgtcatgactttacggtcctagacactaaaaccataatagattcttgggaacccccgccatgctcacaaataactctttctaccaggcctgagggagtcaagagagaagcaaaaacaaaggatcagagcggggccaactgcagggcccgcagaagacctatgggaggcaggcctggaaggatgagcacaccttcccggctagctcagcccttacacctgcattgagaaaggcaccccatccacctgactcaaggaagtggagactcacttcacctactggctcaaaagagacagggtaacaacagtggcagcaataccagcaggcctgggttgtgtagccaccatttactgagcacttacaaygacactgtgctaggcagttcttatttataaccttaacactcactcccacccatccagtagagaggcttactacacacacacacacacacacacacacacacacacgcaatttactgatggagaaaataaagctcagagaagttaagtcactagctcaacatcacacacccaataagtagcaggactgggattccaaaacctgggctgactacaatatccacaatgt

SEQ ID NO: 684392 - DNA, 634 bp, Homo sapiens
tgctccagtttcctctttggtctagtgggaatcataccttcctcattaggtggctgtgaggattctggagaatgttatggaaaatggctggcrcattttccatagtggtatggaaaatagtaggcactacatggcatatgaaacatcaagcagtgtctttggccaaatatgtagtgtattcatatagtggaatattatgcagtagtaaacaaaggtactagagctataggtgtcaacgtggattactctcacaaacaataaaattgaacaagaagtaagttacacactgattgtgttcagaatgataccacttatagaaaggttaggaagatcatgtgaaacagtactacagatcataaggatgtatgctctttcgcgaggggaagagctttatggggctgatgagctctggtttccaggtagtggttgcctgtgatgggaagagggaggatgtgattgggaatgggtgcctcagggcttctcctgttttgcagtgttttatttcttggactgggtcataggtatatcagtgtttgtcctattatgctatccatctttttgtaggttcagaatatttctttttttaaagaaaggaaatacattttcctttgggttactgacaatggaggaatat

SEQ ID NO: 684393 - DNA, 634 bp, Homo sapiens
tgctccagtttcctctttggtctagtgggaatcataccttcctcattaggtggctgtgaggattctggagaatgttatggaaaatggctggcgcattttccatagtggtatggaaaatagtaggcactacatggcatatgaaacatcaagcagtgtctttggccaaatatgtagtgtattcatatagtggaatattatgcagtagtaaacaaaggtactagagctataggtgtcaacgtggattactctcacaaacaataaaattgaacaagaagtaagttacacactgattgtgttcagaatgataccacttatagaaaggttaggaagatsatgtgaaacagtactacagatcataaggatgtatgctctttcgcgaggggaagagctttatggggctgatgagctctggtttccaggtagtggttgcctgtgatgggaagagggaggatgtgattgggaatgggtgcctcagggcttctcctgttttgcagtgttttatttcttggactgggtcataggtatatcagtgtttgtcctattatgctatccatctttttgtaggttcagaatatttctttttttaaagaaaggaaatacattttcctttgggttactgacaatggaggaatat

SEQ ID NO: 684394 - DNA, 1323 bp, Homo sapiens
tttttttgaaatggggggttctcattatgttgcccaggctggtctcggactcttgggctcaagcgatcctcccacctcggcctccaaagtgctgggattacaggtgtgagcccctgcgctggccagcgctttgcctttaatcatgacatttgttgtttgtttttaattttttacttcttatttagaaataattccaaatatatatttttaaatcacacaaataaaaatagtacaaataatacccacctacccttgctttatcatttgtacttttactctctcgtggccctttatgtctacttcctgaaaatcagcacctgcccctatatagccacmgtgcagttctcaacttcagtctttttggtatggacgccctgtttttatccaatccgcctgtgttctggttttctcatctgtcccagtgactccttcacagcctttcccccagcccagggtcgggccctgtgttctgctgttcctctctttagccaccttcatttgggaacagcccacagcctttctttgtctattatgaggtggccctctttaaagcccccaccccttccctttgatgatagacgacctctcatttggggtttgtcttgtgtttcccacatgtatacagaaattatgttctttggccgggaccctgcacagggggtgctggcctgactcagggcatctcctcgagggctctcgaggtcctgtcgcccctcacaggggacgtcacaccgtccaccatttgtcaaggtgcaggccaattgctctactgcagaatggctctttcttttcttccctgcaactgataaatatctcgggtgtggggcgctgagaccagcaagcaccctgctcctggtggacatttcccaggatgtagctgtggtgactctggcgggagctggcccctaccctgggagctgtgaatgacgaccgtgccagtgctccaccttgctgctgcccacggcctctgccttcccttctcccttggctgactttggaccaggccagcccactttgctgctgcccacggcctctgccttcccttctcccgtggctgactctgttcttggcgcagttcatgggttcctactctgcaggggtctgacctctcactgtccttaatgattttggtctcaaatggacccagatgtgaccaatggaacccttcaaccagctccgtgtcctaaaacgggtcccttgtttttggagaaccaactgcttttctggcctcacaagatattccagggtcatcttgtacccggcctaccccaaatccaggctcagcccattctctgagggccccacttcctttttttattttta

SEQ ID NO: 684395 - DNA, 1323 bp, Homo sapiens
tttttttgaaatggggggttctcattatgttgcccaggctggtctcggactcttgggctcaagcgatcctcccacctcggcctccaaagtgctgggattacaggtgtgagcccctgcgctggccagcgctttgcctttaatcatgacatttgttgtttgtttttaattttttacttcttatttagaaataattccaaatatatatttttaaatcacacaaataaaaatagtacaaataatacccacctacccttgctttatcatttgtacttttactctctcgtggccctttatgtctacttcctgaaaatcagcacctgcccctatatagccacagtgcagttctcaacttcagtctttttggtatggacgccctgtttttatccaatccgcctgtgttctggttttctcatctgtcccagtgactccttcacagcctttcccccagcccagggtcgggccctgtgttctgctgttcctctctttagccaccttcatttgggaacagcccacagcctttctttgtctattatgaggtggccctctttaaagcccccaccccttccctttgatgatagacgacctctcatttggggtttgtcttgtgtttcccacatgtatacagaaattatgttctttggccgggaccctgcacagggggtgctggcctgactcagggcatctcctcgagggctctcgaggtcctgtcgcccctcacaggggacgtcacaccgtccaccatttgtcaaggtgcaggccaattgctctactgcagaatggctctttcttttcttccctgcaactgataaatatctcgggtgtggggcgctgagaccagcaagcaccctgctcctggtggacatttcccaggatgtagctgtggtgactctggcgggagctggcccctaccctgggagctgtgaatgacgaccgtgccagtgctccaccttgctgctgcccacggcctctgccttcccttctcccttggctgactttggaccaggccagcccactttgctgctgcccacggcctctgccttcccttctcccgtggctgactctgttcttggcgcagttcatgggttcctactctgcaggggtctgacctctcactgtccttaatgattttggtctcaaatggacccagatgtgaccaatggaacccttcaaccagctccgtgtcctaaracgggtcccttgtttttggagaaccaactgcttttctggcctcacaagatattccagggtcatcttgtacccggcctaccccaaatccaggctcagcccattctctgagggccccacttcctttttttattttta

SEQ ID NO: 684396 - DNA, 573 bp, Homo sapiens
caggagaaagatgtaggctgggaggctacaccagtctctcttttcacatttttctgcctgcttacactctagccgcactgtcagctgatgagatggtgcccacccagattgggggtgggtctgccttttcccaggccactgactcaaatgttaatctcctttggcaacaccctcacagacacacccaggatcaatactttgtatccttcaatccaatcaagttgacactcagtattaaccatcaccgacactaaaccttcacaccaaaatgagttaccaacccgagatccccagacctgagaggagactgagccggacagacaggcaaacccagccctgattctaaaaacagagcatgcggaggcaccaactggtagtctcatgagattttagaggacrttgtatccgtaaagagaacaaagtgttaggaagaggggtacgtgaaatttaaaaatataatcatcatcccagagtgtgcagaggcgccaactggtagtctcatgagattttagaggacattgcatccataaagagaacaaagtgttaggaaaaggggtacgtgaaatttaaaaa

SEQ ID NO: 684397 - DNA, 1309 bp, Homo sapiens
gaatttattgtcccaactggcacacctttgagggagcaagggcacactattaatgattacactgagacaaacctgggactgtcccctgcacccagtgatgtgtgtccactagaatcttgatggacagtcagtgcagatcatgattcatgatttcccagaacaggtcttaatcccattaaagtttatcagaaaattgtgtaagcatttttatcaggaatactgtttttctttcacaatgaactgtgaattacaccatacaaaaaggttctgtcccatgctaggcttagcataatttttctttgacattgccttttgatccttatggagtcrgcttctggtgggtatctaggagtcccttctctctctggtttctcttcctctccttcttttccccatgtctctctgccctcttcctcaagtttcagatccttgctagtggtactccatcttaggatttcttaatagtattaggaataataacagcaaattcttatagagagattaacatataacaaatattgttctaaatgctatccatacacttacaagagtcttttgaagttgatactgtacgtatctcattttcgttaaggaaacttacgcacaaagaggttaaacagcttgtctaatatcacagagctaataagtggtagatttaaacatagcagcctggagctcctacttgtaaccactttgctatccagaggagcatctttcacacaaacgtttctctttctcatatggaacgcttctcacctgggcaaggtaaataagaaaggtgggagtgaagagggatggaaaaccattggtgcacatttaaaaagatacacctatctttgtctggttgggttgctaaaacaaaatgctatgaattgggtgacttgtgaacaacaataattcaatttttcccagttctaaaagctgggaagtctaagatcaaggtgcgagccgagtcagttcgtggtgagggcccacttcctggcttgtagatggcagccttctctctgtgtgcgcacatggcctcttctttgtgtagcaaaattataaggggaagctggactggtggctcatgcctggaatcccagcactttgggaggcctaagcaggcagatcacttgaggtcgggagtttgagaccagcctggccaacatggtgaaaccccgtatctactaataatacaaaaattagccaggcatggtggcacatgcctgtaatctcagcttcttgcaaggctgaggcaggagaatcgcttgaacctgggaggcggaggtttcagtgagccaagattgtgccactgcacaccagcctg

SEQ ID NO: 684398 - DNA, 1309 bp, Homo sapiens
gaatttattgtcccaactggcacacctttgagggagcaagggcacactattaatgattacactgagacaaacctgggactgtcccctgcacccagtgatgtgtgtccactagaatcttgatggacagtcagtgcagatcatgattcatgatttcccagaacaggtcttaatcccattaaagtttatcagaaaattgtgtaagcatttttatcaggaatactgtttttctttcacaatgaactgtgaattacaccatacaaaaaggttctgtcccatgctaggcttagcataatttttctttgacattgccttttgatccttatggagtcagcttctggtgggtatctaggagtcccttctctctctggtttctcttcctctccttcttttccccatgtctctctgccctcttcctcaagtttcagatccttgctagtggtactccatcttaggatttcttaatagtattaggaataataacagcaaattcttatagagagattaacatataacaaatattgttctaaatgctatccatacasttacaagagtcttttgaagttgatactgtacgtatctcattttcgttaaggaaacttacgcacaaagaggttaaacagcttgtctaatatcacagagctaataagtggtagatttaaacatagcagcctggagctcctacttgtaaccactttgctatccagaggagcatctttcacacaaacgtttctctttctcatatggaacgcttctcacctgggcaaggtaaataagaaaggtgggagtgaagagggatggaaaaccattggtgcacatttaaaaagatacacctatctttgtctggttgggttgctaaaacaaaatgctatgaattgggtgacttgtgaacaacaataattcaatttttcccagttctaaaagctgggaagtctaagatcaaggtgcgagccgagtcagttcgtggtgagggcccacttcctggcttgtagatggcagccttctctctgtgtgcgcacatggcctcttctttgtgtagcaaaattataaggggaagctggactggtggctcatgcctggaatcccagcactttgggaggcctaagcaggcagatcacttgaggtcgggagtttgagaccagcctggccaacatggtgaaaccccgtatctactaataatacaaaaattagccaggcatggtggcacatgcctgtaatctcagcttcttgcaaggctgaggcaggagaatcgcttgaacctgggaggcggaggtttcagtgagccaagattgtgccactgcacaccagcctg

SEQ ID NO: 684399 - DNA, 601 bp, Homo sapiens
catggttccaccctagggaactcgaagaggatacaaactagaccagtgtcccagcagagggatggaatggtggggaaaattactccctttttatctttcagccttagaagtaggaagaggttctactctctacaaattagagactaagttagttgcccaggcacttaagagaagtatattgttcacaaagataaacaatgcaaaattccatcaaaatgctgggagaccaatgaaatggttgtaaaacggattccctaggtatctgacagctttggagtagggaagatgagagtaggtctattggagagagttggttttctaggcaccaggagggtcaagggccaagttatttggatccttgaaaatgaattttagatctactctcacacccgcatcttcatgcctcacatcctggaagagrgatatggagaagtcaaacagttggttactcaaaattgtccattttcaggagagggaggaaagatgtggaactgagtcaggctagaaacagaactggctgtagaggcctggaaagggctgggaaaggctggcacttccaccaaaatcccctgatggagggtgacgagtaggacagacaaaa

SEQ ID NO: 684400 - DNA, 621 bp, Homo sapiens
aagtactaattaaactgtgacagttacttaaaataataaagttcagtagtttctttttaagacttagatgatatactctaagtacgaattttattagtagaatattttattgaatgaagagacaatctacctgcaattactattttacataaaatatatattagcctacaaacatatttgtgataaattgtctcaggtrgctattcaagccaaagtctgcaaaatcatttgttatccttttaataaggtcaaactataaaatgtcaataaatttcagaaacaaacctccttttatcttcattttaacacaaacagtataatttctagttttcagaattctattttaaatgtactaatatcatagggggaaaaacatctaaaaagagaaagtacttttagtgagtaggttttgcttaagggcatgtttctatattaaaaatcagaatagcaatggtaggtttataaattttgaggcaactagaattttaaattacagacatttgattgatccatgtttatgtaacatttgttaagggtaggaaatatacggtaaatgtcaattactgtaccttaaggggatgacttcctttattctacctcataaaataaagtttaaaggtt

SEQ ID NO: 684401 - DNA, 621 bp, Homo sapiens
aagtactaattaaactgtgacagttacttaaaataataaagttcagtagtttctttttaagacttagatgatatactctaagtacgaattttattagtagaatattttattgaatgaagagacaatctacctgcaattactattttacataaaatatatattagcctacaaacatatttgtgataaattgtctcaggtggctattcaagccaaagtctgcaaaatcatttgttatccttttaataaggtcaaactataaaatgtcaataaatttcagaaacaaacctccttttatcttcattttaacacaaacagtataattkctagttttcagaattctattttaaatgtactaatatcatagggggaaaaacatctaaaaagagaaagtacttttagtgagtaggttttgcttaagggcatgtttctatattaaaaatcagaatagcaatggtaggtttataaattttgaggcaactagaattttaaattacagacatttgattgatccatgtttatgtaacatttgttaagggtaggaaatatacggtaaatgtcaattactgtaccttaaggggatgacttcctttattctacctcataaaataaagtttaaaggtt

SEQ ID NO: 684402 - DNA, 1123 bp, Homo sapiens
tctctttttattgacttttatcttctctcctgtcaactatatgaatgacattatttattttatgcagaccacagaatgccaacgattacagtctgattttaacactgaaatatcattatgttatgctgttatgatttgaggttcaaaaatctccagaaatgtccacggtagtcccaacttgaaaatttgaagctatatcaaaaaataaaacaagaaatgaagcaaatccagatgggataagttcggggttaaactcatgattttcttttcaggaaaagagactacatgaaatcagtttcataaagaatttgttaaatgcatacttctgcttttattataaacagttaatcccaatctattctaagtacaattctcataggcattgactctttttttgtcccttagccctgttatacatctcaactataccaataatcacattataatgatttgttttaaacgcttctctccaactatctagtcactgggattgcccagggaaaaatayattattcttggaatttctctcaccagtgtctagcacagtatctaacacatatcaaatgagcaataaattgtcagccttaaaatttcctttggaacgaactccccaaaactgggtaatcgtccaacacagctgggaacccaaatctccaagttctcattcagtaggtccgagactaggaaacccttgtttttaaaatcttctcaaacacaaaataatacaactctattaaaggaaatttggcaatatctagtaaaattttatatggatttgcccttttacctaggatatccatacctagggatctatctattcctaaaatagatacaaaaatatgcaatgttaagtggataaaacaagatacagaagagtgaatgtatgacccttttgtgtaaaatacaaacacatttactaatattctgaagaagaaataatgcaagcataaactaatgactaataaaaaagtgttaccgattgaggagggagagaatgggatgcgggaacaaatatgcaagcaaactctttttcaatgtacagtactttttcatagttttgattttggaactacacaaatgttttagatgaaattaaactttaaaccaaaaggaaaaaaaaaac

SEQ ID NO: 684403 - DNA, 1123 bp, Homo sapiens
tctctttttattgacttttatcttctctcctgtcaactatatgaatgacattatttattttatgcagaccacagaatgccaacgattacagtctgattttaacactgaaatatcattatgttatgctgttatgatttgaggttcaaaaatctccagaaatgtccacggtagtcccaacttgaaaatttgaagctatatcaaaaaataaaacaagaaatgaagcaaatccagatgggataagttcggggttaaactcatgattttcttttcaggaaaagagactacatgaaatcagtttcataaagaatttgttaaatgcatacttctgcttttattataaacagttaatcccaatctattctaagtacaattctcataggcattgactctttttttgtcccttagccctgttatacatctcaactataccaataatcacattataatgatttgttttaaacgcttctctccaactatctagtcactgggattgcccagggaaaaatacattattcttggaatttctctcaccagtgtctagcacagtatctaacacatatcaaatgagcaataaattgtcagccttaaaatttcctttggaacgarctccccaaaactgggtaatcgtccaacacagctgggaacccaaatctccaagttctcattcagtaggtccgagactaggaaacccttgtttttaaaatcttctcaaacacaaaataatacaactctattaaaggaaatttggcaatatctagtaaaattttatatggatttgcccttttacctaggatatccatacctagggatctatctattcctaaaatagatacaaaaatatgcaatgttaagtggataaaacaagatacagaagagtgaatgtatgacccttttgtgtaaaatacaaacacatttactaatattctgaagaagaaataatgcaagcataaactaatgactaataaaaaagtgttaccgattgaggagggagagaatgggatgcgggaacaaatatgcaagcaaactctttttcaatgtacagtactttttcatagttttgattttggaactacacaaatgttttagatgaaattaaactttaaaccaaaaggaaaaaaaaaac

SEQ ID NO: 684404 - DNA, 647 bp, Homo sapiens
attggaagaaatattgaaattaagcactaaaaattaatatatttcaaaaattgtgaatataacctccatttaaaaaaggacattagttgaaactgagttttaaacatttcattaaatgcagaagattgggcctcatacttcttcagaatttttaaatgaaaaaaggaacttgttttctataaacttttgtcctcatagaactttcctcatggtagaagataagttctgtatttacttatgactagttggtcaaagaagcaactataatatcaaataaacaaaggcaagattattttgtgaaaatttcatctccagatcatttaaacagattaataaaakaatatttactatctacagttgtatcaccttagccatggatgggctgactttaactttttatgatagtacaacattcattttttacctttaagtccccttaagtggtccccttgtataatgaaatagctgaggaataaaatgcgtttggaatctttatttgtacatataagtgttgtatgagaaaagatgaaataactgaagtacttttaaatggtttggtgcctgaccattatttcccatattttatcagttttcaacagtagacttctaagggtaatgtgtgtttgaggagaaagtatagcaaacaa

SEQ ID NO: 684405 - DNA, 1466 bp, Homo sapiens
tgtagtccatggtggactgaatgtcattatgcagctcatgactgtaaattatgaattcatattgccacaaattttgtaatttttgctccattttctgaactatgcactatcaaaattattttattttttatatctgaatttggaatactttcatcattggtgaaaattaaatctcatgattggatgtgtttgttagacatgacatcaccttttcaatacaatatctcatatatacttgtcccttctatataactttgggaacctcagataatgtctgattttataaatataaagaacactctcatcagaaacaggagcgatcttgcactcattagtcttacgtactaaaaacaattctgtcctagctcaagcaaaaccaagataatttgctccatttgatgcttcttttttcacaggtggaaaaatcacaagtgcacagtcgacccttcacwctctctccacatcttcgtcatcagtcaccttgctcttggcattgatgattccttcaacttcctggtgaaaactgctgacttaatttgcttttgtttgctttagcttggtaacagcggtgaatagagtgtagtgtaagtggagaaccaggatcctgagatgagcttgagctttaaaaacttgggactatacatggtgaacttacaggaggttaggggggaaatattacttatccatcaggtttctctttggtttttgtaaacggagaggacagttcttagtccagtaaaaatatgcagattgtatgtaatgaatttttgtaaacaaaggtaatttctgtcaaatgtattctttacttttttaatatgttgggattttattttatatctgatgactccgagtgtgtgccatccatttgttaagtaactggcctttagcagatctgtttcaaaaacaaatacaaaagtgagaatgaaaagtttgcttaagactaagtccagtgtttttcattttccctttggctgaatatttcaattgacaaaccagcaggacatatgaaaaatgcttcagtgatgtggtccattataagataagtacacaaaaattttcttgaaaaatattgtatgattgcatagtgaaatagcaagatttgtcaatatgctattctatatgcacccctagagcaagtcattagggtagggaataagccatttacattagtgcaagatagaaagcgagtccagatgaatttcagtgctatagtttttcataaagtactatgttatctagcagcaaatataataaatatttatttttaataacaaaagatggtttaacatcaccaaaaaatatgatcactaaaaactgcagacatgctggcatgggtgctaacttaaaaatgagatgaatatgggacagagcgtttccatttctttacctactgccaaaacagatgttgaattaggtccaaggttttcttctaattgcaaaattttgcaaaaattttaagggcaatg

SEQ ID NO: 684406 - DNA, 616 bp, Homo sapiens
cttcctcttttactaatcctcctcagcacagaccctttaggggtgtcgggctgggggatggtcaggtctttcccttcccacgaggccatatttcagactatcacatggggagaaaccttggacaatacctggctttcctaggcagaggtccctgcagccttccacagtgttttgtgtccctgggtacttgagattagggagtggttgtgacttttaacaagcatgctgactccaagcatttgtttagcaaagcgcatcctgcataaccttaaatccattaaaccttgagtccacacagcacatgtttctgcacagggttgggggtagggttacagattaacagcatctcaaggcagaagaatttttcttagtacagaacaaaatggagtctcttatgtctacttctttctgcatagacacagtaacagtctgatctctcttgcttttccccacaccaggtyacctactatttatcaccggatggtttttaatacctatcaatgacttagagatgtttttccttctaatttcattttcaagtaagcttttactttcctttctctctctcactctctttctcctctctctctctcaatctctctctgtctctctctca

SEQ ID NO: 684407 - DNA, 616 bp, Homo sapiens
cttcctcttttactaatcctcctcagcacagaccctttaggggtgtcgggctgggggatggtcaggtctttcccttcccacgaggccatatttcagactatcacatggggagaaaccttggacaatacctggctttcctaggcagaggtccctgcagccttccacagtgttttgtgtccctgggtacttgagattagggagtggttgtgacttttaacaagcatgctgactccaagcatttgtttagcaaagcgcatcctgcataaccttaaatccattaaaccttgagtccacacagcacatgtttctgcacagggttgggggtagggttacagattaacagcatctcaaggcagaagaatttttcttagtacagaacaaaatggagtctcttatgtctacttctttctgcatagacacagtaacagtctgatctctcttgcttttccccacaccaggtcacctactatttatcaccggatggtttttaatacctatcaatgacttagagatgtttttccytctaatttcattttcaagtaagcttttactttcctttctctctctcactctctttctcctctctctctctcaatctctctctgtctctctctca

SEQ ID NO: 684408 - DNA, 679 bp, Homo sapiens
tattaatttaatgagctaggctccaaactgatcaatttttcgtccttacctaggcatttggaccaaataaaccacaaggatcacaactcttgtgtggtatcgctgcggcatctatctccctattaacataaactgtgtaaatctatgatatttgttaagttccctcatatgcaaaacgctctgctatgtgctgtgatgagatgtagaggaattagaaaatgcaggttttatactttcagggaattgtaatccatgcttatacaaaactgctttcacaatgccaataataatgctgaattctgcatgttttggtttttctctttttgaatgaaagygatgtatgcggttgtttaaaataaaacgaaacacacttagagtgaatgaaattacccatcgtctttctactgactagtcctcagaaaaaattatcttcaaccacttatgtttttaattctcctaatggttatttttatacctaaatattatgattatattgctgttttgatttaccagctataagcattattcatttataaactgtaatggaatattcgcatataaattatttatttaacttttattctctattatttaaccattgttatcaattctactttttctgattattatttttatgatttgaaatgaaatacttaagtttattgtcttagtctgctca

SEQ ID NO: 684409 - DNA, 679 bp, Homo sapiens
tattaatttaatgagctaggctccaaactgatcaatttttcgtccttacctaggcatttggaccaaataaaccacaaggatcacaactcttgtgtggtatcgctgcggcatctatctccctattaacataaactgtgtaaatctatgatatttgttaagttccctcatatgcaaaacgctctgctatgtgctgtgatgagatgtagaggaattagaaaatgcaggttttatactttcagggaattgtaatccatgcttatacaaaactgctttcacaatgccaataataatgctgaattctgcatgttttggtttttctctttttgaatgaaagtgatgtatgcggttgtttaaaataaaaygaaacacacttagagtgaatgaaattacccatcgtctttctactgactagtcctcagaaaaaattatcttcaaccacttatgtttttaattctcctaatggttatttttatacctaaatattatgattatattgctgttttgatttaccagctataagcattattcatttataaactgtaatggaatattcgcatataaattatttatttaacttttattctctattatttaaccattgttatcaattctactttttctgattattatttttatgatttgaaatgaaatacttaagtttattgtcttagtctgctca

SEQ ID NO: 684410 - DNA, 2064 bp, Homo sapiens
ggaagatccacatagacttgaagctactgtaaaccagactggttatggttaggacttatgttgtgacaaattaataaataaataagtttggttaacatatgtttattatatatataaatatgttatgaatatatttcttagtatatatactatattacaatatagtatagaatataaatgtatatattataatatagtatataacatataacatatagttgtataaattatatatatttattaattataaaattaaaatattctatttgaagttttttaatctactgggaatcgagaaaacaataacacaagatgtaattatgatgccaagatggctaaggcatgaatcatgacaaatgaggaatgaataaaatgaagtattttgaaataattttgaaatgagaaattaaaagataccatgacttcttggacatagatgataaggcagaggattatgttagacattgatctgaattttcaagtttaaataaaaaaaaaattctgtcattaactaatacagaaagtttggagtcagaattacttacacagggaagatggatttggtttaacatttatctgtatgaaaaaaatttaaatgatgaaaatattttccaacccatgatacaactgtacatccagacctcaactttatgttaataataatattaacaaacaaattaatactgtataacgttataaaataagtatatgaaatccattagattttattgctactggagagtatgcgttcaagaaattcaagcatatgttaataccttagaagcacctaataaatctaaaaatgtgttcccttttaggtgttttattgatcttaaaacaaaatccacttattttaaaacaaaatctgtttattttcttattagcagtaattatacatctttgatatcatgtctcctagatatacatatagatatagataaaatcaaaattggatatactaaaattatgtttaatatataacactaaaatgtattttctgtcaatatcctggttaccattttgttaggtttgaactgctcttttttgtattttcagagcccatttttttaaatttagttagcaatgtttagttaacaacattattgtttttcatatttctctctttaaaatgatatcaaaataaaatcatattttagtgcttgttgaaatgttaggtttcctagttgaatatctgacactgaaattctccaaccagaaagggggaaattgtgtttgtatataattaaatataagtagggagagaaaaaaaaaagaaaagaaattaaaataggttttgaaatttctaaagccctgtgtttttcctagattcttcttcctgactattcctgtgtgaaatcaaacatacatcctgtggagacaagaagtcctaagaagcctctctcgattatgtctttggctacggtacgtcatttatttgatcctgcaactcagactgactttaaataatataattaagcaattctgaaatgacctcattttaaagaagcccacagacatctaatcttcaaaaacgttaaattgaaaaataataaaaaaatgaaggcagtgggcaaataaaggtcattttccttttttagtgatattatccactcagcattgtatcagatcatctaagccaaagtcccaagacaactcctgaaaaataataaaatcttgaagtagggagagatgggtaagtgcacctcatcrtaatacaatgcagaataaaggcattaaacatgagctaacataatacaaacccagtacaagggtgtctgttgtagcatcattctattcaatgctagagtaagcgtactggattttacttgaacatgacaatacacaggactatgctcctttgagatctctgagggctttacatgataaatagcccattcaaagtcagcatacttatatcaagggcacccaaggataggcatagtttctgataaacggccaagcaaatttcattccatttgcaataaaaaagattataggaaacttttaagggatactggaaatcactgcattacaaaataacagtttttagaatgtcaaatttcc

SEQ ID NO: 684411 - DNA, 1894 bp, Homo sapiens
cttttgtgtttaaactggatatgtatgtgtgtgtgtgtgtgtgtgtagacaagtggatatgtgtatatttaaaagacatatattaatatgcagcatattatacattatttttgtgcttgtctatgcaacaagtattgcaaatatctccaacaggaaacataagaaaattaagtactgtttgctgaacattgggttggaaagatcattggggctaagacaaataaaaagagagaaaaggaaactcacctgtcaccttgaaaccgtttgtaatattttaatttttttacacatatgtatatattaactactgaaacaacaatttaaattttgaaaaaatgtttctctttaaaatacttacaattggcttgtcaagaaaagaatacatgaaaagtttagaggaaagatctccatctccaaaatattataacataaaaaatatacaaattacattgaaggaaagcatgcaaaaatgtggaaagtgagtggcactgacagtaaatgctctaaggatctagagaaggaatagctggagtggtccagataagtttcatagataaaatgggaccctaattgtagtttacaatattgaaaataattttgtatgcaaagagaatgaatttcccagcatttcacttctgtttgttcaaagcaattgagttcattttctttcactgttgtcrgaacctagtgtgattttctttcattaacaatgtatagaatatttatgtgttctctgcaggtctgcagtagttgaaatgctatataattaaacttatttttgtgctgtcatgattgaatttacttaagtagacttgtagatgtttttactgtaactaaaaactagattcaaattcatttttatgtgattttaatatctataacttaaaaaaaagaaaggttaatgtttatttttagaatttagaaatttggttttttttgtcagtttggtatagataagagttttaatattttttaaaaaggagagctaaagaagcatatcttgtatctacttttcttccctccctcctttttaaatagccttacttttctttctaatattcatttttgatactattttagtattaatgactaaacttgctttatgagtatttattacctaatgaacatgaattttagtgacaactttggccttatatttactgaagcttagatttgcatctaaagcagtgtggattttcagatggaattgttcaaatctaatttttgcattgtctcatttttgtttcacctcatggttgatttgttaatatgaatataaacgacaatttcttgaaataagtcaattcacagaactaaagtcagctttctttgtacacattgaaaaagttttgggcaagaagtatgggttaaaaattactaagaaattgttaagaataatttaatgtttaatattataattagtataaagcatgagtatgtaataaaaaattttcctccagagtaagtaaaaaatatttatttgtcataaataaacaaattaatgtgaaaatctctgccactgcattggagtttaccactcatgttattttatcatatgataaattatgatttgccctaagaaaaaaaaatccctgataattgggtcatgtacattcaagctcttattttgtcgttgctgaaattagatatgcaaaatattttactttaaaggatgttttaaaaatgttaatttggtaacttttagatggcacataaatatgtatgatacacatgaatatgactcacaatttgtaagtctgaaatatgcttctttaaaatcgagatttaaatatttttgttgataatgtattcatggggtacatgtgagtatatattacatgcatagaatatgtgataatcaagccaaggtatttgggatattcgtaaacttaag

SEQ ID NO: 684412 - DNA, 1555 bp, Homo sapiens
tagaatggttttctaagccatctaaatattttaactaattatacaaaaacaaaataaaaaatgtaaaatttgagagcaaattaaattaataaatgcattcagtacttcaactatgcagagagaacatctttcaagtaactttaaaatatagtgatttggcagtacattctcagtgargtctatcctaaagacacaagaaaacttatttcaagaaacttaaaaacaaagtaatttatcagtaaatccccagtgacatatatctcaaggtcaaaaataacaaaacaataatctgttttagtaattatatgattagcaataatattgcaattgttattctgaaagtcacattgtcttaatttattttgtgttgctattacacactgccacagcctgagtaatttattttttctgaaaagaaatttatttcttataattctggaggctggaaagtccaaggtcagggggtctgcatttggtgaggggagtcttgctgtgtcatttcatggcagaatgtggaaggacaagagagcacgagaaagaaaaaggaggctagatttgcttttataaaaagcccattcttggaataactaacctactcctgtgatgatgacattaatccaatcaatagagtagaactgtcatcacagtccctcctattggacttcacctcccgatactgttctattagggactaagtttacagcacatgatcattgagagacacattcaaaccacagcaaacataaaccaaaatatttatattattgtcatgaacatttaagattttcagtatgaaagacttagaaatataaaaatcaatgaaaataaacaaaaccgtataatcctaaataaaggaaaaataactcagtagattctgacacattaattatgttaaaatctgtgattttatagtatttttttaaaactcattggttaactttgaaagatgccagggaaccaacccatgattctcacaaagcatttatcatattttgactgaataaagtatatctcaagttaatgtattgaagagttgatgagagaaagttgtttttttggtttgtttgtttgtttgtttttgtttttgttttttttgagacggagtctcgctctgtcacccaggctggagtgcagtggcgcgatctcggctcactgcaagctccgccttccaggttcacgccattctcctgcctcagcctccagagtagctgggactataggcgcctgccaccaggccggctatgtttttgtatttttagtagagacggggtttcactgtgttagccaggggataaagttttcttaaaaagtgaatgtatatatataatcaaaggaaaaatgataaagtagaaaaatatgactggacacagtagcccacgcctgtaatcccagcactttgggagggtgagacaggtggatcacctgaggccaggagctcgagaccaacctggccaacgtggcgaaaccccatgtctactaaagtcgaaaccccatgttttttaaaaaaaaaaaaaaaaaaaaaaaaattagcccaacccggtggcatgcacctgta

SEQ ID NO: 684413 - DNA, 623 bp, Homo sapiens
tacccagtttcagatatttctttatagcaatgcaaaatggaataacagtatatatagagagagagaaagagaaagaggggwagtgagagggagtcttgtttatatgtgtgtgtgctttatgtgtgtgtgtgcgtgtgtgtgtgtgtgtgtcatagccacatgattgtttacttttttgtaaataatctagtcctccagaagcttttagatttttttctttgtcttatattttcaatttatctacctatttaagtattaagtgtaatttttagatctgctctttcggtacactaaatatttttaatctgagattttacatttttttcgcttatttcctttactctttgaaattatctcccttcgtgatcattattatactaataaaaatacgtgtacttctatttcccatgccttttaacatttcctttatattttccatctcttcctgatgccttctgaagagttccttatcctaatccggcaaatcagtatttctttctttcttttccagctgtattaattctgctatttaacccttctattgaatttacttgcaatatcatatttttagacccagtttgttctttattggcattgtctcttcttcattttccaatattctg

SEQ ID NO: 684414 - DNA, 863 bp, Homo sapiens
ctgcaagctccgcctcccgggttcacgccattctcctgcctcagcctcccaagtagctgggactacaggcgcccgccactacgcccggctaattttttgtatttttagtagagacggggtttcaccgttttagccgggatggtctcratctcctgacctcgtgatccgcccgcctcggcctcccaaagtgctgggattacaggcgtgagccaccgcgccgggcctgcattttctttttacttactaataaaatgtgtatttttccttatctatcatatgaatggatcatgtttcatgcaaacatccttttatttgcagatatcttagttatttctaattgtttaatagtataaattaagcaggaatgaatattcttatcaaatagttttcacaagattttcaaaaattgtttttcatgaaaatgtataatctagctattgatatacggaattgctcagttggccatattcttcccataactagacaaggtgagattttcaaagctgtgcaagtcttattagaagaagtgacatctcattgtagtttgttctctactttttactgttgaaaagtttaatcatacctaaaagtaatcaaataataaaatgaaattttatagatctaacacctgaattcgagttattttgccatattatttttatttttaaagcatttgagagttagtgcatatttatagaacttcatctacaaatattgcaatataacgttataataatcaggatttgatctcagttcaattacaagagaaaatgaacaattacaccatttttttaataatttcaacttattttaaattcatagggtacatgtgcttgtttgttaaatgcatatattgtgtaatg

SEQ ID NO: 684415 - DNA, 1429 bp, Homo sapiens
catttttttctagaatcaattatgttataggtccttatatatgatttactaagtagtttgagtagaagttttaggaagcatagaaaatatttattttattctgtaaatagagccagtttattgattcaagtaatagtgtatattttcaatttttaaagtggttctagtgatttttttcacttaagattttatttaacaatgttttcacagaaagaaaaacagcatacaatatatcacaaatagattaactaaaatatcgccaaacaatgcttacatctttgtaaaatgactaccttacagagcaatctactcaaaattatatataaataaatattctggttgtagtatagttgatagggaattatattagataaaataggccagaaatgttgttttatagtaagttttcctttgttccaggaagtttcaattcagaatttcagaaacataattctctgaacttatttgttcatttaccttccatagaaatatttcaataatatgtgaattttcaagatgacccggaatgagagcgatcaatgttcaaaccattcttgctacagatttaagatgcaattcaattcagaggtttgaccttggttttcataacttaactgtttgtctccatacaatgttctacctttgaagaactggctttaaatctttttcatttttttttgagatggagtttcactcttgttgcccaggctggagtgcaatggtgtgatctcggctcactgcaacctccacctcccaggttcaagcaattctcctgcctcagccttccccgtagctgggattacagatacccgccaccatccccggctaatttttttttattatttttagtagagagggggtttcaccatattggccaggctggtcttgaactcttgaactggctttaaattgttatattgagttaaataactaatttggagtcaaattactcaaagaatatagatatggtattgctaagggaatgtaggtgctgggttattactgtttgaaaaatatatgtaatatgaaacattaaaaataattaattattgctctttgaataactttatacaaatggagaaaaaactatttgaacaatccctatgggcttgaggctcagacttctgaggataggatgctatccaactgttggtatctctgaaaagacaggatagggtgcttctaggagtaccaaaataagttagactctaattgctaatgcctgggcaacactaagaggaacattaagtggaaaggagaaagtcccttctctccttctcagctttcttttttgagagccatttactggcaaaacctaacagaaagtcaacgctccagcattaccgagcagatggaggtgatgataaatacctggtctaggacatctccctattattcagtattcayggatattcctacaagcataata

SEQ ID NO: 684416 - DNA, 1387 bp, Homo sapiens
  misc_feature 112: n = A,T,C or G
ttggatcacctaagttgataacagatttataacttaaggaatgtagaagttaaggttttacagtgcaagttacaatttagattaactagtaagtacctggattatagtcaantaatggaagaacaaaacacatcacagaaagattttaggcaacattaaaaacttccatcatcttaatttaaaccatccgaaaaacaagcatgtcaggatataaatttaaaagaaattcaactatatctgactattttaagcattaattcaaaatgaaattaggtctttaaattcgtactataaatttctaaaagtgtgatttctcaaaacttggatgaaaaattagaaaatttctgttggtaaaaatactttggaatctttagttgtaagaactattttgagcatattttcatagaagaaattaaagctagcaatattactaaaataataaatatgcaataaattcaaataattacctcatttcatttggttcaaatgtaaaaatatatctatttatacttattgctatgaacatatcaaaataagaaaaatgtgcaatattaaaattagaaaatgtgcctctgtaaaatgaactaagctccatctatttttccacaaaagaaaaaaaatggctttgtataaaaaacgttttatcataaagtttactaaactaagcacccatcatgtggaatatgaaatttactgaggtcaattcaggcagagatcactatcattctcccacctgctgcagatactagctggaaaggtacgtttttctttcctagtgtctctgggccaaggcaatgctaagaggtttggagcccaagatgcggccattcatctcagtcattgctttagtagcatcctcaggagaggagaagcagatcaagccaaaccctttgctctgcccctcttcctgcattaccttaactctgctaattgatccaaatgaagaaaattcgtttcgtagtttttcatcatcgatggtgtcatcaaggttcttaatatagagttttaccccctggcacccacgaattcgttcccttttcagctgctcaaacatttgctttaactcagcctgtcgctckactttcttttgagcccggcctacaaaaatcagctgcccatttatgtcccttccattcatttcttcaacagctttcttggcagcctcatggctatcaaaactcacaaagccaaagcctttggatttcccactggaatctgtcatcaccttaacactcagagttttgccatatttgctgaaaacgtccttcaatctctcatcatccatgtcacctccaaagttttttatgtaaacattggtgaattcactggctttgcttctgagttcagcttcacgatcttttcggtttttgaatctgccaacaaacac

SEQ ID NO: 684417 - DNA, 1781 bp, Homo sapiens
tttggaaagccaggataatcccattaagagcactcaggaatcgagggagagcaatgctccccacagcccagtgtccttgtacatgtttttttctatagataactaagttcatgctaaagcaggagctttataatgctctttaactgtgccccaacttcagcccaattgaaaggagaagatgtgtagcatatgtgttccacaaagcagatgacagcacagcttacattttgaggctgacgatgttcagtgggtcttcactgggactaccaccaaggaaagtatcccctttcatatccaggaacttatttttcagagatcagagaagatctaggttcctcctgattcaaacacagcagagaatgacagcatcaagacaacgtagatggtggtgccaggtcataaattacaagctgagtcggttcaattttatcctgtaggcaattaggagctagcaaagatttctgagcagtatgtgacttttggaatctgtgctttaggaagttgacttggcagcaaaggagggaattgtctatgacagagcctggaggcaggttacaagctggaggaagttaccgtggtgtgagcacaaggcaacaaaggcatggacagagctgggggccagatactgcagggacagataggagaggtgacctggggagaatgcacagtccttggtattcatttaaatggacaaaagaaatgatgctgtcaaaagtacttccattgggccaggcgcagtggctcacccctgtaatcccagcactttgggaggccgaggcaggtggatcatttgaggcctggagttcaagaccagcctggtcaacatggtgaaaccctgtctctactaaaaatacaaaaattagctgaccggtagtggtgtgcacctgtaatcccagctgcttgggaggctgaggcaggagaatcacttgagcctgggaagcagaggttgtggtgaaccaagattgtgccgctgcactcctgtctgggtgagagagtgagaacctgtctcccaaaaaaaaaaaaaaaaaaaaaaaaaaaagtacttccactggtccatgcctaggtggtccccaccaaaaacggtgatcgtgaaatagacatgctcttggggtcaggctgagtttgaggaggcagaggagaagaaaaatagtattttgagggggcagcaacaatgtcacaggtgtcatgctatgcactttcctaagtcatctcatgtaacctgttttaatcctgacaatagtctaattaggacattttcattgtcttcatcttacaatggaggaaacttgggttcagagacgtgaagttgcccatagctacatatccayaggttgcagaggtgggtcccaacaccatgactgtgaggccccagaaccacacctttcctcccataccctcactgcatcccccctcgcctttactgtgggtcacactctccttcctttttgttttttttattgcatatgctaatgaatgcacaggtttctgtgacacttaatagttcccgaattggaatttttttagtgattttctagtttttttaattatttcaaaatgaaaggggtgagcagcacgtttttttcccaaatgacatcattagttgtccatgagcacaattaaaaaaaaaatctatcgtgaacataaagaatcaagtcctgaaaaggatgtttacttagcatctgtggctaggacacgttagccaaaagtatcactgatgggaatatcatgggtttttaggagtgattacaatagggtgaagcaataccaagtggctcatagga

SEQ ID NO: 684418 - DNA, 679 bp, Homo sapiens
gggctttatgaagtgagttcaatttgatttgatacagttttactgaacctctactaccacgtgcaggtactaacctacgtcctggccaaagtgggaaagagcttaattcatgtcctcttaggggctacaaataattggaaattagcaataacgaacacagacaggctaaccaacaaacaaataaaaccagtggttccaaggcctaaagatgcaaatggtaagagaggcatgtgtacattgctacttgctatgtgatcaataaacatctgcttcccagttgttcccaatctgccttatgagaaatatcaaaagtagtggcagtgaaacagctggagatagtctgtgggctaacatataaacacatgcgtgagggtgacaggtctgtgttacacacacattgcatgcccctaaaaactaaacttcacaagttaaaatattccataagcctgtcttcagagctgaacttaccttaaaatgagcatttttgtttaattgtatgtttccttttacaaaatgctrcaacgcattttaacccaaatgggtgagaagggaaaaaaaaagtagtctgtgtaaacatacaagctctgatgtgtcttttgttcacaccgaacagtggtgccatacaacttgatgagttcctgatttagtcttcccagggacaggcatgtgccaagcagcg

SEQ ID NO: 684419 - DNA, 635 bp, Homo sapiens
aggttcacaagagcagcaactatatttgttttgcttattacattcttctcagttactagtactgtgtcttgtactaggaattgagaaccatttattgctgagaaaatacttcaggatgactgagagctcacctaggcttcatacagcccctgatgctgaaggtaaccactggtttaagaaggacgctcactatgttcatgagcacagcgtctcgtattaaggcaagccctttaggatgtgtaaatgagtctttcccagcatgtctctaacactaaggggatgggagaatggatagaaggaaacagggaaaaaccgataatattccttgggatgagatcaagtatgactaacaaaaagaaggtaattataataatgcctacaggcttgtataatctttctagttcaagaaagcctcaaatatattatctcacttgatcttcataatgccagagggaataggtggattatgaagttatattggccattcagagcaggaaacaaaggatcattgaaggcaaataaattagtcaaggctggaaaatggtggaamctagactaggacccatatcttccagagctgtgctatccaacatggtaaccagcagccacatggaaccacatgtggttactgagca

SEQ ID NO: 684420 - DNA, 616 bp, Homo sapiens
tataatttgctggattagagaagcttaattttctgctgcacttgagccccttattatagttttatatcaccattctgaaagaatgtacacaaactttttttactaatactttcacttggaagaatgttaacatatgttggactgtgatgggtacttcatctaatttagcattggtaaggcaacaacttcaactgagtgagaaagctgactaagcctgctggcatttctgaaagcttgcctcttactatctagcttccaaagagtggtttcacctaactagcaaatggcagatacccctatttaaattaagccttcctagagcttgaaactatactgtatgttcagcccctrgttagtgcctggctctgaattatattgttaaaatattgaatgaatgaataaatgaacacatgaatgctcattaaatactgaaggaaccagccaatttatcagttcacagattactaagttcttggcctttttattaaaatatagttatgatatgatagatatatcttataaatataaatgaaatattataggaactatattccatgtaagttttttaagtcctcagattcctatgcgatagcagcaactaatatttccgaccata

SEQ ID NO: 684421 - DNA, 616 bp, Homo sapiens
tataatttgctggattagagaagcttaattttctgctgcacttgagccccttattatagttttatatcaccattctgaaagaatgtacacaaactttttttactaatactttcacttggaagaatgttaacatatgttggactgtgatgggtacttcatctaatttagcattggtaaggcaacaacttcaactgagtgagaaagctgactaagcctgctggcatttctgaaagcttgcctcttactatctagcttccaaagagtggtttcacctaactagcaaatggcagatacccctatttaaattaagccttcctagagcttgaaactatactgtatgttcagcccctggttagtgcctggctctgaattatattgttwaaatattgaatgaatgaataaatgaacacatgaatgctcattaaatactgaaggaaccagccaatttatcagttcacagattactaagttcttggcctttttattaaaatatagttatgatatgatagatatatcttataaatataaatgaaatattataggaactatattccatgtaagttttttaagtcctcagattcctatgcgatagcagcaactaatatttccgaccata

SEQ ID NO: 684422 - DNA, 1342 bp, Homo sapiens
ttttgccctttgactgtcagagttagaataataaagtctaatctctacattgttcagctgaagaaatagtgtctcagaaatatgtctgtcttgggatatcaaatcacatcaatttcttgagcacttaattatgtgtgatggttaattttatgtgtcaacgtggccaggttatagcacccagtagtttggtcaaacatcagtctagatgttgctgtaaagatattttaaaagatatgattaacatataagccagtaggctttgaataaaacagattaccctttataatctgtgtgggmctcgttcaatcatttgagggctgtaagaaaaataactgagctcccctaaagaggaaggcattctgcctccaggctgcattcagactcaagactgcgatagcggcttcttctggaatttccattctgctggcctgccttgcagattttggacttgccaacctccacaatcgcatgagcagattcttccgaataaatctctttcattagctctctttatgtggggaggcttcactaatcaccgtagaaagggccacgtgggaagtacaagtgattcagacctggccttcaggccttttgacgggttcaacgtccacttaccagactctaaaccagagcaattgtttggttcacagccatgtaattcataacattgcttgggaatgagcggttttcctgacacattcggcttctggtgtgacaatttcaaagcaccataagccaaaaccaaaattaaaccctttgaatttactattcttcccactgtgccacactgctcctcttaggaaatagcctcaccaaacttaggcagtttattgctgacacgtcccatctgttgtcctcacagtgtgaatgccatgtgttcgtcaagttcacttggatttctcccacacactcacactctgtattctgggaattaagctgaggaaagtatcctcttcctcaccagcaactgctacagtcagcttcctttagtaaacaatgtcggtgcagtgaatgttctcagtaaagccctctggatgcgttctttgcctgtgtagagccaaagaaaaatagctgaaatgtgcaatctcagcatttttctgtctaatattatcagtgcttagtctcttccatggagatcctgtgtggatggctacgaaacatgataaattttttgtcttaaaaaatgagctgatattacataatggaaattatatattggttaggatttcagctcttattcccttctccatgagctccattttaagaaaccaaacaaaataaaaaggaaacattgaaggaaaatatttgaacaattaaggtttgggacacacacacaactttc

SEQ ID NO: 684423 - DNA, 1428 bp, Homo sapiens
ctctatcagatgcacctaattagggtattacatgttgttttctgcttgttccttcctataccgccattctgtaaggaaatccatcagcttccttaagactgtagaccccaattctccaggttcaaggtggaaggacgctcctaactgaggaaacggacctgtcaacccccactcttagaagatctagaacagcactgtccaggagaactgtctggatgataggaatgttctttatctgcacaggccaatacagtaggtactgagcacaaaagatgaaggagcacctgaagtgtggccagtaccactggggaactgaatttgtcattttgtttaatttaaatttaagtagccaccgtattagcacagatctggagcccacagggtttgcctgcagaattggacaagtgtagacagacaagtgagcatgtctccgccaacaccaccatctctgtgttctttaacagggccgtgcccaagttcatgaagaggatcaaggttccagactacaaggaccggagtgtgtttggggtcccactgacggtcaacgtgcagcgcacaggacaaccgttgcctcagagcatccagcaggccatgcgatacctccggaaccattgtttggatcaggtgagagcgctgcctgcgggtccacgtactcaggggagctcggattacatgcagcttcttctagttgtgtggtgtaaacactgcgtccacgtgaatgtaccccacacttagtgttgctcttccgacaggttgggctcttcagaaaatcgggggtcaagtcccggattcaggctctgcgccagatgaatgaaggtgccatagactgtgtcaactacgaaggacagtctgcttatgacgtggcagacatgctgaagcagtattttcgagatcttcctgagccactaatgacgaacaaactctcggaaacctttctacagatctaccaatgtgagtgtcctttgatcttaagattgttggcattgggraaaaatgggaccaactgaagcttgtagcttccttgatagcattctttttttttttgagatggagtctcgctctgtcatccaggctggagtgcagtggcgtgacctcggctcactgcaacctctgcctcccaggttcaagcgattctcccacctcagcctcccaagtggctgggactacaggagggcgccaccacgtctggctaatttttgcatttgtagcagagatagggtttcaccatattggccaggatggtctcgaactcctgacctcaagtgatcctcccacctcggcctcccagagtgctaggattacaggtgtgagccaccacgcctggccttgatagcgttcttttgacaagagagtctgcatggtgacctcttggaaacccatgtcatcaccttcttccttgccgccttgtttgtggaacaggtttctgtg

SEQ ID NO: 684424 - DNA, 1428 bp, Homo sapiens
ctctatcagatgcacctaattagggtattacatgttgttttctgcttgttccttcctataccgccattctgtaaggaaatccatcagcttccttaagactgtagaccccaattctccaggttcaaggtggaaggacgctcctaactgaggaaacggacctgtcaacccccactcttagaagatctagaacagcactgtccaggagaactgtctggatgataggaatgttctttatctgcacaggccaatacagtaggtactgagcacaaaagatgaaggagcacctgaagtgtggccagtaccactggggaactgaatttgtcattttgtttaatttaaatttaagtagccaccgtattagcacagatctggagcccacagggtttgcctgcagaattggacaagtgtagacagacaagtgagcatgtctccgccaacaccaccatctctgtgttctttaacagggccgtgcccaagttcatgaagaggatcaaggttccagactacaaggaccggagtgtgtttggggtcccactgacggtcaacgtgcagcgcacaggacaaccgttgcctcagagcatccagcaggccatgcgatacctccggaaccattgtttggatcaggtgagagcgctgcctgcgggtccacgtactcaggggagctcggattacatgcagcttcttctagttgtgtggtgtaaacactgcgtccacgtgaatgtaccccacacttagtgttgctcttccgacaggttgggctcttcagaaaatcgggggtcaagtcccggattcaggctctgcgccagatgaatgaaggtgccatagactgtgtcaactacgaaggacagtctgcttatgacgtggcagacatgctgaagcagtattttcgagatcttcctgagccactaatgacgaacaaactctcggaaacctttctacagatctaccaatgtgagtgtcctttgatcttaagattgttggcattggggaaaaatgggaccaactgaagcttgtagcttccttgatagcattctttttttttttgagatggagtctcgctctgtcatccaggctggagtgcagtggcgtgacctcggctcactgcaacctctgcctcccaggttcaagcgattctcccacctcagcctcccaagtggctgggactacaggagggcgccaccacgtctggctaatttttgyatttgtagcagagatagggtttcaccatattggccaggatggtctcgaactcctgacctcaagtgatcctcccacctcggcctcccagagtgctaggattacaggtgtgagccaccacgcctggccttgatagcgttcttttgacaagagagtctgcatggtgacctcttggaaacccatgtcatcaccttcttccttgccgccttgtttgtggaacaggtttctgtg

SEQ ID NO: 684425 - DNA, 882 bp, Homo sapiens
agtggctgatatgctgggcgtaacccatccgtccagaagcctgggcctttcccatccccctaaggaccctcccaggctgggctccacaggaatgtgtccctcttatctcctgggcaacttctaccctgctctgaagagggaggagtgcaaggctggcctatcagaggttcaagagcttctctgcatggagctgcaggaacccagataaaagcacagcaggtggggacctgggccccattgtattaaaagtaaaaacaagccaaaaacaaagaagagaagagggagaagggggaaagatacaattttccaagtaagactctcacaaataaaaatggttacaattcttaaagatattttcttggaatctgtgcaattgctttaaaaaattacatgctactcccagccttttcttttctttttgagacagggtcactcaggttggaatgcaatggtgctatcatggcacattggagcctggacctcctgggctcacaggatcctcccgcctcagcctcccaagtagctgggactacaggtatgcaccatcatgcctggctaatttttgttctttattatagaaatggggtcttgccatgtttcccaggatggtctccaactcctggaggctcaagggatcctcccatcttggcctcccaaattgttgagccactgtgcccggctacgtgcttaccttttaacagaccagaaattgtgacaaagttaaaayctgctctaaggtgggctgctttgcatggctcaggcatctgatggactgctttacaacaaagtgaatactgcaggtgacagtgtggaaatctatttttcattatacaactgtcacttgatgtacatacttctttgctgtgtttatagaaggagtca

SEQ ID NO: 684426 - DNA, 834 bp, Homo sapiens
tggtagtatttgtctttgttctttacagagyctcattatattgctcgaatatcatcttgaaaaaaacatagatgatgttagaaatattttttaactagataaaaattgctaacaataaatgtgttacttggaatttgctagtagttaattctaactgtattagttggtctgagttcaacaagtggatgatgacttttctcaacaaattggttgatattatgctcctcaaacctgccatgaattacacgaccccaggagagtctggaatgttgatgtgatagtgacaaattgtttcactgctctctaatgcaaaaatattgtaaatgagaatcatctcagttcatttattcaagtgtgtttaaaatgatatatttggagatctgtactttctgagctctgtagtagacatttctttaaggaaattaaaaataaaatgtcaaattcaggacaaaacaatctagaattttagttatgtaaatgagtgagataaatagtactgttctagcacctctctctctcaaaggtcctttttagaatgctgcattccagtaggcacttctcttcaacatcttggcaggtgcatttgtaggtataagcgaacacattgcattgcattgcattgcattgcctggcatcgtttgcagtggagaaatatttgaccgaattgcttttctctaatttaaccagtgttatttcagtagagcagattgcaggcaggtcacagaacagctaggagcagggctctgaagacagacttgggtttgaatgctgtctttgcaatgtatataagctgcgtaacttcgggcaatttagtcaatctctctaagtctcaga

SEQ ID NO: 684427 - DNA, 1729 bp, Homo sapiens
  misc_feature 979, 980, 981, 982, 983, 984, 985, 986, 987, 988, 989, 990,991, 992, 993, 994, 995, 996, 997, 998, 999, 1000, 1001,1002, 1003, 1004, 1005, 1006, 1007, 1008, 1009, 1010, 1011,1012, 1013, 1014, 1015, 1016, 1017, 1018, 1019, 1020: n = A,T,C or G
  misc_feature 1021, 1022, 1023, 1024, 1025, 1026, 1027, 1028, 1029, 1030,1031, 1032, 1033, 1034, 1035, 1036, 1037, 1038, 1039, 1040,1041, 1042, 1043, 1044, 1045, 1046, 1047, 1048, 1049, 1050,1051, 1052, 1053, 1054, 1055, 1056, 1057, 1058, 1059: n = A,T,C or G
  misc_feature 1060, 1061, 1062, 1063, 1064, 1065, 1066, 1067, 1068, 1069,1070, 1071, 1072, 1073, 1074, 1075, 1076, 1077, 1078, 1609: n = A,T,C or G
tgatcgctgctggacgccaaccccagtcatcacttctgtgaataacctgctgctacccctgtgttttgtgtctcttgctctctggcacacttgtgtcctttgaggtatctgggataactgctagttttcagcacctttatgcatggtgtcttcaatgtcattaactacagttggccctctgtatccacgggttctgcattcacgtattcaacaaactgtggattgaaaatatgtcggaaaaataaacaataaaaaataacaatacaacaataaaaatacaagtaaaaaaccaatatagtttaacaactatttacatagcatctacattgtattaggtattataaaagtagtctagagatgatttaaagtatgcaggaacatgtgagtaggttatatgcgaatactatgctgttttgtagaagggacttgagtatctgcagatttcccaatgtccatgtctactaaatggccacaaagacttttgagaaaggctgggcaaaagactcatgaactatacttatgatgttactgcagatatatataaccattcttcatgttgttcttcacttgtaagttgatcttgaaaacatagtaaactagaaccattaaatctgaaacactcagttcccaattatttgtgtgggttgactgacatttccatttatcttggccagttttcttttcaagtagttcccaaatagcctcataaagaagtaaagtgaatgagatgaaattaattttaataacattttaatctaatatactcaaaatattatcattacaacatgtagtaagtataagtaattattgaagagatattttacatgtttttccatactgagtcttcagtgtccagtgtgtattttacatttacagtacatccctattcacactcaacacatttcaagggtgcaatccccacatatgactggtggctacgatattggatagggcagggctaaattatgttactggattnnnnnnnnnnnnnnnnnnnnnnnnnnnnnnnnnnnnnnnnnnnnnnnnnnnnnnnnnnnnnnnnnnnnnnnnnnnnnnnnnnnnnnnnnnnnnnnnnnnncttgaatcattatattcctgatcaaaatacaaaaatactatgcgctgtcagaggaatagatatgattccatcacatttaccttgatgactccatattaaatgtctcaagagagactttatacccaaatgccctaagcatgtgatctgtttttctgaaaacactcaacaccaacacataattttaaaggccattttaagatagwttttttttatggaaaatgatgtcacactaaattttgttttaaaataattccatatgtcactaggaaatattttgaatgcttggggagcttgttgccacagagtttggcaggttgcctatatttcccacctgaaatgcttttatttgaccacaccctcccctgcttcagtataggtcatctggagcacccagaaaacttatggaatatttgcttcagaataaaaaggtatatatatatgtatacatatttttcagcaacaaaatattgtatcctttttccagaaaatatggggagaaaaagcctactcctttgaaagatatctactttntgatatgtatctgctctaacacttgaaaattcttagtaaactctgatcagtaaactggtagagataattcaatgggacatttatttagtgtcaactgcatacaaggcagcatgctgagtg

SEQ ID NO: 684428 - DNA, 427 bp, Homo sapiens
tcagaaaaagacttggagtagtgcttggcaacagtaagaactattatttttatttttataaattatctcaatatttctatagactaagctcctgaacgtaaaattttgggaatttattaatatttatagttttmtacattttgatatatatgtgatatttatctccagcaatattttacagattctattaaaactctgcaaaagcaaaacatacctaaatccattgatatagatcagttttcattacttaaaataatgaattaattacagtttgattttcctagaagcaaaatgtatgtcttagatttctttctgtgaaaatgaaattatcttcaccctattttgtataaaacataaaataatagattttctttagatccacttttgatgactacatattcatgacactatactaacaaaattctca

SEQ ID NO: 684429 - DNA, 427 bp, Homo sapiens
tcagaaaaagacttggagtagtgcttggcaacagtaagaactattatttttatttttataaattatctcaatatttctatagactaagctcctgaacgtaaaattttgggaatttattaatatttatagttttctacattttgatatatatgtgatatttatctccagcaatattttacagattctattaaaactctgcaaaagcaaaacatacctaaatccattgatatagatcagttttcattacttaawataatgaattaattacagtttgattttcctagaagcaaaatgtatgtcttagatttctttctgtgaaaatgaaattatcttcaccctattttgtataaaacataaaataatagattttctttagatccacttttgatgactacatattcatgacactatactaacaaaattctca

SEQ ID NO: 684430 - DNA, 651 bp, Homo sapiens
atctaatgttttgccttctttttcctttgaaatctatcagccatcaaatcctggtgtttccttctttgattcctatagccactacaagttacccccacctgctgaagagccaccatattattttaaatggtatcgtcttaatgctctccccactccctacttttcctccctaaaaacyaccagcatctgtctaaaacagaacttttgttacatataaggattcaataatcatcaaaggctaaccaattattgcaaagtaatataaaaactcctttggcattcactgcttttcacaatgatcctactgtaattaaatgtaccttcactaagcatatcgccacagtaggtactatgccaagataaagcacaattcctgaactgaacataaatttgcacaggaattcagcttcaaggacatgtgctacaatattatttatgatggtgaaatttggttaaactctttggttaaactatggatgtatcaaaaaccaaagctactgttgtccattaaaaattgttacatagggtggtggctctcccctgtaatcccagcactgtgggagactggggtgagtgaactgctcgagcccaagagttggagaccagccttggcaacatggcgaaaacccacctctacaaacaaaatagaaa

SEQ ID NO: 684431 - DNA, 632 bp, Homo sapiens
cactgtattccagcctgggcaacatagtgaaatcctgtctcttaaaaaaacaaaacccaaacccccacaaaagttgacattgtatttcagatacacaccatgctagcctcaacaaatgattatattttctaaaacactgaagaaattgttttaattttattgggatctcagtataaaccagaatgcagtatttaatatcatcccctccaaaaggatttgcctgctaattaacatcttattaagctgacaaaaatactcataaaaagaaatattttggggaatctgatatgtgcaaggccactggagatatgaaaagactaaatatcttcatccttatatgaaagactgagctgctatcagccaagactctccgaaaactagaggttatcctctggtaatgacatctggaagaatcaaagaatcaaaacttaaaagatcagttgtttgtagacagtatctatgtattcatgtctgmaggaaaggtactatgaaccatgtatttattgaacaactgcccaatagaaacactatccaggaagaaactatgattcactgacatgttgcctgaagtattcagttagcctgtggttaagagttacaaagaaatttcttgtgcattcataaaatcaatt

SEQ ID NO: 684432 - DNA, 1045 bp, Homo sapiens
tatttgactcctaaataacatgtcagctttctaaaatattactgtgtactttcaaaatattttggccaggtgcagtggctcatgcttgtaatcccagcactttgggaggccgaggcaggcagatcacctgaggtgacgagtttgaaaccagcctggccaacacggagaatccctgtctctactaaaaatacaaaattagccaggcgtggtggcacatgtctgtaatcccagctactaaggaggctgagacaggagaattgcttgaacccaggaggcagaggttgctgtgagcctagatcacgccactgcactccagcctgggcaacaagagcgaaactctgtctcaaaaaaaaaaaaaaaaaaacaaaaacccaaaaamaaaaacaaaaaagtcttttagaagcttttttttccaattaacatctgctgggtgcagtagctcacgcctataatcccagcactttgggaggccaaggcgggaggatcacttgagcccaggagtttcagaccagcccgggcaacaaagcaagaccctgtctctacaaaagaataaaaaattggccaggcatggtggctcaggcctttaattccagcattttgggaggctgaggcgggtggatcacctgaggtcaggagttcgaggccagcctggccaacctggtgaaaccgcgtttctactaaaaatacaaaaatcagctgggtgtggtggcaggcacctgtaatcccagctacatgggaggctgaggcgtgagaatcacttgaacccaggaagtggaggttgctgtgagcctagatcacgccactgcactctagcctgggtgagacagtgagactccatctcaaaaaagaaaaaaaaaagaataaaaaattagcagggtatggtggcatgtgcctatggtcctagctactcaggaggctgaggtgggagaactgcttaactgctttagcctgggaggtcgagactgcagtgagccttgatcgcaccactccactccagcctgggtgacagagtgagaccctatctcaaaacaacaacaaaaacaaa

SEQ ID NO: 684433 - DNA, 617 bp, Homo sapiens
ggattttacatgatgcaagaaatacaaatatttgtcatgtgactacaggagacctctttggtgtttatatagaaaagtcttgggtttctaatatcaagatcatactttgattattaccaccctagctgaattctgatacttagaaaatgcaattaccttttttacttgtattcatttatattttctaaataagatatgacacacttatgagataggttgatggataatgagagctttttaacagctttattgaggtatgatcgacatacgaaaattatatatatttaaggtgaataacttgatgttttgttctacataaacattgtgaaatgatcaacacaattaagctagttaacatatccatgatctctacatagtagaggtattgtgtgtgtgcatatcatatatattaatacgtgtgtgtacgtgtrtatatgtgtgtgtgtgtatgtgtgtgtaattcagccttataaaacaaaaaaatgcctgtgcctgtgatcccagctacttgagaggctgaggtgggagaatcacttgagcccaggagtttgaatccagcctgggcaatatagcaagaccccatcagaaaaaaaggaaggaaataaggaaatcttgct

SEQ ID NO: 684434 - DNA, 622 bp, Homo sapiens
agtaatcctaagaggtaggttttttttttttttttatctatttaacagataaggaaccaaagcttagagagtttaagtaatttgcccaaggtcacacaggtagtaaatgaaagagcctgtatccactacaatcttgtctcctaatcactgtgttatagtccccgaagtcttgactggtgttgggcacagtcctagggacaaaggcatcacaactctaggccacagagaactcagaagtgagtgcagaggcctttacctatgtgtagcccatgtgttttgaggagtagatatgtggttttgagayccattcagcagcttgatgggcaccagtgcatggacacctgagccacagggccagcccacccagcactgcaaaaccctgcagcctggagcgggttgggtggttggtggttccctaagcccgctgcgatcttggaatagtaatatattcctctcagaggcagattgcaggggtgacatgttattacctttgctagcaattgttttgtttaatttccattttaaaatttatttcctgtgagaatgaactgactggaagtcatttgtgccagggagggaaggtgaatttcttattaactctcccaggtaatgggtagctgca

SEQ ID NO: 684435 - DNA, 631 bp, Homo sapiens
ccttaatgctagaagcatctttcatcaaatagctcaatgatcagtgcattgaatgattgttgtatttcattcccttctmtatagaaaataaaatgcaagcccactacatggaccataaaagttcaatatgtagtaaaaattattaataatgtttattgttcaatgttttagagtcaatctgtggacaaagcacagaagacttgtttgtgattgcagaacaaaatgcaaacatcagcaaccttgacaatgagaaagaaaaagtgagcttatgaaaagaggaaggaagggagaagtctggcaagatggccaaataggaacagctctggtctgcagctcccagcgagatcaatgcagaatgtgggtgatttctgcatttccaactgaggtacctggttcatctcattgggacttgttggacagtgggtgcagcccaaggagggtgagccgaagaagggtggggcgttgcctcacctgggaagtggaaggggtcagggaactccctctcctatccaaaggaagccattaggaactatactgtgcactctgggcccacatactgtgcttttcccacagtcattgcaacccacagaccacgagattccctccagtgcctacaccaccagggctctgg

SEQ ID NO: 684436 - DNA, 626 bp, Homo sapiens
aatttttcaggcttatacaggcaaataacttacttaatttttttgattgaatttartgcagctcctaaccccttatttacattcagtcactatcaaaattttctcactgtcctttaagtaaaaatggaatcagttatggattttttttattcctctttcctctctttctcaccaggtgttaaacttgagtgaggtgtattccgggttgggaggcaccgtgtgtctgcaacccagacagtcaatgttcattggccccaggacattgacacctacccagctaccccctgtatctgtggcctctccactctccagttgccagacctaagcaggtgccccgtgttctctttatcccactaccaaggctctgcagcctgctctcaggcacacctgtcctctctacatggcatggaaacgttggctgcgccaccctgggaaactgggggctctgggaaaccacgtgtggcccatccgctggggcccctccatgcttctggtgccacggcacacgtgggcttctcaagagacttgctgcccctttgtccctccccttcaccttcaatttacttgaagaaaccaaagcctgggctttgtaaagagtattgtcactgccatgtgtttaaagaaat

SEQ ID NO: 684437 - DNA, 626 bp, Homo sapiens
aatttttcaggcttatacaggcaaataacttacttaatttttttgattgaatttagtgcagctcctaaccccttatttacattcagtcactatcaaaattttctcactgtccyttaagtaaaaatggaatcagttatggattttttttattcctctttcctctctttctcaccaggtgttaaacttgagtgaggtgtattccgggttgggaggcaccgtgtgtctgcaacccagacagtcaatgttcattggccccaggacattgacacctacccagctaccccctgtatctgtggcctctccactctccagttgccagacctaagcaggtgccccgtgttctctttatcccactaccaaggctctgcagcctgctctcaggcacacctgtcctctctacatggcatggaaacgttggctgcgccaccctgggaaactgggggctctgggaaaccacgtgtggcccatccgctggggcccctccatgcttctggtgccacggcacacgtgggcttctcaagagacttgctgcccctttgtccctccccttcaccttcaatttacttgaagaaaccaaagcctgggctttgtaaagagtattgtcactgccatgtgtttaaagaaat

SEQ ID NO: 684438 - DNA, 1421 bp, Homo sapiens
cattcttttttgtggctgaatggataaacaaactgtgtatatgtacacacaatggaatacattgagccacagaaaagaatgaaatcatgtcatttgcagcaatatggatggaactggaggtcattatgttaagtgaaataagccaggctcagaaagacaaatgttgcatattgtcactcacatgtgggagctaaaaaagtggatcatatgaagatagacagtagaatgagagagaccagagactgggaagggtgtgtggttgggaagcagggatggaaagaggtgggttaatgcgtacaagaatacagttagatagaaggaataagttataatgttccatagcaaagtagagtgactatagttaacaataggtgttatatatttcaaaatagctagaagagagaacatgaaatgtttccaacacataggaatggtaaattcttgaggtaatggatgccctaaacaccctgacttgatcattacacattccatgcatgtaacaaaatatcacaagtactccataagtatagacaaatattatgcaccaaaaatatttttttaaatgtacttataagtatggtggagtttatcttcttatatttttattttacctggtctttgctcctttttttctttctttcaattattttttaataatcccattagatttccactctgtttattggctatacctcttgattttgctttttcagtggttgctctagggtttacagttatatgtgtgtgtattttataatatatgtatatgtatgtacrtgtgtgtatatatatttatatatacacacacacattatcttcatcttatttcaaataacctatttgaaatattacaccttctgtagtataagaaacttacaatagcatagttccagttctactgacctttgtgctatggttgtcatatattttacttctacatatgttataaaacccacaatacattgttttttatttttgctctaaatagccaaatactttttaaaaacaattaaaaataggttgggcacagtggctcacgcctgtaatccctgcactttgggaggcctaggtgggtggatcacctgaggtcaggtcgtcacctgagatcatcatggccaacatgatgaaaccctgtccctactaaaaatacaaaaaattagccaggcgtggtggcaggcgcctgtaatcccagatactcaggaggctgaggtgggagactcacttgaacctgggaggtggaggttacggtgagccgagattacaccactgcactccagcctgggcaacacgagcaaaattctgtttcaaaaacaaacaaacaaacaaacaaacaaataaaagattaaaaataaaaaatattcatttttactataactttattcaaaattctggaaaataagatactcatgtctggcaaatgg

SEQ ID NO: 684439 - DNA, 680 bp, Homo sapiens
ctcctgcactgggtcctctaatgcagggttctgtggcttggggctaaaacagtgcttagatgtgcctcaaaagaatattccagaccagggctatccaatagaactttctgcagtgatagagatgccttctgtgtatgtgtgcactgtccaaaatggtagccagtagccacatggygctatggagcatttgaaatatggctagtgtgaccaaagaagggaactgtattttatttttcattttaattaactgaaatcctaacagctggctatcccataggacagcgcagatctatgatggtgtgtgcagacatttcctaagtgtttacggcagaggggtgaaaaagagggatcttgcattttcaaatctgtctgtggttcccaggaggggacaataccccaacccagggtgcagcccctgcacacgtgtgaggacatttttggcttatcatggttcttgagggatgccatgagtatttcctgagtagggccagggatgctcaatgatgggcactgaaagaacagaccacacagagaaccgccctagagaagcagtgcccaggacagagcctcagccacactcagaacagctgttatccaccatgtcattttgtcacggctcagggccaggaaagggacaaggggtgaatagaataagcatttgcacgccgagtgtctgtgta

SEQ ID NO: 684440 - DNA, 680 bp, Homo sapiens
ctcctgcactgggtcctctaatgcagggttctgtggcttggggctaaaacagtgcttagatgtgcctcaaaagaatattccagaccagggctatccaatagaactttctgcagtgatagagatgccttctgtgtatgtgtgcactgtccaaaatggtagccagtagccacatggtgctatggagcatttgaaatatggctagtgtgaccaaagaagggaactgtattttatttttcattttaattaactgaaatcctaacagctggctatcccataggacagcgcagatctatgatggtgtgtgcagacatttcctaagtgtttacggcagaggggtgaaaaagagggatcttgcattttcaaatctgtctgtggttcccaggaggggacaataccccaacccagggtgcagcccctgcacacgtgtgaggacatttttggcttatcatggttcttgagggatgccatgagtatttcctgagtagggccagggatgctcaatgatgggcastgaaagaacagaccacacagagaaccgccctagagaagcagtgcccaggacagagcctcagccacactcagaacagctgttatccaccatgtcattttgtcacggctcagggccaggaaagggacaaggggtgaatagaataagcatttgcacgccgagtgtctgtgta

SEQ ID NO: 684441 - DNA, 723 bp, Homo sapiens
tggcgaaatacatatgcgactgcaagaggaaaagatcttcatgttgacaatggacaaaggtctacactgcaggtaggatgctggctgcttctcttcctacataaatggcagagaatgctgtgacgaatagtattgctttttaatgggctctagtacttgcactgcggcgctctccatttgatattaggaagaaaacacctcctaaaagttatgcaaaagctgtgcaaatgactgtcaagacaaaccagccccatgttttactaaggtgcctctcmtgtttgtcgggcatagtacagcagcagtgtgggaagagagctatcttgttacagttctgtttctcagactgtctacccaatcttaccctgccaaactgcttacttctgacataacggggtattccctcttctgcattagaacccataggagactataggctcttttaagggacttcaaaaaatgctatgagttaaggatactatgaagctaatgaactattttctttcatataggtaatgctggactctagatataaaatagcttcatttcctaaatgagttggagaataaaacttcaacacataacagatatctcagtttttcaatctaaataaactgatctcagggcagatgtattaccctagtcctagcctatgagaacttggactgtgttattgaggagacagaaagatgttctgcatgtgagctctcttagtagatagtggtc

SEQ ID NO: 684442 - DNA, 626 bp, Homo sapiens
cacacacacacacagagtcccatggggacacacacagagacactcatataccacacagacacacacatcacacaggcacacatatactcaaacatacatagagacacatagacacacacacaaatacagacacagattctcacacacacatacacacacacccatcttaggaagagcagggatttatttcccagaggagaagctgccctggattgaggactttaagaaatccctctgccagaagataagaagaaaggaacagggagaactcaggagagagggtggcatctgtgggctcgcatctggaaggccgtcccttcccrggcagcacaaggggatccgcgactgagggaaataagaattcttagccttgtgcttccaatgctgagatcctccggactccatgcgaagccttgccattgaggtctgctgtcattggtcaggagtagactggccgggcaggagggaccctggaaaaagtaactcctcactcccagccattgtgtgagagagctgtcatgaaggtgagagacacagccatgattaacttcagaggagagagagacttatgaggctgggcacatggagaccctctaagccctctgaggatgaagatggtcatgatc

SEQ ID NO: 684443 - DNA, 630 bp, Homo sapiens
gcctcccaagtatctggattacaggcacatgycaccaagcccagctaacttttgtatttttagtagagacggggcttcatcatgtttgtcaggctagttttgaactcctgacctcaggtgatccgcctgtcttggcctcccaaaatgctgggaatacaggtgtgagccaccggacccagccactttcacaactcttaatccatggggaaaactgctgctgagggaaagtcctctgcattgcagtggatagggaatgctgccatctacaaggccccagtatgccaggtgtgggttggtgagaggctgccaaccagtaccacccagcaagggaactgtggacatcatagataatgcaccctgtcagattcccatgtgtatatttgactggaaaggaaagcagccaggaaagtaacatttcggtttaagaccaagaaaagtgtcttacattgccagcatcttcttttttgcagatgtctcctacagcaccctcaggaggagctaggagaacacagagtaagggtcagtgccctggtggtggcaactgtgtcacccagagagctttgcttggtgtggtacatggaggtagctgatcacagcatgcgccaacctgatgctgggccatgctccagg

SEQ ID NO: 684444 - DNA, 630 bp, Homo sapiens
gcctcccaagtatctggattacaggcacatgccaccaagcccagctaacttttgtatttttagtagagacggggcttcatcatgtttgtcaggctagttttgaactcctgacctcaggtgatccgcctgtcttggcctcccaaaatgctgggaatacaggtgtgagccaccggacccagccactttcacaactcttaatccatggggaaaactgctgctgagggaaagtcctctgcattgcagtggatagggaatgctgccatctacaaggccccagtatgccaggtgtgggttggtgagaggctgccaaccagtaccacccagcaagggaactgtggacatcatagataatgcacmctgtcagattcccatgtgtatatttgactggaaaggaaagcagccaggaaagtaacatttcggtttaagaccaagaaaagtgtcttacattgccagcatcttcttttttgcagatgtctcctacagcaccctcaggaggagctaggagaacacagagtaagggtcagtgccctggtggtggcaactgtgtcacccagagagctttgcttggtgtggtacatggaggtagctgatcacagcatgcgccaacctgatgctgggccatgctccagg

SEQ ID NO: 684445 - DNA, 630 bp, Homo sapiens
gcctcccaagtatctggattacaggcacatgccaccaagcccagctaacttttgtatttttagtagagacggggcttcatcatgtttgtcaggctagttttgaactcctgacctcaggtgatccgcctgtcttggcctcccaaaatgctgggaatacaggtgtgagccaccggacccagccactttcacaactcttaatccatggggaaaactgctgctgagggaaagtcctctgcattgcagtggatagggaatgctgccatctacaaggccccagtatgccaggtgtgggttggtgagaggctgccaaccagtaccacccagcaagggaactgtggacatcatagataatgcaccctgtcagattcccatgtgtatatttgactggaaaggaaagcagccaggaaagtaacatttcggtttaagaccaagaaaagtgtcttacattgccagcatcttcttttttgcagatgtctcctacagcaccctcaggaggagctaggagaacacagagtaagggtcagtgccctggtggtggcaactgtgtcacccagagagctttgcttggtgtggtacatggaggtagctgatcacagcatgygccaacctgatgctgggccatgctccagg

SEQ ID NO: 684446 - DNA, 657 bp, Homo sapiens
ccaaatccccctctgtgagaaacacccaagaatgatcaataaaaataaataaataaataaataaawagaaaaaacaaacaaacaaacaaacaaaaaaatacattcctggctgggcgctgtggctcatgcctgtaatcccccaagaggggtagtacatgcctataaatttcagctactcaggaggctgaggttgcagtgagccaagactgtatcattgcactccagcctgggcaacagagcgagactccgtctaaaaaagtataaaataaaataaaacaataatattaaaataaaataaaatacattcctggccaggcacagtggctcacacctgtaattcgagcactttgggaggccgaggcaggtgaattgcttgaggccaggagtttgagaccagcctggccaacatggcaaaaccccatctctaataaaaatacaaaaattagccaggtgtgttggcacacacctgtgatcctagctactcaggaggctaagacatgagaatcacttgaacccaggacagaggttgcagtgagccaagatcatgccgctgtactccagccggggcaacagagtgagtctctgtctcaaaatacatacatacatacataaaataaaatacattcccatgaaccagatcaaactttttttaaactt

SEQ ID NO: 684447 - DNA, 657 bp, Homo sapiens
ccaaatccccctctgtgagaaacacccaagaatgatcaataaaaataaataaataaataaataaaaaraaaaaacaaacaaacaaacaaacaaaaaaatacattcctggctgggcgctgtggctcatgcctgtaatcccccaagaggggtagtacatgcctataaatttcagctactcaggaggctgaggttgcagtgagccaagactgtatcattgcactccagcctgggcaacagagcgagactccgtctaaaaaagtataaaataaaataaaacaataatattaaaataaaataaaatacattcctggccaggcacagtggctcacacctgtaattcgagcactttgggaggccgaggcaggtgaattgcttgaggccaggagtttgagaccagcctggccaacatggcaaaaccccatctctaataaaaatacaaaaattagccaggtgtgttggcacacacctgtgatcctagctactcaggaggctaagacatgagaatcacttgaacccaggacagaggttgcagtgagccaagatcatgccgctgtactccagccggggcaacagagtgagtctctgtctcaaaatacatacatacatacataaaataaaatacattcccatgaaccagatcaaactttttttaaactt

SEQ ID NO: 684448 - DNA, 657 bp, Homo sapiens
ccaaatccccctctgtgagaaacacccaagaatgatcaataaaaataaataaataaataaataaaaagaaaraacaaacaaacaaacaaacaaaaaaatacattcctggctgggcgctgtggctcatgcctgtaatcccccaagaggggtagtacatgcctataaatttcagctactcaggaggctgaggttgcagtgagccaagactgtatcattgcactccagcctgggcaacagagcgagactccgtctaaaaaagtataaaataaaataaaacaataatattaaaataaaataaaatacattcctggccaggcacagtggctcacacctgtaattcgagcactttgggaggccgaggcaggtgaattgcttgaggccaggagtttgagaccagcctggccaacatggcaaaaccccatctctaataaaaatacaaaaattagccaggtgtgttggcacacacctgtgatcctagctactcaggaggctaagacatgagaatcacttgaacccaggacagaggttgcagtgagccaagatcatgccgctgtactccagccggggcaacagagtgagtctctgtctcaaaatacatacatacatacataaaataaaatacattcccatgaaccagatcaaactttttttaaactt

SEQ ID NO: 684449 - DNA, 657 bp, Homo sapiens
ccaaatccccctctgtgagaaacacccaagaatgatcaataaaaataaataaataaataaataaaaagaaaaaamaaacaaacaaacaaacaaaaaaatacattcctggctgggcgctgtggctcatgcctgtaatcccccaagaggggtagtacatgcctataaatttcagctactcaggaggctgaggttgcagtgagccaagactgtatcattgcactccagcctgggcaacagagcgagactccgtctaaaaaagtataaaataaaataaaacaataatattaaaataaaataaaatacattcctggccaggcacagtggctcacacctgtaattcgagcactttgggaggccgaggcaggtgaattgcttgaggccaggagtttgagaccagcctggccaacatggcaaaaccccatctctaataaaaatacaaaaattagccaggtgtgttggcacacacctgtgatcctagctactcaggaggctaagacatgagaatcacttgaacccaggacagaggttgcagtgagccaagatcatgccgctgtactccagccggggcaacagagtgagtctctgtctcaaaatacatacatacatacataaaataaaatacattcccatgaaccagatcaaactttttttaaactt

SEQ ID NO: 684450 - DNA, 1918 bp, Homo sapiens
gtggactgggggtagtggtgggattgtccagagagagaggctaaccagcttgcggtgtgagtcaccctctttccttgggctttccctgcatatcccctactcctgccatcacctgcctagtaagagcctccaccctagtggccctcactgctctcctgggctgacctccagagctgatactcaccctagcaacatcaagcaggaacacagagaaccagtggggctccctaagtgtggttaaatgcacccctacttttccccaggggagcacaggctctgcctcagccaatgggcaatgaccttgagcaagagctggctgcctaactcagtctcctaggaagtgaacaggaccagcctggagtctggtctcctgacagccaggccaggcccttcctactggtctgtgttgcctaaggtatctgctctggagctgaagattcaacaaagacagagaattcacacctcataccctaaacctgcagcccaccccaggggcagctctgcccaaagcaggatcagggagtggactgtgggatctcagtcaatccagcaggtgggttctaaatatcggaaatgaggagccaagagttccaaggaagtgcaactttgactgagcacttactatgtgaggatttttgaaggatcagtggtacttctatgatgtttgtgggagaaggcggggagctggaagaaggagaatgaggctttragagagcctgttgaagtgaggatgttatcatcccattttagaagtaggcatcgagggttagagaatttgggtgacttgttcaaggtcactcagcatatctgtggcaatgctgggatggtcatctgatccaaatctggctttctctactcacacctctgtctcacccctgctctaggccctggggaggaacagataggattcaatgatggcttcatggaggagaggacatttgggccaggcctggaaggtctggaagcagacacccaagcagaaaggaggagggcctggatggctgaggctgagctcaacatgtgggatacggactgtgatgccggcaggtgtggggctggtgaggtttgtcctgaagtcttggaagttggggagggcaggagccaaataagagtgtgaagtctggatccctggagatcctccaagggcaccggatgggtatgcttcagctttgtggctgaggtggcagcagggtggtcagagcggtccagcaggcaaccagggatggaggccccggaagaatgtggagcaccccagggactgctcacccctgggcccagctgtgaggtttgccaagaggagggatccctcatgctgggtgaggcctcaggtgaccctctgtgactccactctctcctcttccctgggcctggcctgtgcctttctcactgggctctgtggtcccctccagttctcccatgatcctccggtcagtaggggcctggccagggcacagacacccatgcaaaggtggcttctcacctcttggccctggcatggaccccactgctgccccagaatggtggtggctttcactggacacaccacttggtcacctcacaccaaggccaactcagacctccaagaattgtttgccttctcttcttaaggctctgtattagtttcctagggctgccatcacaaattgtcacaaagtgggtgcttaaatcaacagaaatgtcttatcccatggttctggtggctggaagtccaacattaaggtgttttcagggccacactccctccggaggctctagaggagaatccgcgcctggctgctcccaggttctggtgcctctggcattccttggattgcatccagtctccacctgcatcttcccatggcctcttttccatctctcatagggacatttgccattggatttagcgttcatctaggtaatctagggtgatctcatc

SEQ ID NO: 684451 - DNA, 1918 bp, Homo sapiens
gtggactgggggtagtggtgggattgtccagagagagaggctaaccagcttgcggtgtgagtcaccctctttccttgggctttccctgcatatcccctactcctgccatcacctgcctagtaagagcctccaccctagtggccctcactgctctcctgggctgacctccagagctgatactcaccctagcaacatcaagcaggaacacagagaaccagtggggctccctaagtgtggttaaatgcacccctacttttccccaggggagcacaggctctgcctcagccaatgggcaatgaccttgagcaagagctggctgcctaactcagtctcctaggaagtgaacaggaccagcctggagtctggtctcctgacagccaggccaggcccttcctactggtctgtgttgcctaaggtatctgctctggagctgaagattcaacaaagacagagaattcacacctcataccctaaacctgcagcccaccccaggggcagctctgcccaaagcaggatcagggagtggactgtgggatctcagtcaatccagcaggtgggttctaaatatcggaaatgaggagccaagagttccaaggaagtgcaactttgactgagcacttactatgtgaggatttttgaaggatcagtggtacttctatgatgtttgtgggagaaggcggggagctggaagaaggagaatgaggctttgagagagcctgttgaagtgaggatgttatcatcccattttagaagtaggcatcgagggttagagaatttgggtgacttgttcaaggtcactcagcatatctgtggcaatgctgggatggtcatctgatccaaatctggctttctctactcacacctctgtctcacccctgctctaggccctggggaggaacagataggattcaatgatggcttcatggaggagaggacatttgggccaggcctggaaggtctggaagcagacacccaagcagaaaggaggagggcctggatggctgaggctgagctcaacatgtgggatacggactgtgatgccggcaggtgtggggctggtgaggtttgtcctgaagtcttggaagttggggagggcaggagccaaataagagtgtgaagtctggatccctggagatcctccaagggcaccggatgggtatgcttcagctttgtggctgaggtggcagcagggtggtcagagcggtccagcaggcaaccagggatggaggccccggaagaatgtggagcaccccagggactgctcacccctgggcccagctgtgaggtttgccaagaggagggatccctcatgctgggtgaggcctcaggtgaccctctgtgactccactctctcctcttccctgggcctggcctgtgcctttctcactgggctctgtggtcccctccagttctcccatgatcctccggtcagtaggggcctggccagggcacagacacccatgcaaaggtggcttctcacctcttggccctggcatggaccccactgctgccccagaatggtggtggctttcactggacacaccacttggtcacctcacaccaaggccaactcagacctccaagaattgtttgccttctcttcttaaggctctgtattagtttcctagggctgccatcacaaattgtcacaaagtgggtgcttmaatcaacagaaatgtcttatcccatggttctggtggctggaagtccaacattaaggtgttttcagggccacactccctccggaggctctagaggagaatccgcgcctggctgctcccaggttctggtgcctctggcattccttggattgcatccagtctccacctgcatcttcccatggcctcttttccatctctcatagggacatttgccattggatttagcgttcatctaggtaatctagggtgatctcatc

SEQ ID NO: 684452 - DNA, 607 bp, Homo sapiens
ctgcaagcttagtaagtgagtggacagatgggtgccagcctacctaccctcacagggctgccgagaaggccagacgacactaaagtactgcatacrcatgaagccttcttgtgactaagccccgggaaaggaaggagttccagctcagaccctgcttctccctgggcttttgtttcccatctatgcagtaaggactggacttgataatatcagggctcttaacactctcagtggtgcccgtctgcaggcctagggtgttaacagagcaggagaaaaaaaagatagttgagccaagagagacctataaacagtgtggttgctaggccagcccagcctggagcagagggcaggccagtggccagcagagccaggaggggccacgcagctgcctctgagcacccaggtcagagctggctctcattcaccaggagtgagggtcagagtcaaggtcctggccaggctaatatgatgcaataattaaggacaataatgatcatttgaaaggaaccatcactttacagtttgtgttattttcatctgggcctcacgccaagcctgtgattattatcgctgaaaactaagactgagagaggcctggggctcagtc

SEQ ID NO: 684453 - DNA, 602 bp, Homo sapiens
gtgatgtctgaggatgaggtacctcaaactacctacccacaggcacaggctgcaccttcctcaggcacagtccctccagcaagacatgagcccgggtggccttggacacatgtggtgcttgggtgccaccttgtggctctgggcagtgcaggctgaacctggccagaccaagcagcctgaagctgctgggccagtcccataaccaggagaggccagagagccaccagtccacagatcctgtgcagggccccagcctagtcatggatagagaaggacagacttctccaaaagcttcattcaaagaccaaaaagcccctggaacccaataatttgtgtatgggtgggagaggggctagggttatacagctgggttgcttctgtgtccaccaggggcctgaggcctccyggctttctggggcgccgaaccctgagggcctctcgtctgcccctcccacacaacacacacgcaggagccgtatcatgcctcttgccagatttcccactgcctacagcctgaggtcattgggtctgcagcctagtttcttaaggctaggatgcccagcctgaaggcccatctagcaaatagtttccacctctccttc

SEQ ID NO: 684454 - DNA, 1326 bp, Homo sapiens
aatgtataaagaaatttatttggctcacagttctggaggctgggaagtccacaggcatggtgccggcatctgctcagcatctggtgagggccttcttgctgtgtcatcctgcagcagaagtggagggacaagagagcatgagagaggaagggaaaggggaccaaactcatcattgtatcaggaatccattcctgtgataatggcattaatccattcatgagggcagagtaatccattcattacataatcacctcttaaaggtcccacctctcaacattgtttcattggagattaagttgccaatacatgaactttgggggacacatgcraaccaaaccagaaattttctttggcccactttcctagaagagcagctaaggttggagaggccagaggatccccctgaggggacagagacccatttttaagactagatacagcaggataggaggtattagcctgagtgagtagggtgggcaagaggagaggagacctggcttgtcctggtcccatgcctgcctcatttggagaaaacaatctgcccccagtgccaaaagctcctccagctcccagcaatcagggtgaactcaggagataggagtcagggggccaactccagacctggttctgttaccaactggctatgagattgctcactccaaagctcagttccctcatctgtaaagtgggttggtaccacctacctcccaagtgttcgaaaaatcaagtcaattggggaacatgaaagagcttcccaaactacaatcatacaaaattcactagaaacatcacaagtttgatgcaggaagggaaaggccatgagaagccaccagtccaacatctaccttctatggaagaggaaataagagtccctggcccaagggcacttgccagaacctgtgtcagatctcaagcttcttgactcgcttctcctctctgcttcctttcggtgtacccaggctgaggccttgtacactcagtttcccaaggctgggtggttggggttggtgtacaaaaaggagttacagattagaagctcttagaagtcctgcccaaagttagagtggattatgcagcctgcaaaccaatggttagcagaggaaggggttgactgagagcatcagcttgcaactccaccccccacccccaacagaggggtgacagtacatttcatatggcctgaggaaaggctacccaacctacagcctctgcagctgctggatgatcccagggtcaaaacagaagccattggcacggattccagtgcccccagcagcagttactatgcatttcacaagccctgaggacagactcccctgccccaca

SEQ ID NO: 684455 - DNA, 2839 bp, Homo sapiens
  misc_feature 1965, 1969, 1970, 1971, 1972, 1973, 1974, 1975, 1976, 1977,1978, 1979, 1980, 1981, 1982, 1983, 1984, 1985, 1986, 1987,1988, 1989, 1990, 1991, 1992, 1993, 1994, 1995, 1996, 1997,1998, 1999, 2000, 2001, 2002, 2003, 2004, 2005, 2006: n = A,T,C or G
  misc_feature 2007, 2008, 2009, 2010, 2011, 2012, 2013, 2014, 2015, 2016,2017, 2018, 2019, 2020, 2021, 2022, 2023, 2024, 2025, 2026,2027, 2028, 2029, 2030, 2031, 2032, 2033, 2034, 2035, 2036,2037, 2038, 2039, 2040, 2041, 2042, 2043, 2044, 2045: n = A,T,C or G
  misc_feature 2046, 2047, 2048, 2049, 2050, 2051, 2052, 2053, 2054, 2055,2056, 2057, 2058, 2059, 2060, 2061, 2062, 2063, 2064, 2065,2066, 2067, 2068: n = A,T,C or G
ttatattgaatgtatagctttgagctataagtcttaatattcttgcttagactctagataacattttggactttaggtttagtttgtggataattgtcctgtttattagtataaagtttttctagtttccttttggtgtccttttctgaaattcaaatacgtatctcaacctactttttctgacgtctcatcatgtgaaaactcctcttttgtctatagtggctgaaagaccacaacatatgttgatgagagtatctgttgggatccacaaagaagacattgatgcagcaattgaaacatataatcttctttctgagaggtggtttactcatgcttcgcccactctcttcaatgctggtaccaaccgcccacaactttctaggtaggtgttttgagtagggaaatamgccttgacctgaagaaactgggcagttagttcatcacataaaaaataatttaatgaccttttagtagctgcctgctctgattaaatgagatttagattctggaaagatctctgactgtaatgtggtaaatgaattggagaaaaggcaaatgcttataacaaaaatgttctaaaattgattggattgtggtgatggttacacaagtctatgagtatattaaaagccattgagtagtacactttaaatggggaattatattatttgtgaattatattcctttttttttttgttgttgagacaaagtctcactctgtcacccaggctggagcgcagtgttgcgatcttggctcactgcaacctgtgcctccttggtacaagcaattctcttgcctcagcctcctgagtagctgggattacaggtgcccgcctccacacccagccaatttttgtatttttagtagagatggggtttcaccatgttggtcaggctggtcttaaactcctgacctcaggtgatccacccgccttggcctcccaaagtgctgggattgtaggcatgagccaccacgcttggtgtgaattatatttcaataaggttgttttaaaaagaaggtaagtgccaagaactagttaggggactcttatagcagtttatataagaaattgtggtagtctagattagggaggtgaaagtagaaattgacagaagcagatagatcaaaagatatttagggccaggcatggtggctcacatctgtaattccaacactttggaaggctgaggtgggaagatcacttgaggtcagaagttcaaggctgccgtgagccatgattatgccactgcactgtagcctgggcaacacagtgataccttgattaagataaaaatatatataaaagatatttaggctgtcaaattgacagaatatgggtcaagaatggttcttgcatttatggatacagtaagtaacaggattaatgatgatgccatttgttgagaaaaggaacactaacggtctggtaatacattaaaaaaaaaaatatgccattatcaagttggtttgtttcaggaattcaagaacatggtaacatcaaaaaatacattaatgtaattcattgcattaacattttatgcagtttaatgctctttcataataaacactttagcaaaattgatatagaaaataacttccttaatttggcaaaagatacccaataaaaacctagatgtatcgtctcttttttcagcatggtagtggaggcctgagccagcattgtaaaataagaaaaagaaaagattggaaatcaggggaacaaaactgtaatgatttgaaagaaatgatttttacataggaaactcaagagcatctgcagacacattattagaaataaaagatttcagcaaaatatctggatataggttcaatatacatcaaacagttatgtttttgtactttagctgttagaaaattaagtcttaacttacagccatgcattacttaacgatggggatatattatgagaaatgtgatgtaaggtgatttctttgtgcaaactnttannnnnnnnnnnnnnnnnnnnnnnnnnnnnnnnnnnnnnnnnnnnnnnnnnnnnnnnnnnnnnnnnnnnnnnnnnnnnnnnnnnnnnnnnnnnnnnnnnnnagagaccgcattcggggactctaaaggaccccctgtatacatttgtcaaaacccatcaaactgtacatttaaagtatatgcatattaaaataattatacctcctcaaattgattttacaagtaaaaaaaagtaattagaaactacacataaatgaaccatcttaagtgtatatgactaaatcacctttagttctgatttccagtactttcaattcatggagcataccttgttcccaccttgatccacatatcgagctgtgttgttatatactctcagcatcggtacaaggccattggaattgccattagtctaaaagagagaccatgatagaaatgacagagggcactcagcaaagaaaagaaaaaaatggccccattcttttatcaaaaaagatgcctaatttctaggtagcaatctatgaagttttacctgctctccatctctacttctgctttggaaaaatgcccaaataaaatcaacaaaatgttgaataaattacaattatgtactaagttacctcatggcatttctaatttataatgagatgtaacaattacaggccaaagggatccaaaatcaaggtagctaaatttaaactctacatcttctaaaggtcgttatataaagatacactttgggtagagtaaaaaagaatataaacactactacaatgcctttttcccaaaagaaatcaaggcaatttacaataagaattatatgcgatagctatatcagggcaataaataaggtaaaaggagattctcagcaat

SEQ ID NO: 684456 - DNA, 1371 bp, Homo sapiens
cctgagaggaagaggaagtccccgagtgggggatcccggggccagccacagacaccctgtgcagcttcctccttccgggtgcaggcgggcctgggcagtctgagtcctacctcagcccccacctcacctccctgcatcctcctagcatctctgcagggctagcccagaggttggcggcggaaggcccacagctcccctggctccatgggcaatgaccgaacagcccttcacctctctgggccttgttttctcaaactgaaactggagaggatgaccccagcctgggaccttcgagggcctcaaaagggctctgggccttgcgtggtgagtttggtcacccacacacccatcttcccaaatgccaggcttcactcactacagcgttctttcttttcccttcagtatttctcaaagttacccaaaccacatcccctgggaagcctggttcagatgctcctccaagaagcctcccttgaaccccagatagaagggagcatcattcctgtgacctcaccccaccccatcctctatacactcgagactgttgtagccatactaggtgctatgaaggggaggggatttgacctcggcaggatgatcagggaaggcatcctggagtacgcatgagatcagggatggctgggttaacagggcaaagtggaaaggaagggagggtattccaggcagcaggaacagaatgtgcaactgctctgargcagctggaagcatggtcagcaaaaagattggaaattatgcatgttttatctattccaagatgcttaatgttcacgtttcactttttgttttgttttgtttttaagagacagagtctgaatctgtgacctagtctggagtgcagttgcaagatcacaactcgctgcaacttcaacctcctgggcttaagcaattctcctacttcagccttctgagtaactgggactacgggtgtgtgccaccacacctggctaattattttgcttgttttttgtacagacagagtcttgctgtgttgcccgggctggtctcgaactcctgggctcaagtgatcctcccgccttggcctcctgaagggctgagatgacggcatgagctgcctcacgcagcccccattctacacctctgaagtgagtttacatggtacagttgctgtctggctagctgccgtcccaacatcactgtcaggacccacacctgaaaagcaccagcatcaaatccttcagaagagtgtcagcagcttggaagaaatcctagaggcaagcagaaccctttttagccctgggactcaaatggtgggaaaccccaggggaagggaaccaggcttgtcagtgacactccctttttttttttttttttttttttggtgagacggag

SEQ ID NO: 684457 - DNA, 1269 bp, Homo sapiens
ttaggcgtgtttcacagaatttaagctgcatgtggttttcattgagttctctagattttttatattgactgtatgtttgtatattcattgacatattttaaaaagataccctgtgttgatmcccccccacctctccccccccgatttctgcacttgactgtgagcttttaaagacagaaactgttaaatttacaagaaaaaaacaaccccatcaaaaagtgggcaaaggatatgaacagacacttctcaaaagaagacatttatgcagccaacatgcatatgaaaaaaatgctcatcatcactggtcattagagaaatgcaaatcaaaaccacagtgaaataaccatctcacaccagttagaatggcagtcattaaaaagtcaagaaacaacagaatgctggagaggatgcggagaaataggaacgcttttacattgttggtgggagggtgaattagttcaaccattgtggaagacagagtggcaattcctcaaggatctagaactagaaataccatttgacctagcaatcctgttactgagtatgtacccaaaggattataaatcattctgctgtaaagacacatgcacacgtatgtttactgcgacactactcacaatagcaaagaattggaacccacccagatgtccatcaataatagactggataaagaaaatgtggcacatagacaccatggaatactatgcagccttaaaaaaggttgggttcatgtcctttgcagggacatggatgaagctggaaaccattctcagcaaactatcctaagaacagaaaaccaaacaccacatgttctcactcataagtggaagttgaacaatgagaacacatggacatagggaggggagcatcacacaccagggcctgtcggggggtggggggctaggggagggatagtattaggagaaatacctaatgtaggtgacgagttgataggtgcagcaaaccatcgtagcatgtatatacctatgtaacaaaactgcacgttctgcacatgtacctcagaacttaaagtataataaaaattttaaaaattaacaaaaataaaaaaataaataaagtaggaactgttttctgctcattttttttgtagtacctggcaaaatacctggcacatggaagacccttggtaaatacatattgaattaatattgaatgagcaattatactaagatgggatggcagcctagatgctatccttctgctcccattttcttttcaagcatgcatctccctatataatcttcccta

SEQ ID NO: 684458 - DNA, 1269 bp, Homo sapiens
ttaggcgtgtttcacagaatttaagctgcatgtggttttcattgagttctctagattttttatattgactgtatgtttgtatattcattgacatattttaaaaagataccctgtgttgatccccccccacctctccccccccgatttctgcacttgactgtgagcttttaaagayagaaactgttaaatttacaagaaaaaaacaaccccatcaaaaagtgggcaaaggatatgaacagacacttctcaaaagaagacatttatgcagccaacatgcatatgaaaaaaatgctcatcatcactggtcattagagaaatgcaaatcaaaaccacagtgaaataaccatctcacaccagttagaatggcagtcattaaaaagtcaagaaacaacagaatgctggagaggatgcggagaaataggaacgcttttacattgttggtgggagggtgaattagttcaaccattgtggaagacagagtggcaattcctcaaggatctagaactagaaataccatttgacctagcaatcctgttactgagtatgtacccaaaggattataaatcattctgctgtaaagacacatgcacacgtatgtttactgcgacactactcacaatagcaaagaattggaacccacccagatgtccatcaataatagactggataaagaaaatgtggcacatagacaccatggaatactatgcagccttaaaaaaggttgggttcatgtcctttgcagggacatggatgaagctggaaaccattctcagcaaactatcctaagaacagaaaaccaaacaccacatgttctcactcataagtggaagttgaacaatgagaacacatggacatagggaggggagcatcacacaccagggcctgtcggggggtggggggctaggggagggatagtattaggagaaatacctaatgtaggtgacgagttgataggtgcagcaaaccatcgtagcatgtatatacctatgtaacaaaactgcacgttctgcacatgtacctcagaacttaaagtataataaaaattttaaaaattaacaaaaataaaaaaataaataaagtaggaactgttttctgctcattttttttgtagtacctggcaaaatacctggcacatggaagacccttggtaaatacatattgaattaatattgaatgagcaattatactaagatgggatggcagcctagatgctatccttctgctcccattttcttttcaagcatgcatctccctatataatcttcccta

SEQ ID NO: 684459 - DNA, 1269 bp, Homo sapiens
ttaggcgtgtttcacagaatttaagctgcatgtggttttcattgagttctctagattttttatattgactgtatgtttgtatattcattgacatattttaaaaagataccctgtgttgatccccccccacctctccccccccgatttctgcacttgactgtgagcttttaaagacagaaactgttaaatttacaagaaaaaaacaaccccatcaaaaagtgggcaaaggatatgaacagacacttctcaaaagaagacatttatgcagccaacatgcatatgaaaaaaatgctcatcatcactggtcattagagaaatgcaaatcaaaaccacagtgaaataaccatctcacaccagttagaatggcagtcattaaaaagtcaagaaacaacagaatgctggagaggatgcggagaaataggaaygcttttacattgttggtgggagggtgaattagttcaaccattgtggaagacagagtggcaattcctcaaggatctagaactagaaataccatttgacctagcaatcctgttactgagtatgtacccaaaggattataaatcattctgctgtaaagacacatgcacacgtatgtttactgcgacactactcacaatagcaaagaattggaacccacccagatgtccatcaataatagactggataaagaaaatgtggcacatagacaccatggaatactatgcagccttaaaaaaggttgggttcatgtcctttgcagggacatggatgaagctggaaaccattctcagcaaactatcctaagaacagaaaaccaaacaccacatgttctcactcataagtggaagttgaacaatgagaacacatggacatagggaggggagcatcacacaccagggcctgtcggggggtggggggctaggggagggatagtattaggagaaatacctaatgtaggtgacgagttgataggtgcagcaaaccatcgtagcatgtatatacctatgtaacaaaactgcacgttctgcacatgtacctcagaacttaaagtataataaaaattttaaaaattaacaaaaataaaaaaataaataaagtaggaactgttttctgctcattttttttgtagtacctggcaaaatacctggcacatggaagacccttggtaaatacatattgaattaatattgaatgagcaattatactaagatgggatggcagcctagatgctatccttctgctcccattttcttttcaagcatgcatctccctatataatcttcccta

SEQ ID NO: 684460 - DNA, 1269 bp, Homo sapiens
ttaggcgtgtttcacagaatttaagctgcatgtggttttcattgagttctctagattttttatattgactgtatgtttgtatattcattgacatattttaaaaagataccctgtgttgatccccccccacctctccccccccgatttctgcacttgactgtgagcttttaaagacagaaactgttaaatttacaagaaaaaaacaaccccatcaaaaagtgggcaaaggatatgaacagacacttctcaaaagaagacatttatgcagccaacatgcatatgaaaaaaatgctcatcatcactggtcattagagaaatgcaaatcaaaaccacagtgaaataaccatctcacaccagttagaatggcagtcattaaaaagtcaagaaacaacagaatgctggagaggatgcggagaaataggaacgcttttacattgttggtgggagggtgaattagttcaaccattgtggaagacagagtggcaattcctcaaggatctagaactagaaataccatttgacctagcaatcctgttactgagtatgtacccaaaggattataaatcattctgctgtaaagacacatgcacacgtatgtttactgcgacactactcacaatagcaaagaattggaacccacccagatgtccatcaataatagactggataaagaaaatgtggcacatagacaccatggaatactatgcagccttaaaaaaggttgggttcatgtcctttgcagggacatggatgaagctggaaaccattctcagcaaactatcctaagaacagaaaaccaaacaccacatgttctcactcataagtggaagttgaacaatgagaacacatggacatagggaggggagcatcacacaccagggcctgtcggggggtggggggctaggggagggatagtattaggagaaatacctaatgtaggtgacgagttgataggtgcagcaaaccatcgtagcatgtatatamctatgtaacaaaactgcacgttctgcacatgtacctcagaacttaaagtataataaaaattttaaaaattaacaaaaataaaaaaataaataaagtaggaactgttttctgctcattttttttgtagtacctggcaaaatacctggcacatggaagacccttggtaaatacatattgaattaatattgaatgagcaattatactaagatgggatggcagcctagatgctatccttctgctcccattttcttttcaagcatgcatctccctatataatcttcccta

SEQ ID NO: 684461 - DNA, 3063 bp, Homo sapiens
attttctttaatgcacttataatttaaagagctgtgtcagagtcagatttacatgattttgctttccctgctcttacctcttctgtttattcattttgcttctgtcttctgtttcttgagccttacaaattttattttccccaaagatgtgtttgctaactgacttattaaaggttgcattgtccttgtctggtagtgtattagtccatttcacactgctgataaagacatacctgagactgggtaatttataccagaaagaagtttaatggacttacagtttcacatggctggggaggcctcacaatcatggcggaaggcaaggaggagcaagtcatatcttacatggatggcggcaggcaaagagggagcttgtgcaaggaaactcccattttaaaaaccatcagatcttgtgagactcagtcactatcacgagaatggtgcaggaaagacccacccccataattcagtcacctcctgctgggttccttccacaacacatggaaattgtgggagttacaattcaaggtgagatttgggtggggacatagccaaaccatatcaggtggtaagtgccctctttactctcagttcttgttcttttgctttcaagagtttagataaaggaaagaccagatgtgttttagaaatcaggggttcaaactttatcatgtgtagaatgtgacatttagttcatggctggtctttttcatactttgattcttgaaattagagactacatctttctgtgattcagagtaacttatgtcattcaaatttgatgtctaaatacagcttataactgctttcctctgaaataggagattttgcccttgatagaattttttaaatagtgaaacaaaacatctctaacagaactctaagttaattttttttggtttttttgagactgagtctcactgtgtcacccaggctggagtgaagtggtgtgaactcagctcactgcaatttctgtctcccgggttcaagcgattctcctgtctcagcctcctgagtagctgggattacaggcgtgcgccaccgcgcccagctaatttttcatatttttagtagagatgcggttttgccatgttggccaggctggtcttgaactcctgatctcaagtgatctgcccacctccgtctcccaaagtgctgggattacaggcgtgagccactgcacccagccaagtaaaatttttgttctttatttgtatttaaaatccaactacagttacttttttctagagagaaattcttaaggctctagtgttgttgacacactccaaaattatgcattaagtatgtgtttatgaaaatgatctacttctggttctttatagtattggaaatgaaatactgttgctatgatttgagtgattgtacaactttactgaagcctaaaacatatattcttgccgactacttcgcatttatttctgatgcatgtgggaaaccatccctcctccataaattaaaaagtaattatttatgaaatatttcttggctggaaattttcttctgtttgtttagaattttaatttttggagcaagcatgaagtatttctgtgaaatcatttaaaatcatattttattaaattaaaatgggttactaaatttaaaatattcatttttatgtcagcatataattttaacattcttattaaatccttgacaacctaagctgtacaaaagttaattcagtttaatgtggttgtatgtgtatatttatactcctgtaatttgcattgatatatgactagctactgtttcagtttaatgtggtcrtatgtgtatatctgtactgctgtaatttgcattgatatatgactagctactgtgtctcagtaaattaaacattttcatataaaataagtatcgttatatctgtttacaattattataactaaatagtatatgtgtacattcttttcctgggtaaaattaaacatttcaactagatcacccattttcctgatttgactttctttaacatttaaatagagttgttaagcatttgaaggatctctagtagagggcaaaggaaatatatgtgccaacagaaccatttttgtttttttctagttagttgaactcttaatatgatggaggttggttttgtgatattaaatttatagcttttaaaactcgtgtcattggtattttaaagtaatttgaaattttgagaccatacaattagatccaggtgtattactaattttatgaaattttgttgtgatcattaatttgccgttgtagatccatgttttctttgtgcatagaagtttattttagatcttgaagtcatgacattttagttaaaactgaaggaatactttttctctttaatttgcaaataatgtgaaagcaaaaattgttttaaaattttctattttaattagtatggctactgaataccgagaaaaatggaggattataaaaatgatgttaagttgattgtgatttactagtaactttaatgtgcattgataatatgaaaactactcgatatgtagtttggttaatttagtaataattcaacaaatgattccttcagaatagtggaagactcaagattcaagatttgtaggatttccttttttgctatttttatctagtgtatttttaagtggcctcaaataaaggcagtgaagaaatgttttatttttcctcatacatgtgaaatacatctggacgaataaatccacatctggttcatggatttcctccatggagatgatccaaattcagtgtcaagattagagcttgtactcatgggtttgcagaatcttgtgtggaatttgaaatattttgtttggaagtagttgagaaacaattgattcacatgtttgtgttaagttctaattttagatatatttctccctcatgaaaaataaaaatgttttgtgcttcataatgtaatcaaggtatgtgaaaacactgtttacatttaacaagatgttttaggtgaccattctcaaatattgttttatgaaagagagatcaattaaactgttaaacttactaggtaatgatcattggtaaccataatccttactagaa

SEQ ID NO: 684462 - DNA, 3063 bp, Homo sapiens
attttctttaatgcacttataatttaaagagctgtgtcagagtcagatttacatgattttgctttccctgctcttacctcttctgtttattcattttgcttctgtcttctgtttcttgagccttacaaattttattttccccaaagatgtgtttgctaactgacttattaaaggttgcattgtccttgtctggtagtgtattagtccatttcacactgctgataaagacatacctgagactgggtaatttataccagaaagaagtttaatggacttacagtttcacatggctggggaggcctcacaatcatggcggaaggcaaggaggagcaagtcatatcttacatggatggcggcaggcaaagagggagcttgtgcaaggaaactcccattttaaaaaccatcagatcttgtgagactcagtcactatcacgagaatggtgcaggaaagacccacccccataattcagtcacctcctgctgggttccttccacaacacatggaaattgtgggagttacaattcaaggtgagatttgggtggggacatagccaaaccatatcaggtggtaagtgccctctttactctcagttcttgttcttttgctttcaagagtttagataaaggaaagaccagatgtgttttagaaatcaggggttcaaactttatcatgtgtagaatgtgacatttagttcatggctggtctttttcatactttgattcttgaaattagagactacatctttctgtgattcagagtaacttatgtcattcaaatttgatgtctaaatacagcttataactgctttcctctgaaataggagattttgcccttgatagaattttttaaatagtgaaacaaaacatctctaacagaactctaagttaattttttttggtttttttgagactgagtctcactgtgtcacccaggctggagtgaagtggtgtgaactcagctcactgcaatttctgtctcccgggttcaagcgattctcctgtctcagcctcctgagtagctgggattacaggcgtgcgccaccgcgcccagctaatttttcatatttttagtagagatgcggttttgccatgttggccaggctggtcttgaactcctgatctcaagtgatctgcccacctccgtctcccaaagtgctgggattacaggcgtgagccactgcacccagccaagtaaaatttttgttctttatttgtatttaaaatccaactacagttacttttttctagagagaaattcttaaggctctagtgttgttgacacactccaaaattatgcattaagtatgtgtttatgaaaatgatctacttctggttctttatagtattggaaatgaaatactgttgctatgatttgagtgattgtacaactttactgaagcctaaaacatatattcttgccgactacttcgcatttatttctgatgcatgtgggaaaccatccctcctccataaattaaaaagtaattatttatgaaatatttcttggctggaaattttcttctgtttgtttagaattttaatttttggagcaagcatgaagtatttctgtgaaatcatttaaaatcatattttattaaattaaaatgggttactaaatttaaaatattcatttttatgtcagcatataattttaacattcttattaaatccttgacaacctaagctgtacaaaagttaattcagtttaatgtggttgtatgtgtatatttatactcctgtaatttgcattgatatatgactagctactgtttcagtttaatgtggtcatatgtgtatatctgtactgctgtaatttgcattgatatatgactagctactgtgtctcagtaaattaaacattttcatataaaataagtatcgttatatctgtttacaattattataactaaatagtatatgtgtacattcttttcctgggtaaaattaaacatttcaactagatcacccattttcctgatttgactttctttaacatttaaatagagttgttaagcatttgaaggatctctagtagagggcaaaggaaatatatgtgccaacagaaccatttttgtttttttctagttagttgaactcttaatatgatggaggttggttttgtgatattaaatttatagcttttaaaactcgtgtcattggtattttaaagtaatttgaaattttgagaccatacaattagatccaggtgtattactaattttatgaaattttgttgtgatcattaatttgccgttgtagatccatgttttctttgtgcatagaagtttattttagatcttgaagtcatgacattttagttaaaactgaaggaatactttttctctttaatttgcaaataatgtgaaagcaaaaattgttttaaaattttctattttaattagtatggctactgaataccgagaaaaatggaggattataaaaatgatgttaagttgattgtgatttactagtaactttaatgtgcattgataatatgaaaactactcgatatgtagtttggttaatttagtaataattcaacaaatgattccttcagaatagtggaagactcaagattcaagatttgtaggatttccttttttgctatttttatctagtgtatttttaagtggcctcaaataaaggcagtgaagaaatgttttatttttcctcatacatgtgaaatacatctggacgaataaatccacatctggttcatggatttcctccatggagatgatccaaattcagtgtcaagattagagcttgtactcatgggtttgcagaatcttgtgtggaatttgaaatattttgtttggaagtagttgagaaacaattgattcacatgtttgtgttaagttctaattttagatatatttctccctcatgaaaaataaaaatgttttgtgcttcataatrtaatcaaggtatgtgaaaacactgtttacatttaacaagatgttttaggtgaccattctcaaatattgttttatgaaagagagatcaattaaactgttaaacttactaggtaatgatcattggtaaccataatccttactagaa

SEQ ID NO: 684463 - DNA, 1628 bp, Homo sapiens
aaaatgtgtgtgtgtgtgtgcgtgcacacgtgtacatatgtgcttgcgtataggattggaatctggttgaaaagtatatgcatcttcaactttggagaataatttgacattatttaataaaatataccaatttaaacattactgtcagagtgtgagagttttacattcctcaaacatttctagtgtttcatttcttagcattatctaaaatgggattcataaggttctagatggttagcagctgttagggtcagcaatttctccggccaactgtaggaggacttggtatgtgtagaaaacatttattctagcaaatgaacaggcttctgatactgtgtggctcaggatctatgactaacttattctggtataaagccacccagaattcatttgaccagtttacttaaaaactagcaaatttttaggccaggtgcggtggctcatgcctgtaatctcagcactttgggaggccgaggcaggcggatcacgaggtcaggagatcgagaccatcctggctaacactgtgaaaccctgtctctactaaaaatacaaaaaattagccgggtgtggtggcacacacctgtagtcccagctactcgggaggctgaggtgggagaatcttgaacccgggaggtggaggttgcagtgagctgagatcacgccactgcactccagcctgggcaacagagtgagactctgtctcaaaaaaaaaaaaaaaaaaaaaggaaaaaaacaaaaagaaaaaaagaaaaatagcaaaatttttttatctctgagtcacataagcattggtaatagtcttcattacctatatattactcgattaagctctatgtgagcaagtaaagtgagtatctggcaattgtgacttaaaataaatattattaagagattaataaaataagcataggataatctgtaataaaatgtgaatataggaccaggtgtggtagctcacaaccgtaatcttagcactttgggagactgaggcaggcggaccacttgagcccaggggtttgagaccagcctgggcaacatggggaaactccatatctacaaaaatacgaaaactagccgattgtgttggtgtgcctctgaggtgggaggatcgcttaagcttgggaggtcgagactgcagtgagtggtgattgtgccactgtgctccagcctgggtgacagggcagagtgtctcaaawaaaacaagaaaaaaaagtaaacgtataaatagataaatttatatggcttaagattttgatgttaaagacatctaggataatttaatgcaaagtaaatattaagtgtagtataatgaatgttaggtgaatatgcagaattaataaagttacattagttatccatagcttaaagacagagatggtacggattcattggattaagaagcaagtgtgtgagccagaagagtgcttatcaatctgtgacctttgcttggactccaggcattggaataagttaccaaagttgtttaatctaatttagcattgagaaagaacttatctaaaaaagattatttttgttttcaaaaattttttgttaaaaacatgttttgtatggcgttcctaaattactaaaggtgcatttaggaacaacttattttggggtcatttatt

SEQ ID NO: 684464 - DNA, 1628 bp, Homo sapiens
aaaatgtgtgtgtgtgtgtgcgtgcacacgtgtacatatgtgcttgcgtataggattggaatctggttgaaaagtatatgcatcttcaactttggagaataatttgacattatttaataaaatataccaatttaaacattactgtcagagtgtgagagttttacattcctcaaacatttctagtgtttcatttcttagcattatctaaaatgggattcataaggttctagatggttagcagctgttagggtcagcaatttctccggccaactgtaggaggacttggtatgtgtagaaaacatttattctagcaaatgaacaggcttctgatactgtgtggctcaggatctatgactaacttattctggtataaagccacccagaattcatttgaccagtttacttaaaaactagcaaatttttaggccaggtgcggtggctcatgcctgtaatctcagcactttgggaggccgaggcaggcggatcacgaggtcaggagatcgagaccatcctggctaacactgtgaaaccctgtctctactaaaaatacaaaaaattagccgggtgtggtggcacacacctgtagtcccagctactcgggaggctgaggtgggagaatcttgaacccgggaggtggaggttgcagtgagctgagatcacgccactgcactccagcctgggcaacagagtgagactctgtctcaaaaaaaaaaaaaaaaaaaaaggaaaaaaacaaaaagaaaaaaagaaaaatagcaaaatttttttatctctgagtcacataagcattggtaatagtcttcattacctatatattactcgattaagctctatgtgagcaagtaaagtgagtatctggcaattgtgacttaaaataaatattattaagagattaataaaataagcataggataatctgtaataaaatgtgaatataggaccaggtgtggtagctcacaaccgtaatcttagcactttgggagactgaggcaggcggaccacttgagcccaggggtttgagaccagcctgggcaacatggggaaactccatatctacaaaaatacgaaaactagccgattgtgttggtgtgcctctgaggtgggaggatcgcttaagcttgggaggtcgagactgcagtgagtggtgattgtgccactgtgctccagcctgggtgacagggcagagtgtctcaaaaaaaacaagaaaaaaaagtaaacgtataaatagataaatttatatggcttaagattttgatgttaaagacatctaggataatttaatgcaaagtaaatattaagtgtagtataatgaatgttaggtgaatatgcagaattaataaagttacattagttatccatagcttaaagacagagatggtacrgattcattggattaagaagcaagtgtgtgagccagaagagtgcttatcaatctgtgacctttgcttggactccaggcattggaataagttaccaaagttgtttaatctaatttagcattgagaaagaacttatctaaaaaagattatttttgttttcaaaaattttttgttaaaaacatgttttgtatggcgttcctaaattactaaaggtgcatttaggaacaacttattttggggtcatttatt

SEQ ID NO: 684465 - DNA, 670 bp, Homo sapiens
tgtggtcggtgtgggctcgggtgaaatccatgtgtttcaggaggtggatgtcagaacactgtatctgatctgggctgcagaaccgtataaatttctccctatcttagattaactttcctacccatttgggaagactagactgtaggaaaggactttttaaaattgcttctttcccagattagcagtagtttagccgttggtgattggcaactaaggataggcctcatgttctattcttaacattgaagatgaggtctagtcatttaaaacctttccttttctctttatattttagttagaccttgtgcctttcaacatttggtgtcagaggtcataaaatggcctagtggcaactaggtaccaatgttggttgcttcatttcataaggagatgaaggtgttttttttttgttttttttttttaatagcttagttctggaaaatggtttgtgggctatagtatttggattaatgtatagaaatgattattatatatttctgcaggatacatggctgaataagggaaattattataaaaygctgataccaacatataagtccaattccataagtttaagtaaagtgagttgtatccatgcttcttcccccataaccccatctgcaacacagaatttttgaggctccttggagtgataggcttttagaaaagc

SEQ ID NO: 684466 - DNA, 2666 bp, Homo sapiens
aggtcacaaatcccaataaatggaagtgatgataatctgctgtggatgtgtaggctttatctcctatccttgagaaaacacatttgaagaaacagaaattaggagtgtagaaagtttaatatcaataaaaatgataaatagcaggggtttttgtaataatgccaacaatgtcaatggcaaaagaatgagggttttagattaaatggtctccagctgctttcaactttaccagtacatgatttttaatgagttctacaggtgataagtgctagagaaattcagaggatggagagaaaattgtcagcctgaatagtcagcggtttcttcatggaggaggcagtcttgatctgggtcttaaaaatgaacaggcttcgcagagttaagaggaaagaaggcatttcaggcaggcataatagcactaaacagaaatacaacggtgtattagagcaaaacatattcttggacagtagatacaccaatttaattctaagtttagtgtttgggaaggaaaatggcaggaactaatcatagaaccccacatagattgtgcaggggctaaaaagccagactaatgagtttgaactctttttttttttttttttttttttgagacggagtctcactctgttgcccaggctggagtgcagtggtgcgatcttggctcactgcaagctccgcctcccaggttgacgccattctcttgcctcagcctcccgagtagctgggactacaggcacctgcaaccacgcctggctaattttttgtatttttagtagagacggggtttttcagtagagacggggtttcactgtgttagccaggatggtctcgatctcctgacctcgtgatcygcccgccttggcctcccaaagtgctgggattacaggcgtgagccaccgcgccgggcctgaaatgattcttgaagaaaatgggggtgcttttgaaggtttacgaatctgagtgacaaaagcaaacaatttcttccatgccccaggttttcctcagcaccaggagaggggcttggatcctgaatcgtgtaggggactacggatatcctgctgatgtgttgttctcttctcgacttacacattttatatggaagatctgggccaatcattagcaacaaatatttggaaaaaaagataaaccaaagtttgaccatgaaatgtttggcctgaagcctaaacacaggtatgttcccaggatgggagtgcagggatagtggccaaagcacaagaataaggactcttcacactggctaatagtaaagccacctctacccatacattaagaaaacccacagtggctgggcatggtggctcacgcctgtaatcccagcactttgggaggcggaggcgggtggatcacctgagctcaggagtttgagaccatcctggccaacacggtgaaaccccatctctactaaaaacacaaaattagccaggtgtggtggcacctgtctgtagtcccagctattcaggaggctgaggcaggagaatcacctgagccctggaggcagaggttgcagtgagctgagattgcaccactgcactccagcctgggcaacagactctgtctcaaaaagaaaaaaaaaaaaaaagaaaagaaaaagaaaagaaagcctatagactcatagaatctgaaatcagatttctaacttgtacccacagatgtccaagatctattggtctgtgggtttttaatctagaattctctttggcagtaacccttttctcattcccccaggtatcagttctttttgcatgatacccaacaacaaaatgatagctgaggacagtgcgtcatttactcattgagtacctgttatgagccaggcatcatacatgggcatgaaatacagagagaagacataatagtaatagtaatagaaataacactcacctttctgaggactttctataagataagcacagtgctaaatgagttacatgcagtatctcacttaatcctgacaatagccctataagttggtactatttttgtttcacagtgaggaggtctatgcaaacctaccccaaaggctgaggaagctgagaggctgaagaaagaagctgacagattcagtttcttagaaacatttcatagggacttatgaacagaagccatgtctgtctcaggcagtggtgagacaagatggtagatccccataccattatctcctgacccagggatgatataccacaggggaggggcacacatacttcagagcgaatgggtaggagtttgccctaagggtgggatttacagtaagtacatactattaaacaacagattaactggaaatctcagaggtattcccgaaaccagggttgatcagaagtcaatatggtagattaacttctaagatggagttgctttggcctccacaatttttgatctacattttacaaatataaaaactgagatgtagagaaactaagtaattttcccgagggcaacagaaataataaatggcagactcaaaaaatagatcttaccttaaatactctaatgagaagaaagaggacagattataatgaagaaatacatacagtgttatgaaagtacaaaggatggggtcctcagagaaccagggagggaaaacatttctagaggctgattttaaatttattttccctccaactttttatttttgaaaatgttca

SEQ ID NO: 684467 - DNA, 620 bp, Homo sapiens
tattccacaattttatggagtgacaccttaggactggatgtggccaaaatcttctacatggcatagtccctagttataggggcatacaactaattgtttaagcttagcattgttcatactggcttaaatactattaagccttagtctagccctgtccttggtgtataattcctacaactggaactgtttgtgcatcttacttaaatttatcagttaatattaggtattatgagttccccttggccttaacccctactcttatcaaagaaacatgtttagaaaatgaagcttatcttccacaggactttaggcataaaatgtgattaagatttattttggctgggcrtggtggctcatgcctgtaatcccagcaccttgggatgcagagacgggtggatcatctgaggtcaggagttcgagaccagcctgaccaatatggtgaaacctcgtctctactaaaactacaaaaaaaaattatttgggtttggtaggatatcagtgatggaagatgaaaggaatgaaatgaagtgagaagggaagtttagagaaaaaagaataaaaagaaacgaacaaagcatccaaggaatatgggactatgtgaaaagaccaaatctacgtcg

SEQ ID NO: 684468 - DNA, 1315 bp, Homo sapiens
tctcgcccctcctggagcatcaggcctctttcggtttggcctgtagagaagccttaggggccacttcgttcggcatcgtagggggcaggtgggaggcgcgcggggaagaggagggtgtgactgtggttcccgacccccggcgcccaacctccaccccggtgcgcgcgcccttcccggctcctgctggtcccactcgccccgaggtaggtctccggtcagcctaagctcccaagaagcccaggcccaaaaggacaggtagggaaaacaagctgctcatttcggtcctgtccggaagggactcctttctgaccggaaagaaaggcggcgagtcctgtcccgttgggttagcggaagagagatcaaagggaagagaagaaaaatcctgtgaggtttcaggatctaaagttaccatgaagtcgacctcacctcctctgaaggtcctcccggtcctccagtggctggagaaggtgagtcgagtccctgtctccagtttgcaaagtggacaaagcctacgacaatgggccccgaatcagctactaggcatccctgtctttccagttggtggtactcgagcttccctacccaggatttctgtggattccaagggtacaactgaacaccttttgtcgttccaactgctcttatttgaattaagggctgatctgttgagaagcatatattcggtaagactatagcaactgttgttgagactgtcccattcttcctcctcctccctcttcctataatgtacaatgaaaattaatccccacgacgggcctgttatttcaatgtcctgttggcagaacctaaggggagtctaggaggttccaggatraatatttgaagtatgacacagtcatttttatttacacatgcattccaaaaacacattggacaaatgcatccagttcacctgtgccacacttacaaagatatgaaaagagggtctacacacaaacaagcgaaagacgtaatcgaatggcttttaaatatctgctgtttctactgaaagtcttcttctctggctacacctaccagtgtcttctctttctccaaaatcagacattcaagtgccagaccctgaaatcagttttttggtaccagcttattcttccccattctgtatcccttcctttccactctcttctttcatatgcaggaaaggtcagctctccctcagtttctaatttgcaacaccccactcgaagaactcaacaaccagcatcaaaaattagacaccctccatgggactccatctatgttttagttggagcttctataacaatgtaccataaactgggtggctcatccacag

SEQ ID NO: 684469 - DNA, 1315 bp, Homo sapiens
tctcgcccctcctggagcatcaggcctctttcggtttggcctgtagagaagccttaggggccacttcgttcggcatcgtagggggcaggtgggaggcgcgcggggaagaggagggtgtgactgtggttcccgacccccggcgcccaacctccaccccggtgcgcgcgcccttcccggctcctgctggtcccactcgccccgaggtaggtctccggtcagcctaagctcccaagaagcccaggcccaaaaggacaggtagggaaaacaagctgctcatttcggtcctgtccggaagggactcctttctgaccggaaagaaaggcggcgagtcctgtcccgttgggttagcggaagagagatcaaagggaagagaagaaaaatcctgtgaggtttcaggatctaaagttaccatgaagtcgacctcacctcctctgaaggtcctcccggtcctccagtggctggagaaggtgagtcgagtccctgtctccagtttgcaaagtggacaaagcctacgacaatgggccccgaatcagctactaggcatccctgtctttccagttggtggtactcgagcttccctacccaggatttctgtggattccaagggtacaactgaacaccttttgtcgttccaactgctcttatttgaattaagggctgatctgttgagaagcatatattcggtaagactatagcaactgttgttgagactgtcccattcttcctcctcctccctcttcctataatgtacaatgaaaattaatccccacgacgggcctgttatttcaatgtcctgttggcagaacctaaggggagtctaggaggttccaggataaatatttgaagtatgacacagtcatttttatttacacatgcattccaaaaacacattggacaaatgcatccagttcacctgtgccacacttacaaagatatgaaaagagggtctacacacaaacaagcgaaagacgtaatcgaatggcttttaaatatctgctgtttctactgaargtcttcttctctggctacacctaccagtgtcttctctttctccaaaatcagacattcaagtgccagaccctgaaatcagttttttggtaccagcttattcttccccattctgtatcccttcctttccactctcttctttcatatgcaggaaaggtcagctctccctcagtttctaatttgcaacaccccactcgaagaactcaacaaccagcatcaaaaattagacaccctccatgggactccatctatgttttagttggagcttctataacaatgtaccataaactgggtggctcatccacag

SEQ ID NO: 684470 - DNA, 546 bp, Homo sapiens
tttctttacatcatttcttcaagataaattctcaatagttgaattactgaacaagatgggacaaccacttttagcatccttaatatgtaaaatttttagtcatgacagagtttccaccaagaaagaggaatatgggtgcctgtccttcatctttcgagtcgagaggagcttggctccacctgtgtcccatcgcgaggagggcacaggggaatgacgcccacctcctgcacagtaggtctagtaggggacaggcgggtgggcgccacactgctgtgggcctgcaggcccctgaatacagacctgagggctgccacccactggacagaggcatgctggagctgctctcaatcagcaggggaggctgcccggagagcagtgaaaccccaacgaagcctccctataggaagctgccactaaaaccagagagccaggaaagacgccagstgaacggaaatgcatggctgtgcagtgcaggcctgcatctgggaaagcgcagtgaaatgctgggggaagacagggaaggcagacttgagaactacgaagccc

SEQ ID NO: 684471 - DNA, 620 bp, Homo sapiens
atcatttccctttccagctataatactcctcccacctgcataggcaaacactgttctgatttctatcaccacagcctaatttttcctattatagaataccatataaatggaatcagacagtatgtgctcttgtatctgccttattttgctcaacataaagtttttgagattcatccaggattttacatgtgtcagtagtgtgttctttttttactttgagtaatactccattgtatgaatgtaccacaatttttttattcagtctcctgttgatggatatttgggttgttaccagtttgaagctaatatgaaaaaaggtgctgtgaacattcttgggcaaatttttttttatggcaawacgattactttcatttctcttgaatgaattaatttttattaaatgatgaagaagctttttataaaagcttgcagagaagcaataatacacattctacaggaagaaaaaatgcccactttgcatcttttcttttaggatagcacaggttcagagatatcattctattaaatctgtactcccttgctacaagctacatcctcacatctacagaacatcctcattcctttatcattctagacaaacctttcccttctccttaaag

SEQ ID NO: 684472 - DNA, 600 bp, Homo sapiens
taacaaatgtgactgaatgaataagggcaagcctctaaagagcttaacaactgcaacacagtacagcttttaaataccaaattcccattcacagaggattacagggatagactatttgaagtgaggacttactggaaaaygggaaaaattattgtttccccccaaattgagaaaggaaacgttttcagcactagcccacaatgaactgtggtccaatcactgaggaaaagggcaattttaattaattgctgctggatccatgtggcccacaagagaaccaaatgtttctgcatgaaaaaagattcatgagggaagataaaatatattgtgtgcttggaagctaaaccataaatggggaaaggaaggctctggggcaaggcctgacctggggcataagggcgagaatggagttgggagcaggaagggagcataactcagtgttacaagctgggctttaaagccaggttctctggtttaaatccctgctctgcagcctactggctctgggacccagagctcatcacattgttgctgtaagcacagaattcttctcatgttacacaagacacactaaagatagtttatgcataagggtcctat

SEQ ID NO: 684473 - DNA, 1960 bp, Homo sapiens
agactgggaatttatgaagaaaaagaggtttaacagactcacagtaccacgtggctgggaaggcctcacaatcatggcagaaggataaaggcacatcttacatggcagcaggcaagagagagtgagagccaagtgaaaggggaagccccttataaaaccatcagatctcaggccgggcrcggtggctcacgcctgtaatcccagcactttgggaggcggaggcgggcagatcatgaggtcaggagatcgagaccatcctggctaacacggtgaaaccccgtctctactaaaaatacaaaaaaattagctgggcgtggcggcgggcgcctgtagtcccaggggggactagggaggctgaggcaggagaatggtgtgaacccgggaggcggagcttgcagagagccgagatcacgccactgcactcctgcctgggcaacagagcgagactccgtctcaaaaaaaagaaaagaaaaaccatcagatctcatgagacttattcactaccgtgagaacagtatgggggaaccacccccatgattcaatgatctctaccgggtccctcccacagcacgtgggaattatgggagctataattcaagatgagatatggatgggggccaaaccatatcaccaaccctggccattcttcctttaggtaaccaaggttctgtgacctgggcctggaaccacagtccaagcagctaggaggatctggaaatcctaagtcatggatcattacagttatcccaagggtacctagaggtatttccctgtgcgtcatatctcagtgtaatgcgtgttaatattgctaatcttgttctgttcaagtttaagtgcttgagaaaattatgctcctagttccgtatggcccacgtctctaccaccaccccaatcaccaagctgtgccagtcagtgagaagcaagcttacaggaaagagggggtcctttctgagtgtggacgcccagtaagaaaccccagacaataacagcagcaggaccatttgagagttgtgccaacactcagatttccaaagctggcccagctcctgatcaaaagcaggaatgaagagcatccccccaggatccccgcccatcccactagaagtcattcgtattcctgtgcagtcagcggtttgcagccaggtttggctggggaggtcccactgctcatttctctcctaaacctccctggtgtgcagccaagtctccattttatgcaaactttaaaaacagaaacgtaggaagaaaaacgattcccatgaaggatggaaaactaatctaacaagagattacagctgtgcagagggctgttagggaatccgggcaccttagcagaacagctccccgagggtagggcagcatctcacatccttattcatattgtcctgcacacagacagttgtcatggacaagagtatgaagtcaaaataagtcaactctaggaaggtcagctctagcaaggaagcatgctaggaacttgcaggacactgaaataagtctagttcctatcctaaagagtttataacccgtctaggagaataatgctgaaatacctggaaaaaaactgtcgagaacaggttcacttcaaaattcaccaaaggagccaagcgcggtggttcacacctgtaatcccaacacgttgggaggccaaggcaagcagacttgaggccaggagttcaagactggcctggccaacatggtgaaaccctgcctctactaaaaatacaaaaattatccaggcgtgttggcgcacatctgtaatcccagccactcgggtacttgaggcaagagaatcacttgaacctgggaggtggaggctgcagtgagctgagatggctccactgcacaccagcctgggtgacagagcttcatctcaataaataagtagataaataaatccaccaaaggaatttaaaacacaagacagtacacatcaaaaaaaggcttttggaatttggac

SEQ ID NO: 684474 - DNA, 699 bp, Homo sapiens
agacatcactttttttctcaatacaatggtgtgtccaactttagcatatggaagcatttctacagtgtaagttattctgaggaaaagacataatttgtaaatgctgtcaagtaaactatgcatttccaaatgctgctcaggtgacttgatacatctctgcaaaaactgtcccacaacagtgcaggaaaagaggacgctggtacagagtttaagtagctctttccagatgtttctgcccagaagtcgtcctcatgttcctgcaatatgaacagtatcacaaagaactattcaacttccattcttggcaattaattaaagatacytggcaaatgactacatttttaaaactttctgtggcttcatttgtggataaagtgaaaccaagagtaggaaaaaacttgagcaagactttaataaaacaataagttattagtaagggaaaatatgtcgattgtagaatgctttaaaattaatgaactattctactgtctgcctagcagacactccatgaacaagtttttttacaagtcataatgtgtatggtcaacatactgtatgcaggaaagattgtgagacattgtattttttagctccacatatgaaaaatcacacatacactttaatcacaactgctcaaactttttttttgttaactttttaaattaaaaatatttatgtttattatagagaatttagaaa

SEQ ID NO: 684475 - DNA, 494 bp, Homo sapiens
tgggtagtcactatctggaatatgtattaaccattcctttgcacttaaatgccccccccccccccccgccccaactattaraaaactccctcctagcaatactcccacctcagcctctcaactagctgggaccacaggcacgcgccaccacacctggctagtttttgtatttttcgtaaagacgggttctggctttcttgcccagcctggtctcgaacttctggccgcaagcgagcctcctgcctcagcttccggagttgctggattacaggcgtgagacagccgccagctcttctttcactttcttcacgagattttgcataatataatatatatattacatattattataataatattactatattaattacctaggatatatctatattttttattacctattataccctttatataataaaaagggatttaaacaggttcttacctgcattaaattttaagtggttttgtatggcgctaaaacccatgaa

SEQ ID NO: 684476 - DNA, 1277 bp, Homo sapiens
tgcattccagcctgggcaacagagcaagactccgtctcaaaaaaaaaaatatctatctatctatctatctatctatstaaaaacatagattagaacaaccatctaatgcactattatcaagaacttagggccagatgcagtggcactagcctcggagacagagtgagaccctgtctcaaaaaagaaaaaattataagccacctcttcaaaaactaaagctagccttaactgaatactgaaagtgcaagtataaaatgatacaatcactttggaagacggtttaagcagtttcttatcaagttaaacacaaacctaccatataacacagtaattccactcctaagtatttacccaatgaaaggtctatgtactccttccccagaggtaattacctgtcccatccacaacagtgcttcatgataagcaattcgttttgttcactgctgggcatggatttgactacatgagtgctaggctttgtttcctaactgtgaataagatgaccaccaacagcaaatccaagtcaaggagatcaccaccttcaaggatttgatcatatgtcttctggaagccaaattacaaactggttgtattccaaaaagtcttttataaaacagaactagaactttgagaggccaaggcaggatcgcttgatgccaggactgagagaccagcttgggcaacaaagacagacctccattctccacaaaaaacttaaaaaattagcggggtttggtggtcccagctactcaggaggctgaggcgggaggatcccttgagcccagggcaacaaggctgcagtgagctatgactgcgccactgcactctagcctaggtgatagagcaacactctatatcaaacaaattaaaataaataaaaatttaaaaacccatacatccctttctgaagggctaaaacagactctccccacgtgatttaaattttttttttttttttgagatggagtctcactctgtcgcccaggcgggagtgcagtggcgcaatctcagctcactgcaagctccgcctcccaggttcacgccattctcctatctcagccttcccagcagctgggactacaggcactcgccaccacgcccagctaatttttttgtatttttagtagagacggggtttcaccgcgttagccaggatggtctcgatctcctgacattgtgatccgcccgcctcagcctaccaaagtgctgggattacaggcgtgagccaccatgcccggccatgatttaaattatattgttaaatccaataatgggta

SEQ ID NO: 684477 - DNA, 578 bp, Homo sapiens
agaaggaaaagtaaggaggacttttgtcttatatcttagataccagcttagccacagtaggatagggcactggtcagagtcatgaggccccagttccaggctctagctcctggacagcatttccagacataccctgggccagaagggaactcaccgccttgaagggaaggacccagtccttgcaggatccatcaccttataactaaagaggtcttgggccctgaataaccaacagcaatacctagggactatgccatgggccttgggtgagactatgagatgtgctgattacccagcacattcacagcttctgtagctgtggggagagaatctctgcttgacaaaaattatttcctcaaaattttgaaatttctggttaggaaggagatttcagcctgatagtctttagcagtggcrataactatgcataatggtctatccccacctctaccagtaaagttattttaggaaaccatgaggggtttttagtggtggattccaccttacagtcagtggtttagaaacctaaaaaataatataacctcagggaatttcagatttgggaattaatttattta

SEQ ID NO: 684478 - DNA, 624 bp, Homo sapiens
tctggttatgggatgtgtagttgttcaatccctattttccaccattaacatatgaatcaaaatagaagattcaaggtgaatatttcattctcattgcattcttcctggcaaactagtggttgactcaattgatgaaggcgttttcatgatcatcgtgagttgtaaagactgtgctggcattttgcaatatacttcattcattcattgactcatttgccaacatatcttgaatgcctctgtgtgctgggtktcatggatacagatgtcattggctgggtgtttaaacaacattctgattcccggttagagacagaagacttgtggggctcatgtacgtgtaacgtaaaggcaatttttggaagagttttgtcctcattgtcagaatgtgagcttgagaaagtctagagccgtacctcattttccttctttccccacaccctcagcacagggagaggtacatttgaagaaatggacacgtctaagagaataactgaagaaaggaatagttttggactggagaaaaaaaaaaaagaaaaatgatgggtaatttaaccaaaggtcagattttggaaactcagattgtctgacaaatgaagtcatactgtaaagtcccagaagtaatat

SEQ ID NO: 684479 - DNA, 641 bp, Homo sapiens
ctctgcaggcttaacaggaagtatgcctgagaggcctcagtaaacttacaatcacggcagaaagtgaaggggaagcaaacacgtcttaccatggcagagcgggagaaagagagtgaggcaggaagtgccacacacttttaaaccatcagatcttgtgagaactcactatcatgagaacagcaaggaggaaatccacacccatgacccagttacctcccacsaggcccctccgccaattgaacatgagatttgggtggggacacaaatccaaaccatattaataagttacctgactcgtcactcctaactttgtgtcacaacccccactgcccaaatgtaaaagttttacctactgatgtggagggatggtatctgaattttgtaattattcgttatctgagtccctgcagttgtatagagaatcaaaagtcacaacccaaatagttcactggagaactgaccacacaaaaaacaagattccattcaaacatccctgtacttaacttggttgacacttactattgaatcaacagctttgttcagtctctgctgcttttggaatattatgatgtgacaatataatgcaaattcaatgaaaatccattacagggcaaaatttaaaatcttgtaaaagatacaga

SEQ ID NO: 684480 - DNA, 390 bp, Homo sapiens
ggtgagaaacctcaggtataccatgaatgctggggaaatagtggtacagctactcttaccttcagcagaattcttggccaggtaatcagtttttaatatattctatatgcttatttgcctaagatttctgtgccagtgtaggtgtgtgagttgtgtttgggaataggtggtggtgtaagcagctaataaagaaaaattgagttgataatttctgtccttgaagattttaatgtttagctgggagaaaacagatatttgcaagtgtaaaagctgacagmacagttaaggaagcgttgtaatttctggattgttaaatggaaagtcgtttaagaaaatgatttaaatagaatccaaattttagtaagtggttcctatctgaaataaaaaggt

SEQ ID NO: 684481 - DNA, 492 bp, Homo sapiens
tttwaaattggttctacagaatgtctgacattttcagtttaaaaactatattacaataattatttaagttacacagattttgtgaaaatgtattctactcagcaaacgctttaattttagtgttccatggctttcaggtgacaatatatatatcactttttcagagcagtgatagcatttgctccacctaatttataaaggtagtattttcttaatcaaaaatgagagaaaaaatgatctctcaaaaaagtattgcattatccacttttgtgaggatatacagcaaaaaacacaaataaatatcaaataacactgtgtttttgaactccatagtcattaaaagttgtataaatctagtcatgtgaaattatttgtttcataaaaactaagatcatttttttttataacatcccagggaaaaaagtttctcttgatgatgaaccagctcctggaaaattctaaattctaaaattgagttccttttgggtactt

SEQ ID NO: 684482 - DNA, 2663 bp, Homo sapiens
tttaaaatctactattttttggatgactttttaaaatctttacatttggatttcagtttgattataaaaacaaatgcagagagaaccctctgtaaggattaccccaaagagaattagatgttttatgtttattaaaaatttgtgcgtatttaatgtaggataatgggaaattgaaatgtcaccaactatagttggagttttcaagctcttgaacttgacagaagctgtcaggtgggaacggttctctaatagagaggtgtcttattctgcccacagggtggccactttgacctggctgaccggatgtttcacagtgtgcgcgaggcctggtattcagcgtcaaagcacaatatggcagatgtaaaagaacttatcccagagttcttttatttaccagaattcctgttcaattccaacaactttgatctaggtacgtagagctatggcactgtcttaggaatgttagccaggaaaagtccaatagaaataagtcacttctctgaagattgtctgcagcacacattaacaagaaaaaaatttgatacagtttcttgcagtcatttgctgtaattgggtgtggttacatgtgatttttgtcgttacaaaaattagccagacgtggtggtgggcacctgtaatcccagctacttaggaggctgaggcaggaaaattgcttgaacctgggaggtggaggttgcagtgagctgagatcgtgaactgcacgccagcctgggcaacagagcgagactccgtctctaaataaataaatattgagacagattactcccaacatttagaatttcgttgttttgatgaaaacagaggtgaaaatttattgaaaagtattactattgaaacccattaatagctaagagtggtacatccaaattttccatgtattgttttaatcttgtttattgcctaatacattctcagttcataggctaatgtgttttaaaattagaacttcagaataactttaagtaaaccccttttctttatcctgtaaggactctattttctagaaaaacaggaccaaatcagcatttataaaaacaagaaaaactccatcagtgctgtttttatattatctggctgttagaggaagtggatttgactttggttacagtttcttggaacacagtttgctgatctatgcttctgagtatttcttttaaagcatatcaaaattccattgtttccatgtgagaatattcctgccagatatttgttgttttatatttttttcattccttgtattttctactgttttgtaagagttagcacataaattataactgtactacctccaaattttcatgaacagaaaatacagggaagtgtttgtatcctatacatatgaaagatatttctatttgaagttttctaaagataatttttatgtatttaattgtccatcagcaactctacctttgtgaaatgggaaagataacaaggctgtctccagagccccaggaaaagtctgaaattgattttcattacctgtaattatgcctagagctcacccttgagcagctaaagacacaactttaggacttagaattagagaaagtgatgggttttcccaaaagaatagaatagtcaacgagaacaatcaacaaatacctgctatagcctttgactgtgaatgcacattaacattttcttttattgagacagagtcttgcactgtcgcccaagctggagtgcagtggcatgatctctgttcatcgcaacctccgccttacaggttcaagcaattctcgtgctgcagcctcccaagtagctgggattacatgcgccaccacacctggctaattctttttcaaatttttagtagagacggggtttccccatgttgcctaggctggtctggaactcctgacctcaagtcatctgcccgtctcagccaagtgatctgcccgtctcagtggttacaggcgtgagccaccacgcacagccacattagtgttttcttatgttcacttataattcaactttggagaacgttgccttcttccccagggataccactgtcaaagagacaaatatggagaggtgcagaaagaaagagatagctcataatcttccagaaacatctatcacttatgataatccatgttgcaaaggtgttccagaccgaccacttacaaacccaactaaccaatctacttttaaaataagtaaataaaaaaaggaggatgtatctttatcatgttcaccctcataacaaattatcttccctccttgaaatagcatactttaaaaaacagtggttgggccaggcatggtggctcacacctgtaatcccagcactttgggaggccaaggcaggtggatcacttgagctcaggtgttcaagaccaacctgggcaacatggcaaaacctcatctctacaaaaaatacaaaaattagctgggcgtggtgatgtgcacctgtagtcccagctactcaggaggctgaggtgggaggatcactttaccccaggagttgaggctgcagtgagccgtgttcstgccactgcactccaacctgggtgataaagtgacaccttgtctccaaaacaaaacaagacaaaacactgtttgtatataaaacctaaaatcatacgactcttatgagaaaacataggggtaaatcttcatgatcttgaatttggcaa

SEQ ID NO: 684483 - DNA, 1875 bp, Homo sapiens
caagggagtcttccccaacaacctggctttcccacccttcctctaacctctactcaatgcagggacatggctaacaaccgccgggagcttcgccgcctgggcatcacgcacgtcctcaatgcctcacacagccggtggcgaggcacgcccgaggcctatgaggggctgggcatccgctacctgggtgttgaggcccacgactcgccagcctttgacatgagcatccacttccagacggctgccgacttcatccaccgggcgctgagccagccaggaggtaggaggggaatgctgggagcagraaagaacagggtgcctggaatttggggaagtccaagggtctgagagtggagtgagattttagtgacatgacaaaatgctcaggatcttgttaagaaagaaaaaaatattatctcaaccatttttttaaagcaatacagaaaaagacaagaaggaaattatcaaaaatgttaagagtggcaagttacacctgggtggcaagattatatgtgatcgactttttcttttttgtttttttgagatggagtctttctctgtcacccaggctggagtgcagtgacgtgatctcagctcactgtaacctccgcctcccaggttcaagcgattctcctgcctcagcctcccaagtagctgagattacaggtgtccgccaccacatccagctaatttttgtatttttaatagagacatggtttcaccatgttggccaggctggtcctgaactcctgacctcaggtgatccacccgcctcggcctcccaaagtgctggaattacaggcatgagccactgcacccagccagcaggaggatttcttaagcccaggaattagaggttgtagtgagctatgattgtgccactgcactcagcctgagaggcagagcaagaccctgtctccatatacatatatatatattcaatggttgagaataacaagctagaatggtggagagattgaggaaggggccagtaatgacagtgttttcaatggactcattcacgctactctatgcaaagctggctcttacatcagtggtgagtctccacctttgacccctttcaggtttatggacactgagccactgcatgtccccttcctctcattctgtccaggcctctccccttttgccagagatctgcattcctaacatccactcatctgcacccattcctgtcttcatgcacctgtacttacctgtcttcctcttccctgtccatgtcaccctttttttttttttttttttttttttttgagatggggtttcacttttgttgcctgggtggagtgcaatgacacgatcttggctcactgcagcctcagcctcctgagtagctgagattacaggcatgggccaccacgcccagttgatttttgtatttttagtagagatggggtttcaccatgttggccaggctggtctcgaactcctgacctcaggcaatcttcccccttcggcctccaaaagtgctggaattaccgccgtgagccaccatgcccggccccatgtcaccctttccccagcctcctccaagctgccacaagcagtctcaaagctctctctgtgtctctcctctcagggaagatcctggtgcattgtgctgtgggcgtgagccgatccgccaccctggtactggcctacctcatgctgtaccaccaccttaccctcgtggaggccatcaagaaagtcaaagaccaccgaggcatcatccccaaccggggcttcctgaggcagctcctggccctggaccgcaggctgcggcagggtctggaagcatgaggggagggggagagaggtcaggccaggcccgtgggtaggtccctggctcccagctggagataggaggcccaggtggca

SEQ ID NO: 684484 - DNA, 2305 bp, Homo sapiens
gatgggactcaaattgaacctggaagcctgaataggggctggataagcagaaagaaatggaaaggcattccagagcaatttctaggcctaaccgcagtctggttttttgtcctatttctctatccctctccaccctggacattaggtttccaccacactatgaggatacccacattttaatcttcccatggtaatctcgagggtacatttgcaaagcagaatctgcctttccgatggaagtttccgaagaagtttcccacaggctcaccaccatattacgtattcaaggaaaatcaacaactttgaactataccagagagagtggttttcttgaatctgtcatgtcctatcttttttgttttgttttgtttttgagatggagtctcgctctgctgcccaggctggagtgcagtggggagatctcggctcactgcgaagtccacctctcaggttccagtgattcccctgtctcagcctcctgagtagctgggattacaagtgaccaccactatgcctagctgatttgtgtatttttagtagagacggggccaggctggtcttgaactcccgatctcaagtgatccacccacctcggcctcccaaagtgctggaattacaggcgtgagccgctgcgccgggcctcatgtcctatcttaatagaatggacaagtccaggcttcgagtttcctcggctctaactggaatattacagccattctacaggaaatccaaagcccagaatgacccttggatccagagaagcagccagaaatataccatgtacaaacgtgaaatttttaaaagcagaaaaccaattgaacataaagtaggttcccaaatacatagaaaataaatgtagacagataaaatattggaaaaaaataaggcataacattaattatttcttaattgtgaaaatagcatgatttgttcctcttatctttcacatatttcagtacgtttcagcaatgagtgggtgttattttcaaaatcataagaacattttggtataaagatctatttttatttcaaagaagattctaagaactttcacatgacgatgaattcttcaaaaacacagttttcacaagcyctgtcacagatccttctggagacccgcatacttctagtgtttgccctgacgaatgccagttctgttcttcaagatttacttgtcagaaaatgaagacacacagaatgagttatttcagcaggaagtgttccaggattctggaaacagatgatgctttctttcagcctgttgtcattcttctccttcaccaagatattgtcgtcatcactctgggtttaactcagcttgacagtagccacacttccatgttgctcttcatctcttcctttggtaaaagtctgcaaattgaggctcagctaacagctatttcatactaatcagacactgggtctaaattagaaccaagaaaaggtctatggcaagatagggtgaggccacagcgacattttatgctctggatcacccctcatgaatgcttactaggccatttgctctcctcttttacaggcgagagggttgtggctctcactacctatcataaactatggcagcgtaacccttcacttgcttttcttattcacttccagtttgtgctgctgctaaaatattctgcttctcagctgccagtatcggcgtctaaatcatccccagtccaaggcgccagctcttctggtgcagaaaccacagactcagcagccaggatgtcatcagcatactcgagattacatcatctccttctgccaaccttaataccactatggtaaccatcaacagcaatacccatgattatttcagtagaaatattgaacagatgtgacagccttgtcaaactcctttgctggtgtccaaccactctgttataccttttgcaattctaaaatctctcttctggccataatagagacagcacatgctgacctcccgctagggaaactgctcccatagcgtcagttggcatatcaaagactaactacgaacaccaccttatatacacagtgctttacagcctgctaatcatttttgcagacattctcctttttgactctcaagccagctgagacagctgtggtataagttgaaagggcactggagtttctgtcaggagttttgactttcttggttgcttactacctttgaaatcttgagcaaatcactctgagcttgttttttgtcagtaaaatacttcttgttctcaacctaacttgaaaaacaaatgaggtggtacatttaaaaataataaattatgaagatagttactcaaactaatacttg

SEQ ID NO: 684485 - DNA, 2124 bp, Homo sapiens
tagggttgaaagccctcggccaaggttacagaaacaccacgcgtttagaaaatagccatttggtagccactttgcacgggctggaagtagcatgatctagtggtctttgccttggatcaatttgtgctctggagcttcgatacccactaactcagagcatgcttttaacagttatctaacttctcattcctgatctgccttgcaggaatgcagggagcccaagcaatgaattccttaagaagtcttaktttaacataaggcagggctatcagtggctggcccaggagcctccttaatgcctcttacggtgtcagaactctctcctaatcaagaaggataagggttggctctccccacacttagctatgttctccacagagctgtagtggttaggtcctaaaccctatgtgagcctaggacaatagtaaactttttttaaaaaaaattattttcagaaagttctttcctcaaaaaattaaaaatacaattaccatatgatccagcaattccactcctgggtatgtgtccaaagaattcaaagcagaatcttggagagacatttgtacagctgtgttggtagcagcattactcacaatagccaagaggtggaagcaactcaggtatccatcaatggatagagagataaacaaaatgtgtgtttatctattatttagccttaaaaacaataaatatatatatatataaacaaatgtgtgtttatctttatatgagggatatatatatatttttaaggccaaataatattccatcatagtataattatatgctataattaatggaacataattatatccaataaataatggaatattatttggaaccaataatatggaataataattggaattattagttccttaaatatttgtctagttaaaggcccttaactagacaaatggcataatggagtattctataattaatggactataattatattccaaaataatggaatattatttagctttagaagggaatatatacattccttatatagaaatataatatataataatatataatattccttatatataataatataatggaatattatttagccttaaaaaggaaggaaattctggcacatgctacaacatggctgaaccttgtgaggacactatgctaagtgaaacaaaccagtcacaaaaagacaaatcctgcatgattctacttacaagaggtatttagagtagtcagactcattaatagggacagaaaatagaatggtagttgccagcatctggacagaggaggcaaggaggcaatggggagttgttatttaatgacaatagagtttcagttttgcaagaggaaagttctggagattagttgtacaacaatgtgagtatacttaacactaatgaattgtacacttaaaaatggttacaatagtaaattttgtgtttcataattttaaaaaattttaaaaagaagtcccttcctccttctttccttccctcctttcttcccttctttctttcttttccttccttccttttctttctccttccttccttcctgctccttccttccttcttcttttctttctccttccttccttcctgctccttccttccttccttccttccatctctctctctcattacacaagtcaaatatgaatgcaatcttgtgggtaaaagatttttgcaaaatgtaagttatcctccttcattcctttccccagggataactactttgccatttgatgtgtattttccagcctttattaggagatttacatgatttacatacattttcattcatgtacacacagacacatgtatgtatacctacattcttacatatatatataacaaataaataatataaatatatattgctatatatatatatatagcaataaataaactttatttattgctctgggactggcttctttgcttgaagaagacatttaagatttgttctattctacaggatttcttcaagatacaagaggtccccttcgtctcactctggtgactccactgtggctgcatattctggggcagagtacatcaattgtttccgaaggtgcatgctggctccacaggtagaaagaacacaatggctgctatcaccaaacctcagggctaa

SEQ ID NO: 684486 - DNA, 2124 bp, Homo sapiens
tagggttgaaagccctcggccaaggttacagaaacaccacgcgtttagaaaatagccatttggtagccactttgcacgggctggaagtagcatgatctagtggtctttgccttggatcaatttgtgctctggagcttcgatacccactaactcagagcatgcttttaacagttatctaacttctcattcctgatctgccttgcaggaatgcagggagcccaagcaatgaattccttaagaagtcttattttaacataaggcagggctatcagtggctggcccaggagcctccttaatgcctcttacggtgtcagaactctctcctaatcaagaaggataagggttggctctccccacacttagctatgttctccacagagctgtagtggttaggtcctaaaccctatgtgagcctaggacratagtaaactttttttaaaaaaaattattttcagaaagttctttcctcaaaaaattaaaaatacaattaccatatgatccagcaattccactcctgggtatgtgtccaaagaattcaaagcagaatcttggagagacatttgtacagctgtgttggtagcagcattactcacaatagccaagaggtggaagcaactcaggtatccatcaatggatagagagataaacaaaatgtgtgtttatctattatttagccttaaaaacaataaatatatatatatataaacaaatgtgtgtttatctttatatgagggatatatatatatttttaaggccaaataatattccatcatagtataattatatgctataattaatggaacataattatatccaataaataatggaatattatttggaaccaataatatggaataataattggaattattagttccttaaatatttgtctagttaaaggcccttaactagacaaatggcataatggagtattctataattaatggactataattatattccaaaataatggaatattatttagctttagaagggaatatatacattccttatatagaaatataatatataataatatataatattccttatatataataatataatggaatattatttagccttaaaaaggaaggaaattctggcacatgctacaacatggctgaaccttgtgaggacactatgctaagtgaaacaaaccagtcacaaaaagacaaatcctgcatgattctacttacaagaggtatttagagtagtcagactcattaatagggacagaaaatagaatggtagttgccagcatctggacagaggaggcaaggaggcaatggggagttgttatttaatgacaatagagtttcagttttgcaagaggaaagttctggagattagttgtacaacaatgtgagtatacttaacactaatgaattgtacacttaaaaatggttacaatagtaaattttgtgtttcataattttaaaaaattttaaaaagaagtcccttcctccttctttccttccctcctttcttcccttctttctttcttttccttccttccttttctttctccttccttccttcctgctccttccttccttcttcttttctttctccttccttccttcctgctccttccttccttccttccttccatctctctctctcattacacaagtcaaatatgaatgcaatcttgtgggtaaaagatttttgcaaaatgtaagttatcctccttcattcctttccccagggataactactttgccatttgatgtgtattttccagcctttattaggagatttacatgatttacatacattttcattcatgtacacacagacacatgtatgtatacctacattcttacatatatatataacaaataaataatataaatatatattgctatatatatatatatagcaataaataaactttatttattgctctgggactggcttctttgcttgaagaagacatttaagatttgttctattctacaggatttcttcaagatacaagaggtccccttcgtctcactctggtgactccactgtggctgcatattctggggcagagtacatcaattgtttccgaaggtgcatgctggctccacaggtagaaagaacacaatggctgctatcaccaaacctcagggctaa

SEQ ID NO: 684487 - DNA, 548 bp, Homo sapiens
tcatatatgatgtggtaaacttgtatcccacttttacatcttctgtggaaacttgaaacattttctaactcagtagatgttttataatttccatttgataattttgatagttttgcttatgtggaaacatttcatgggagacatttaagttttgwttgataatgtatagattcccatagattttgatagctctcataatgctgactattcacaatgaggtcactcattctgtgtattcttgcctgcattttaagtgtccaagtgaattttgttcactgtcctaaatgcaaccctaagacaaaatttattggtttctatgctgatatagcatatccttaattggatattactgttatccttgttctgtttactgacaatgttctgtggccagctgtgtttatgcagaatttacatttgataaatgtttcataacaattcataataatgtaccattcttggtacaccataacaggcacataaactttcgaactgtgtttctttttctagtaatatatttggacacattcacttctaggttcccttaggat

SEQ ID NO: 684488 - DNA, 644 bp, Homo sapiens
gaaggactacaataaaccttatctcaatatattcaataaagcttcccaaatgatttttttaatgtcagttattttaactttgcatyaatgctaaagcaggattaacatctctttgatgatttcaacaaatggttttaatccggaaaatctattatgaaaacctactacagtataaatatgaccactcatactttcatttggtttaaaagcttaacaatatatatttcaataaggaaaactctttatctttagtattgaacttcttttgatgaaacctaatatgtaacaagtatccttttgtaaaataaacctttaaaatgtagaccactccattgagacaaaaaagaaaaaataatccattctttcattcctttacgataaaacacaatgaaagttctgtaaacacaatggaaaatcatgattgctatgagattcatacagaagtaaccagaacatagcagaactttttctttgattatttttcaaaagaaaaagaaacattagaaatgttggaaattcaaactatacttttatgacctagagttatgtgataaaagaccagtttcatcaacaagcaaaataaacttgacattgaaacaacagtagtaacaaattttttaaacaaatctacattaagtttctta

SEQ ID NO: 684489 - DNA, 658 bp, Homo sapiens
tatcttgtttacagcattttcatatttaagtgtaaagaaggaaaaactacacggagtggtgaatcttaatttgaattttatttaaataagtgtctaataatggcactcaaaatttggtccttagaccatcagcatagcaattacctcagagcttgttaaaaatgcagaatctcaggtcccaccccagaattgctgactcagaatatatactttaataagatccccaggtgattcttatgcaagtttaatgtctgaaagcactggtttagcaggaccctcaaaagatcctttatttttcattgctctgcctctaggtaaaactacatctaaagcatcttcaagatctcagtacttacttaaagatttgtgaaagcaattcctctctgttgtcccaaaccacatatctatcagtcagtccctcccaagyggggaggctgctaacgtcactactggactggagcatcattgttttagagtgagttagcttctctctcaggtcagacctcaagggcaactacttatgggactttcatttgtcatccctcttgctcaataaccctgaagtactcatcccctagtctttgacagcccagtcctgggacagcgtgtacttttcacatttgtaaatatcaacatcagactgataattccctcatca

SEQ ID NO: 684490 - DNA, 609 bp, Homo sapiens
gtggcgctaactcagctcactgcaatctgtctcccgggttcaagagattcccctgcctcagcctcccaagtagctgggactacagacacgcaccaccacgcccggctaattttttgtattttagtagagacagggtttcaccatgttggccaggatggtccagatctgctgaccttgtgatctgcccaactcggcctccsaaagtgctgggattacaggcgtgagccaatggcaacattattcaaaacaaatgtccatcaataagcagatcaattatgaaccagtcacaaactagaaacctaaacagcagtgaaaattaacaaagtacaacaatatgcagcaataaggatgaatctcaccatcataatgttgatcgaaagaaaccaaaaacacaagtatacatcatataatttcctttatctaagaaacagatacttagttagatatgtggaaatattacatattaatgactataaatatgcataaatatgtggatagatatatgttgagtatgtgtgtataaaatgtatttatttcccccttattctctggataaagaagaaagagacttctgcacccttaacattaactccttgaaacacaagctca

SEQ ID NO: 684491 - DNA, 908 bp, Homo sapiens
tgggatgtgtcctctgctgtggatcgcatcagtgaggagggtcacatatcacaccatggacaccatggcagggagacctttccttgttacccaccatggtagttagggcycaagaggtggactaggattggccaaccggatacttccacctggagctgtgggtttgcagcatgagacgcagatgaagagaagattagacatcctttgcagcagcagcagcagcagcagcagcagtggtgatgtgtctgctggtggcacattgtggcagtgcccagcagctgggcctcctctccagactgtcctgctgaagaaggtggttgtccttcctccaccagccattggtttccagctgaatttccaagttggactctttagctcctgttaattctcggagccagcaatatttcttcagtcaattccagttctgattgatgtagccagagttgatgcagttcttgcaactgggaactctggctgatgtttgaggaaacaggttctgaggtcaaagagcttgtgcaggggccacagctagcaagtaacggtgttctggctgagaaatctgtgctgttttcttgattccacactccccaaagaattctgaagaagggcacggaggcaaggagtgacacagtgcacagataagagtgggacttgaaggctagcaggtatgtgaacacttactccaaaacatccacattcagtgacacattcataaataagttgagtctactgtatgccagagactgtgctgtgttcaaatactatttcaaccaggcacagtggttcatgcctgtaatcccagcactctgggaggccaaggcaggcagatcacctgaggtcaggagttcgagaccagcctgactgacatggtgaaaccccatctctactaaaaaaaaaaaaggccgggc

SEQ ID NO: 684492 - DNA, 1201 bp, Homo sapiens
gaaaaaagaaaaaatctaagcatcccaatggccgaaacctactgagaagacggacacttactacaatagtttcacttctagatactacctaagtaatatctaagtatggacataggaaacagtaaacatctccaaataccaaactagctactatgaagagctctaaaacgagaaatcaataaagtactaaatggataacaactaccccaaacctaagggtggggtagtcttacaataacttctacctctaaggaaaaaaaggtgagtttccagctctttcccaggaagatatatgcaccccaaatttctctgttccctgtgtgtcatctcttggytctaactgtaaccatggcaacaggaaacagcacaaaagacagcagaaccctgtaagggccagggttaaaaggggaagtgaaaaatacatatactttaaggcccaagaacatgcggttttggagttaacagtggcagccaaaaaagccttgagagaagaacatcaaagaatacaaactaaagagaattgaaagtaaggcttactaatagttcccttcccagttatccagctaggagacgggattggcaaggagaactgaaaaacacaaaaaatgcccctcctctcgcactcccttccccacaacaatttagctattcatttcaatgttatctagaaaatcttttgctattaagattttatcttttcttcactctgttttgatggcagaggtaagcagcagcaaagtatccaaaaaaagggccacatataatcgctaactgaaaacccaggtcctagatcactgaaatactattgtacttcaaagttcgttatttacatttctttttgttatctgccaacgtgaaagaaacatcacattacttaaaacctccactgaataagttattgtccaccaacagtttcagattgctttccgatttgttttcatgttacagagcaccaataaggtacagataaaatgaaaagtgctaaggaagatctttgaccaaaaaaaaggcaaataggtcacacaaagtaagaaggccggtgccctttatctctcttatctagttctgcgaattaagaattttactaaaatgaaatgcctcacttagttccatttatgacccttagtcttctttagcaaggcttccaaaatcccctgccagaataagtgatgggatggagcacccactcctaaatttaggg

SEQ ID NO: 684493 - DNA, 1063 bp, Homo sapiens
  misc_feature 695, 696, 697, 698, 699, 700, 701, 702, 703, 704, 705, 706,707, 708, 709, 710, 711, 712, 713, 714, 715, 716, 717, 718,719, 720, 721, 722, 723, 724, 725, 726, 727, 728, 729, 730,731, 732, 733, 734, 735, 736, 737, 738, 739, 740, 741: n = A,T,C or G
  misc_feature 742, 743, 744, 745, 746, 747, 748, 749, 750, 751, 752, 753,754, 755, 756, 757, 758, 759, 760, 761, 762, 763, 764, 765,766, 767, 768, 769, 770, 771, 772, 773, 774, 775, 776, 777,778, 779, 780, 781, 782, 783, 784, 785, 786, 787, 788: n = A,T,C or G
  misc_feature 789, 790, 791, 792, 793, 794: n = A,T,C or G
accagcctggccaacatggcgaaaccccgtctctactaaaaaatacaattagccagacgtggtggcacatgcttttaatcccagctactggggaagccgaggcaggagaattgcttgaatcgagtaagcagaaactgcagtgagccaggatcacgccaccgcactgtagcctgggcgacagagcaagactccgtctcaaaaaaaaaaaaaaaaaaaaaaaagactcaggagagctctaggctggctgctgagcttacaaacagtgagaaagagccaaagaaggctcatcactagagatgcaaaaggaaacctagagacacagccagatgtgaggctggaggatgcaaaagagaaacagtgggaatggtttggaggcagtaggataggagaaggtagatgctggaatgacttgcttgtccaaaatacagtgtcccacatagtcctgttgtcatcagagaaaaatgtcatattagccaaacatgcaatcagctcggctgggaaatgaggccaagtcttcgtgacagatacaggctgtgagacacagactgggaggagcaggacaggggctggttgcagtctgcatggkggaggcggaggtggatttttacaagcttccattggcctcttgaggcctaacgtcttttttgttttttgttttgagacggagtctccctctattggccaggctggagtgnnnnnnnnnnnnnnnnnnnnnnnnnnnnnnnnnnnnnnnnnnnnnnnnnnnnnnnnnnnnnnnnnnnnnnnnnnnnnnnnnnnnnnnnnnnnnnnnnnnnagaaattatacaactaaataaactagatctacatatatcaataatgcatctaaaaaacaggaaagaaaaccaagtagattaatatagatatacagtagaatattcacgtaaattctaacaatctataaagcactactatatattgtttatagatacacccaaatatagtaaatgcataaaaatatggaacgaagggctatatacaacatttaggagaaactttactactgagaagaggaaggtggacacaattggaaagaagtacaaaa

SEQ ID NO: 684494 - DNA, 1080 bp, Homo sapiens
cgtgaaaatcagcagtttattcattttcagtctttgttgtttgtttaacacattcagcttcccaaaatagcctattgtcaacaggctcatggccgatttccccagaatgactcctgctctaccactgatgaatacagtattaccattacagatggattttgaacagacacatttctgtaatccattgttaaaataacaatcattctaatcctgtagaagctgaacctgatgcaacaaaaacaaaagccaaaagcctcccagtgttactccaaggttggtttctagtctttagatggtcactgaggtgctaaaaatggtacagtctasccagcatgataaagcccttccatgctaggtctttggtttaaaaacaaatcagttggccgggcacggtggctcacacctgtaatgtcagcacgttgggaggccaaggcgggtgaatcacgaggtcaggagatggagaccatcctggctaacacggtgaaaccccgtctctattaaaaatacaaaaaattagccaggcgtggtggtgggagcctgtagttccagctactccggaggctgaggcaggagaatggcatgaacctgggaggcagagcttgcagtgagccgagatcgcgccactgcactccagcctgggcgacagagcgagacaccgtctcacaaaaaaaaaaaaaaaaaaaatcagttaaaataaataaaaataaaaacaaatagggctgggcgcggtggctcacgcctgtaaccccagcactttaggaggccaaggctgacggatcacgaggtcaggagatcgagaccatcctggctaacacggtgaaaccctgtctctactaaaaatacaaaaaattagccgggcgtggtggcgggtgcctgtagtcccagctactcgggaggctgaggtaggagaatggcgtgaacctgggaggcggagcttgcagtgagccgagattgcgccactgcactccagcctgggcgacagagcaagactccgtctcaaaaataaacaaataaataaataaaaacaaatcggttaagtgtcacattctattcaagctgaactgacagtgctgaactaaa

SEQ ID NO: 684495 - DNA, 1080 bp, Homo sapiens
cgtgaaaatcagcagtttattcattttcagtctttgttgtttgtttaacacattcagcttcccaaaatagcctattgtcaacaggctcatggccgatttccccagaatgactcctgctctaccactgatgaatacagtattaccattacagatggattttgaacagacacatttctgtaatccattgttaaaataacaatcattctaatcctgtagaagctgaacctgatgcaacaaaaacaaaagccaaaagcctcccagtgttactccaaggttggtttctagtctttagatggtcactgaggtgctaaaaatggtacagtctacccagcatgataaagcccttccatgctaggtctttggtttaaaaacaaatcagttggccgggcrcggtggctcacacctgtaatgtcagcacgttgggaggccaaggcgggtgaatcacgaggtcaggagatggagaccatcctggctaacacggtgaaaccccgtctctattaaaaatacaaaaaattagccaggcgtggtggtgggagcctgtagttccagctactccggaggctgaggcaggagaatggcatgaacctgggaggcagagcttgcagtgagccgagatcgcgccactgcactccagcctgggcgacagagcgagacaccgtctcacaaaaaaaaaaaaaaaaaaaatcagttaaaataaataaaaataaaaacaaatagggctgggcgcggtggctcacgcctgtaaccccagcactttaggaggccaaggctgacggatcacgaggtcaggagatcgagaccatcctggctaacacggtgaaaccctgtctctactaaaaatacaaaaaattagccgggcgtggtggcgggtgcctgtagtcccagctactcgggaggctgaggtaggagaatggcgtgaacctgggaggcggagcttgcagtgagccgagattgcgccactgcactccagcctgggcgacagagcaagactccgtctcaaaaataaacaaataaataaataaaaacaaatcggttaagtgtcacattctattcaagctgaactgacagtgctgaactaaa

SEQ ID NO: 684496 - DNA, 1080 bp, Homo sapiens
cgtgaaaatcagcagtttattcattttcagtctttgttgtttgtttaacacattcagcttcccaaaatagcctattgtcaacaggctcatggccgatttccccagaatgactcctgctctaccactgatgaatacagtattaccattacagatggattttgaacagacacatttctgtaatccattgttaaaataacaatcattctaatcctgtagaagctgaacctgatgcaacaaaaacaaaagccaaaagcctcccagtgttactccaaggttggtttctagtctttagatggtcactgaggtgctaaaaatggtacagtctacccagcatgataaagcccttccatgctaggtctttggtttaaaaacaaatcagttggccgggcacggtggctcacacctgtaatgtcagcacgttgggaggccaaggcgggtgaatcacgaggtcaggagatsgagaccatcctggctaacacggtgaaaccccgtctctattaaaaatacaaaaaattagccaggcgtggtggtgggagcctgtagttccagctactccggaggctgaggcaggagaatggcatgaacctgggaggcagagcttgcagtgagccgagatcgcgccactgcactccagcctgggcgacagagcgagacaccgtctcacaaaaaaaaaaaaaaaaaaaatcagttaaaataaataaaaataaaaacaaatagggctgggcgcggtggctcacgcctgtaaccccagcactttaggaggccaaggctgacggatcacgaggtcaggagatcgagaccatcctggctaacacggtgaaaccctgtctctactaaaaatacaaaaaattagccgggcgtggtggcgggtgcctgtagtcccagctactcgggaggctgaggtaggagaatggcgtgaacctgggaggcggagcttgcagtgagccgagattgcgccactgcactccagcctgggcgacagagcaagactccgtctcaaaaataaacaaataaataaataaaaacaaatcggttaagtgtcacattctattcaagctgaactgacagtgctgaactaaa

SEQ ID NO: 684497 - DNA, 1080 bp, Homo sapiens
cgtgaaaatcagcagtttattcattttcagtctttgttgtttgtttaacacattcagcttcccaaaatagcctattgtcaacaggctcatggccgatttccccagaatgactcctgctctaccactgatgaatacagtattaccattacagatggattttgaacagacacatttctgtaatccattgttaaaataacaatcattctaatcctgtagaagctgaacctgatgcaacaaaaacaaaagccaaaagcctcccagtgttactccaaggttggtttctagtctttagatggtcactgaggtgctaaaaatggtacagtctacccagcatgataaagcccttccatgctaggtctttggtttaaaaacaaatcagttggccgggcacggtggctcacacctgtaatgtcagcacgttgggaggccaaggcgggtgaatcacgaggtcaggagatggagaccwtcctggctaacacggtgaaaccccgtctctattaaaaatacaaaaaattagccaggcgtggtggtgggagcctgtagttccagctactccggaggctgaggcaggagaatggcatgaacctgggaggcagagcttgcagtgagccgagatcgcgccactgcactccagcctgggcgacagagcgagacaccgtctcacaaaaaaaaaaaaaaaaaaaatcagttaaaataaataaaaataaaaacaaatagggctgggcgcggtggctcacgcctgtaaccccagcactttaggaggccaaggctgacggatcacgaggtcaggagatcgagaccatcctggctaacacggtgaaaccctgtctctactaaaaatacaaaaaattagccgggcgtggtggcgggtgcctgtagtcccagctactcgggaggctgaggtaggagaatggcgtgaacctgggaggcggagcttgcagtgagccgagattgcgccactgcactccagcctgggcgacagagcaagactccgtctcaaaaataaacaaataaataaataaaaacaaatcggttaagtgtcacattctattcaagctgaactgacagtgctgaactaaa

SEQ ID NO: 684498 - DNA, 580 bp, Homo sapiens
acaggcgtgagccaccgtgcccggcctcttgcacattttttaattgggtggtttgtctctataatattgagttgtaagagttcttaatattgatacacatcctttatgtgatttgcaaatattttctttcagaaagtggcttgtcttctcaactttttactgtcttttgaggcccaccaccatgcctggctaatttttaaaattttttgtagagatgagatctcaccacgttgactgggctggtctcaaactcctaacctcaggtgaycttctggccttggcctcccaaagtggaaggattgcttgagcccaggagtagaagatcagcctgggtaatatagtgagaccccatctccacttatttaaaaaagaaaaaaaaaagtctaccttcaatgccttttgctaccaagaaccccaccctttcaatcatcaagctcttgtctttattttatccaaaaggcacaaacccctctgtgctgttatttttaagagctttattgaagtataataaacatggcataaaattcatccattgaacaattcaatgattttggcaaccatcatcacaatccagctgaaa

SEQ ID NO: 684499 - DNA, 1432 bp, Homo sapiens
ttttttttttttttgaggcagagtctcgctctgtcgtgcaggctggagtgcagtggcgcaatctcggctcactgcaagctctgcctcccaggttcataccattcttctgcctcagcctcctgggtagctgggactacaggcgcccgccaccacgcccagctaattttttttgtatttttagtaggcacggggtttcaccatgttagccaggatggtctcgatctcctgaccttgtgatccacccgcctcagcctcccgaagtactgggattacaggcgtgagccaccgcgcccggcctaaaacctctttctaaagagaatttgagacaaatgcaacagcatattaaaacaatagaatagtagaagtaaggcttatctttagaatgcaaagaactctactaatattcctccacattggtagatcaaggaagtaaattcataagattatctcacttgctacctgtaaggtcatatagtaaagctcagtattattttgggtgtctgcttctggctaagacagactagccagtgtcagaccaaccctgccgccgggaactaaaatgcttaggtaaataataaaaagcaactgtttgaaggtattagaagctactaggacactgaagactttgaggccaagatcctagagagaagggaggtctaaagaggcagaataaacatttggtgccacatgacccctcagaagcatttgccagcttcagtgctaggactgaaaacctgaacaaaaagctgaggttgagcagctaagcagagttttcaatagatgtcagaggcgggggtcacaaaaacgggagttcagggatgacagaccctggtaaacatcccaggcttttggttggaaccacccttcttaccccctaaaaaccccaactttttaccctaggtgtatggtgaacctaaaaattttcctgaaatccagccctcacaaaacacaaaaacttagttttgaattggctgaaatagattaaagtgattcacccttgctcttaaatgcttgtcagaagcaaaactaaatcctctctagaggaaggtaacattcacagcctcagcctatctccacagttttgtgcatgcaagattaacattcagtcaaaaactaagcatataaaaagaggcaggcgataaggttacccacaggagatctagatattagggttatcmgacatggaccttaaggtaatgttgataaatatgtttagtaaattaagtgacaaatggaggatttcagaaagaactggacactattaaaaaagttaaatggaaattctggaattgaaaagtgcaatatagggtgacaatagtttacaataatcttttgtatattttaaaatagctagaagagaagaatttgaattttttaacataaagacatttaaggtgatggatatcccaattacactgatttgatccttaca

SEQ ID NO: 684500 - DNA, 649 bp, Homo sapiens
ttgagagatatttgggttgtttccacctcttggcaatggccaattggtttttgacaaaggtgcaaagcaattagtgaagaaagggtattcttttcaacaaatgatgttgaatcaattggatattcatgtgggaaaaaaaaggtgcatcaacctaaacctcacatcttataaaaacatgaatgcaaaattgacttagatctaaatgtagaacttagaactgtaaactcctaaaagaaagaacaagaaaaaatctttaggacctgtgggtaggtaggcagagaattcttagacatgactggaaaagaatttatatataaattcttatatataagaaaaataaattagagttcatcaaaattaaaaacttttgttcttccaaagacactgttaagggactgaaaagccaaactacagactgggagaaaatacttgtaaatcacatatccartgaaaggacttgtatcccggctatgtaaaaagctctccaaacttaacagtaagaaaacaacacaattaaaaaaatgggcaaaagatatgaacagacacttcaccaaggagaatttagagatggcaaataagctcataaaaagattgaggggcatctggacctgaacttgtatgtgtgaatgagtttgtgttgtttagagtt

SEQ ID NO: 684501 - DNA, 625 bp, Homo sapiens
ttttatttatagtagtagttaaatctgaatgtgtatggacaaaaatatttaattgctcagtaaactgcttaacttcaaagatagttattgaccttataaataaatatttcaaaattttgattcggaagactaagtctggacgtagacattataatgctatcaaagaagtttgatctctgttttgactaaactagaggaaaaatgattggatgtgtttattcttttctaagcagaatggtttaactttgtactctttgaaaaataatgctgatttataaatctctgcctataacagaatggaaaccttatgaatgaattgtgtttctctgtcctgagctggagaagggaatgagcaggctgacacgttgcacagccccaggtggcgccattctctcacgcaaggatggggctgcagggtgagcagcgtgggctgcagtgtgtcagtcccaggagtgagggagtggcaagcaccacagattaccacgtatgtgtggaagacattcgtacycttatctttactataaataaattcataaaagttaacaaaggggtacacagtatggtctttggaaatataataaaacatcaactaacttggactaattgtgaggaagagcagaacaaa

SEQ ID NO: 684502 - DNA, 2559 bp, Homo sapiens
gacttcaactagtctaccaaatatttctcagatgtccactcatttattctyaatatgttcactgagtccaatgagacacacaatatgtgttctctgatttcttgcaaatcacttcttaattactaaagactagtggtttctatatttatcaatattgtcctctatgtccttgatgtattatcactattgttcataattttaaaattaatttagatttataactaaccagagtttacctagatgagctgcacacacaaaaaaattattttcaagatctattataatgtgggggctatccacacaaataaagtaaattggagaattgttcaacttatgactttggcaactatagccagacaagccaggtaactcaggctaattatttgtacagctttttgctaaatctaagtgtgcatttaacagaataatccacatcaaattcctcttttctccagaggagcatagccttttcccatttatttttatgttttcagttgttgcttgtaactatgacctcatgttcctgttgattcaattccaaaagtcctgcttcattagattacaaaaaaaaaaaaaaaagcaccttcaaatatttagactaacgcatcctgtgtattaccagtctggttgtcaattatggtgaatttcatatgaggaaacagtgatcagccgtaaaaccacagaaaatggagtcccccacccccagtctctctttaaatgggtggagtttccttggggcagtcttaatggccttgtcagcccgtcttcctaatcactgatgcttgctgatacagcgcaccaaatcacaatttatttcacagtcttgttctatcagaaagaaagaacttttgatttactgctaattagaataggcatgtttccccagaaacaggcaagtttgagggatgatgtaaccaaaaccaggtttttgtgataagtcagaaagatttaatgtgatagaaaaggcattattttctctgtgaaatacacaatatcgtttctgtatcagacgggaaagactgaaaatactgaagtcagttttcttacatttgaaagacagacaggaaattttttcagaatgctaaatcaatccagaaggtatgtataaaaaattgtcggtttctgactcattgacaaacagatagtaaataaacaggtatagaatttctatcactattcagaaagtgtgtttgcctgtttggctgggaattgaatcagaaattacaagttagttacaaatagtgattcatttgagaaaaaggaaaaaaaaaagtcataaaatgtgaattgtgtagttcccaaacataagcattttggtatggaccacaaagagagcaactcaacaaccttgcaactgtctaagtataaaaggcaaaaattctgtggttaaaaaatgctttcagtcattgtatttatatcactcaaaattcccaaggttacaggttgctgtttttagatatcctcaatttcagtgctaccaattttatctgaagatttggtttatttgggggccagggggtagtttggggagaggatattatattccaatagttttactcagaaaacaaatgcaagtatgtctgaagctcactctaatatacattagaggaatggtgcagtagtgtttcaaaaatctgtatctattggtattataggctcaaggaaaaaatcccctgtgtattttgagaaatgacagtgaaatgtatatttctcacaaacacatcaataaattccccagtaaataaagtgaacttggactggtccaactaatagaccagccttgagacccagggcaattatgaaaattgtacctgaagccctcaaaattctgctttactttttaaaaactgaatctattccagagtataccactcaggggcctttaattaattcagtctgtaagatttaatagtcaggtctcaagcctgtattccacaatgtatccatttgcaaaaggctactgagcatttactttgttcagaatccttttatataagtatatgacatagcctctggaagttaaaaaaaaaaaaaaaaactatgtgactataagctttgtttgcttgttttggtttcctgctttaaaaatactgaactaaacagccacacagtatagctagtcattaagctatatacacatatataattatatatatatttttttatttactgaaaaagcctattttaatataaaatacatatattttatttactaaaaactattttattataaaatacgtcttttttaattactgaaagaggctatttttaatagattagaagacagtttgagatttgtttcaatccagacagaaaacaatttttatttagggctaccttttctctgagagaatacatgtaacatgcagaagtatataacttgctaaataagatggaaaaaatctctgacattgagattttctagtctcaaacttttccaccaaaatacccataattggtacctagaatagaagaagcttctgctcctgaagtgtctgattgtttagcctaaaaccagacactcaaaatttaatgtttttgaaggctcatatttttaaa

SEQ ID NO: 684503 - DNA, 1089 bp, Homo sapiens
tggtacaaaggcctctctgtgctttcagatcagaattctaaaagacatataatttggacttctgaattctaaattgttaacttgagaccaaacaaaaaatgtctgaaaatatttgccccaggcaggttagaccccacggccaggtctcaataccagtgcaacaaagggatataagtcccattttcagtgagcaatatcagacggtaaaggattagggtctctcgagtcagactgacttccatctataaaccacccctgccatttattagctctgtgcatttgaacaagtaatttaacttccctttgcctccatttctaccaaaatgttgtgagaatttcatgaggtaagaatatgagaaatgcctagcagggtacagaaaattatatgcattcaacaaatatttgttgcattctatttttcccaaacttcaagctgcctggagagtaagagaaaaagcttacactttttgatacgtgccatttctgtttgcagagcttttctttctgaggcagccaggctactatcaccatctagaaaattagaacaaagtaaagaagcattgttgagaaggagcctcagaactgtgcatatacaagggagtggagtatctttttcaaactgaaaaaaaaagcttattttacattgatgtttacactttgaaggaaaataaaaaatactgaaaagcccaaagaatgaaaaatcgctatttccatccaaccccaaatgtccctctttgtctgtttactgtatcccaaagtacgcatacatatcacatgcacrcatatactccctgattacctagcaatccatatgccaggttcttcacagatttttttttcaaataaattgttctatcaaaactaaaaagaaatctcttgaggcgttactctattatgacctggtgaagagtgacgaaaaagattgcagagtttttgtctttggagaggttttgcttttgatgtcttttgttttgtttttgttttttccaggtttgttctgttagtcaggaaaccaagatttttgtgagttgcccattatccaagtggggagggcatgagcaaatcacttgttgtagtagatggcaaaaa

SEQ ID NO: 684504 - DNA, 595 bp, Homo sapiens
tttctttctctttygccttcaaaagattaccaaagcaaaaatttcaggaaatttatttactaatagtcataattatatttttcaattgtaaatcacttccaaaaaaggtattgatttgacagacgtagggatataagaaatatcttgatggcaaaaagtgtcctacacatcatgggcctgtaacagtgaaagaattggattttgcagggacagtgatcttaacaagattgagaaacacaagctgtagagaagattcccactctttcagcacattctttcagctcttaccatgttccttacattataagcaagagaaagggggatatttaataacagcacagtaatatttactgtagactaatctaattcaagaaaggctccatgcttagatgttttatttatcaattcctttacagtgcccgatcactttagccgtaactactgtggaataaatttggaaaatttaaataaatggtttattatttccctgacaactagggattttttttcatcatgctcatactatcatctctttctttctcatgtttattctcttttggttttgcttgtgtctttatttacattttcttttttc

SEQ ID NO: 684505 - DNA, 595 bp, Homo sapiens
tttctttctctttcgccttcaaaagattaccaaagcaaaaatttcaggaaatttatttactaatagtcataattatatttttcaattgtaaatcacttccaaaaaaggtattgatttgacagacgtagggatataagaaatatcttgatggcaaaaagtgtcctacacatcatgggcctgtaacagtgaaagaattggattttgcagggacagtgatcttaacaagattgagaaacacaagctgtagagaagattcccactctttcagcacattctttcagctcttaccatgttccttacattataagcaagagaaagggggatatttaataacagcacagtaatatttactgtagactaatctaattcaagmaaggctccatgcttagatgttttatttatcaattcctttacagtgcccgatcactttagccgtaactactgtggaataaatttggaaaatttaaataaatggtttattatttccctgacaactagggattttttttcatcatgctcatactatcatctctttctttctcatgtttattctcttttggttttgcttgtgtctttatttacattttcttttttc

SEQ ID NO: 684506 - DNA, 595 bp, Homo sapiens
tttctttctctttcgccttcaaaagattaccaaagcaaaaatttcaggaaatttatttactaatagtcataattatatttttcaattgtaaatcacttccaaaaaaggtattgatttgacagacgtagggatataagaaatatcttgatggcaaaaagtgtcctacacatcatgggcctgtaacagtgaaagaattggattttgcagggacagtgatcttaacaagattgagaaacacaagctgtagagaagattcccactctttcagcacattctttcagctcttaccatgttccttacattataagcaagagaaagggggatatttaataacagcacagtaatatttactgtagactaatctaattcaagaawggctccatgcttagatgttttatttatcaattcctttacagtgcccgatcactttagccgtaactactgtggaataaatttggaaaatttaaataaatggtttattatttccctgacaactagggattttttttcatcatgctcatactatcatctctttctttctcatgtttattctcttttggttttgcttgtgtctttatttacattttcttttttc

SEQ ID NO: 684507 - DNA, 1296 bp, Homo sapiens
attgatgcccatctttagagaaagaagcaatcctttcacctgggatttcaaaaatgattagatgtaaatgcactgctttctaaacaaagtccttttcagcaaattgcattgagaagcaaatgcacgcatgtctcttggatttataatactttctttgaaatcttcaggaaacccattttatcattcctggagtatgaaaatcaaaataagatccttggcaaatgttttctttagtagtgactttctaaaaattatcattattattctctgtcaaaacagcccatcaaaaatttcccccgaggagatttccttgattcagtgagttagggataataaattgtccttccttcttctgatgagaggaaataagcatggattttggagtcctctcacatctcagcttctttgcttatttctgtgtaattctgacagatcactttgtgtattcagtcatactctaaacactgctcgaacatctttgtaatctaaggttaaaaaccatctatatatcttcagagataaatgtccattctgcattgttttatttgtttctaagaatcaaaggctagaaatcaaaatgacacaggcaaatagtggagcttctcagagaattctgagygccctatacaccacatgaatattgcacagctctctgtttctcataagggacataaaagctaagaatgcttggataatctctgaagtccctttcttcagagatctgggaattttattagaaaaccatgagtaataggtatttttttacttctgttcacaaaagaatcccagatacctagaatagtgcctaacacacaatttgtgttctattaattcttaaacaaaatacctttagtaagtggggaaaaaaactaaactaaaaactgaaaatctctgttaccagttataagaaactgtaaggcttgctgtctggactagaaaatatgctcaaggagttaaatactttcatacaaacacttcggtatctatgcgccaaaatcaactggtaataaaaccattgtttttgtgtgtgtgtgtgtgttttctttttcatataaattttaggagtacaagtgcaattttgttacatggatatattgtgcagatgaaatctgggcttttagtataaccatcacctctatgtgatgagagataggcatccaatttcattcttctgcatgtggcaatccaattttcccagcaccgtttattgaaaagggtgtttcttccctagccattgtttacttctagagacagcatcccccgccatgtttagtcatctgtaagcttaagtgatca

SEQ ID NO: 684508 - DNA, 1296 bp, Homo sapiens
attgatgcccatctttagagaaagaagcaatcctttcacctgggatttcaaaaatgattagatgtaaatgcactgctttctaaacaaagtccttttcagcaaattgcattgagaagcaaatgcacgcatgtctcttggatttataatactttctttgaaatcttcaggaaacccattttatcattcctggagtatgaaaatcaaaataagatccttggcaaatgttttctttagtagtgactttctaaaaattatcattattattctctgtcaaaacagcccatcaaaaatttcccccgaggagatttccttgattcagtgagttagggataataaattgtccttccttcttctgatgagaggaaataagcatggattttggagtcctctcacatctcagcttctttgcttatttctgtgtaattctgacagatcactttgtgtattcagtcatactctaaacactgctcgaacatctttgtaatctaaggttaaaaaccatctatatatcttcagagataaatgtccattctgcattgttttatttgtttctaagaatcaaaggctagaaatcaaaatgacacaggcaaatagtggagcttctcagagaattctgagcgccctatacaccacatgaatattgcacagctctctgtttctcataagggacataaaagctaagaatgcttggataatctctgaagtccctttcttcagagatctgggaattttattagaaaaccatgagtaataggtatttttttacttctgttcacaaaagaatcccagatacctagaatagtgcctaacacacaatttgtgttctattaattcttaaacaaaatacctttagtaagtggggaaaaaaactaaactaaaaactgaaaatctctgttaccagttataagaaactgtaaggcttgctgtctggactagaaaatatgctcaaggagttaaatactttcatacaaacacttcggtatctatgcgccaaaatcaactggtaataaaaccattgtttttgtgtgtgtgtgtgtgttttctttttcatataaattttaggagtacaagtgcaattttgttacatggatatattgtgcagatgaaatctgggcttttagtataaccatcacctctatgtgatgagagataggcatccaatttcattcttctgcatgtggcaatccaattttcccagcaccgtttattgaaaagggtgtttcttccctagccattgtttacytctagagacagcatcccccgccatgtttagtcatctgtaagcttaagtgatca

SEQ ID NO: 684509 - DNA, 577 bp, Homo sapiens
cagattccatttcttcaggatataaatgcacaataagaacaagtagcgaccaggctcagtggctcacacttgtaatcccagcactttgggaggccaaggtaggcagatcacctgaggtcaggagtttgagaccagcctgaccacatggaaaaaccctgtctctactaaaaatacaaaattaactgggcatggtggtgcactttgggaggctgaggggggtggatcactggagtccaggaactcaagaccagactgggcaacatagcaagactccatctctaaaaaaaaaaattaagattaaccagggtgtggtggcatatgcctgtagtcccagctacgtggaggctggggtgaaaggattgcctgaacccaggaggtcaaggcggcagtgagctgtgagagcacagcctgggcaacagaatgtcaccttgtctctaaaaaaacacaaaaaccaaaacaaaacaactcacygcattattttaaaaaaaacatatgtatcttatgggccgggtgcggtggctcatgcctgtaatcccagcactttgggaggccgaggtgggaggactgcttgagctca

SEQ ID NO: 684510 - DNA, 617 bp, Homo sapiens
gagtttgagaccagcctgggcaacatgctaaaagcctgcctctacagaatacgcaaaaattagttgagcatggtggcgcacacctgtggtcccagctactcgggggtctgaaacaagaggactgcttgaccctgggaggcagagttgcagtgacctgagattgcaccactgcactccagcctgggagacagagcaagaccttgtctcaaaaaaaaaaaaaattaataaacatgttcaaacttaatgattgtatatatygcaaaacatttttacatttggtttcatgtgatggccttaagattggatttggttttgtgccatgctgtgggataaagtggagtaaggcagcagccagagttcgtcttccggctgccactcgctgtgtgagctcaggcaagtccttcggcctctgaatttctagttctgcaactgtaaaatgagaatgatctattattagggacctactgttactattgtgacgaggacatgagataacccatgtaaagccccacagtacctgacttgtattaaccatattattaatattagttattaatattcctaatgggctttatgcacctaagtagctgcatagaaaaataaagcagtataaactt

SEQ ID NO: 684511 - DNA, 602 bp, Homo sapiens
ggtgagacccgcagggcagggccccgggaggagaaggaggaggaggacctggcgggaggaggaggaggacctrgcgggaggaggaggaggacctgtcgagagcagcgagccttttaacttggggcggagttatgcacagaagtgacacaaagagccctcactaatacagcgcggtggaaaatacggactttcccatcccagctctgccactaaccagccggcagccttgggcaagttccttacaatctctaagaatcaatgtccttcactcaaaagtaaaaattgaaaaatgggatcataatatcgaccagaaaaggttgctataccattttaatgaggagatgtgtaacacagtgcttggccctcaataaatgcttagaaaaaaaaattagaggtggcgatttaatgacccaatagcagaggaattgctaagatgtgggtttaaaaagagagagcaaagaagtgaagaaggaagagaggaaggttgtagtcctcaccgggctagctgtctggatgaagcgaattatattttacttctctgattcttagtgtttcggttagttggttgttgggtttgttgttgtttaactttttttttgaga

SEQ ID NO: 684512 - DNA, 602 bp, Homo sapiens
ggtgagacccgcagggcagggccccgggaggagaaggaggaggaggacctggcgggaggaggaggaggacctagygggaggaggaggaggacctgtcgagagcagcgagccttttaacttggggcggagttatgcacagaagtgacacaaagagccctcactaatacagcgcggtggaaaatacggactttcccatcccagctctgccactaaccagccggcagccttgggcaagttccttacaatctctaagaatcaatgtccttcactcaaaagtaaaaattgaaaaatgggatcataatatcgaccagaaaaggttgctataccattttaatgaggagatgtgtaacacagtgcttggccctcaataaatgcttagaaaaaaaaattagaggtggcgatttaatgacccaatagcagaggaattgctaagatgtgggtttaaaaagagagagcaaagaagtgaagaaggaagagaggaaggttgtagtcctcaccgggctagctgtctggatgaagcgaattatattttacttctctgattcttagtgtttcggttagttggttgttgggtttgttgttgtttaactttttttttgaga

SEQ ID NO: 684513 - DNA, 3079 bp, Homo sapiens
ctgacaataaaggcttgtttttcaagtagctcattgggattgatgctttctaatctttcagcctgtattttcaaataaaacttatttttttttcttagctggcacagcaaaaattgttaattatggttatcctatatgggatttgggttgttactatattttagtaatgattaaaacatttagtgataataatgtatgtatgtgtttttttgaaatacatggaggttgatccaaatggaaactttgcatttaatgtttcaaaactaagcctatgattctgcttcccaaaactgagtactagagacagaggcaggtagttgcagtagttacagcatcaggattatgtatccaagctttcttaaaagcttaatatatatatattaatatttagtaaaatacgtatttggcttgtcctttaaagcaataaggaggaaaccactgactggatattagagaaaaaaaaactgaactctccttttccaatttcctctcccccattcagatattacaggcaaattttttttgctcttactagagttttactttagtttaaattgtttagataatagttctctatcataagtatgttagagagtcagtaatataatttcaatataacatgtacaattgaaatagagtctattgatgtataagataaatgaatataaaaatttatttggaaaaattacggtgatggaatttgaaataggtttcttggtatgtctgttacaaagatttactcaaagtaacatatttaataataaaattctttccagcaatttctctttaaaataaatcctgaaatttatttgcagcagacagtgcaactagtttgaagtgccaagtaaaatataaataaaatcctttatgctagatttgaaaagtatattcatcagtttactcttgtctggcattttctaagcatcaggaattggcaaggcgtaaaatttagagtgttttacctattagtatacattctttttcttttttgcttctttatggctattattatccagagatgggatcttgctatgttgctcaagctggaggaggacagtggctattcacaggcatgatccatgatcatggctcacttcagcctcgaattcttgggctcaagtgatctgtaagcctcctgagtagctgactatatgcatgtgctactgtgccccgttcttttctgttgttcttgttaagctgacttttgggtgtatgggaaatataccccagccataagaaaagtagatattcctttttccccttgattagcattttctcttacttgctatcttttttacattttggttatttctgtagtttttgtgagtatagatgtattttgaagtataaaatcacaaattttattaaatgattacatttaaaacttctgacataatataaattaacaatagattttaatgcaatttttgacatattttgagctgatttttctgattcacagtagcagagctagatataaaggaggctgattacatgtcatctcctcatgtatctgggaattcttttactgtgcactaggaggatagaasggtgcttgtgggcggatccagggacatgcccagctgaagaatattctatcccagtgcaatgtgatgaattatactctcccaacctggcaagtttctgatgacttctctctgccactttatgacagcttaatttctgaattatattttagggaatcactgaaattattatttatactgtccttaaaaattattatacaaaaatctcagataacgtatttctttcagataataattattcttgtatatttaataattttcttaatgcactataatataatttttacagtttggggggaaaccatttatgagattagctgagatagacttacaaaaatattatgctcattgaaaagttatatgattggttctttacgagtttctattaatgtatacctactaattcaccattcacttattatctgctggaatttgctagcagataaacaacagtagatatcgtaagtataagaaaaatatgtgaagagaaatattagacacatacaatttcagctatttttatgctaatctgagaaaaagaatccctaactccctttcaggacaaaacacttctacctaatttacaaaacactgacatttgagaatcaatttaaaaagtcacttaaatcactacaatgccaatttgcggcaatattcactagtcaaaaggaggaaagtctcacgatttcaggcaacttggaagcttccaagtgtggcagatcatatagattctacctcctagctgctgcaagagcaaaacgtgaacttctgactaggctagaattattaacatggacatacacaaaaacacacgcatctaactgaaacagcagacagtaaagctgtggataagagatactactttgtgtgtgtgtgtgtgtgtgtgtgtgtgtgtgtgtgtgtgtttataatttcacagtgtagtcatatttgttaaaatcactttttctatttatgttttagaattaaatatatcaggattcaaaaaagtgtcctatatgtaaagtagtacaatatactgaaatattttaaatttatttgcagattttagaaagaaagaataatgaaatagaagaactgaaaactttatacaggagtaaacaacatgaaactgaagagactattagaaagcttgaaaagaaaggtgatgttgtgttgttacatacatcttttaataacatttccattttattttagtgatgtggagaaaaaaatttgatttctgaccttttatagtatgagataggaatgtttatgtggggtttcatcagtggatatatttatataggcttccatatgaaggggcaaaaactgtgtttatttgtgtgtgtgtgtgtgtgtctgtgtgtgtgtttgtgtagtgacagtgatggagtagtactggtggttggtttagatacagagttggaagagtatgttgctttcactccctcttcttaactctagcctcattgggatacagctgccatagagtattgagggcagtcatagaattaggacttactggccttcatgaggaagtcaaaggaaat

SEQ ID NO: 684514 - DNA, 658 bp, Homo sapiens
tccccaatataaccatttaatgggtatctgctgagtgactatatggataaacaagatggtggtattacaaagtgttttttaacattttgtgatataaaccatatgtaattttaacttgtatgtattctaaatagtttaaaggttaacttttttcattttctattatktttgtattttacaagtagattgacttgataaatgttaaaacagcagatagtgacaaaagcagcaacaaacatttgccatttaactactcttttactttctatatcttatagcaaaaaagaatttagaaacttaagtttcatagtcagaaatctatagaactctgtttttcccgagatggtggaccagaggcctttccaacgtgcctcatctacttggaagaattttgtccaagaaggaaatgaaaaatcaacagaaagtgaaagaaaacttcagatactggggaagagaaggtgagcagggagacagtggctaggtctggttgagaactgagtgaagctccaatataggagaggggaagagaatgtccctctgcaatctacctgtctactgaggaactgtgcaacctaggccatggggaacaccctatccctcccaagccctggatataactaggagagaggccaggagcgtgtgaaaaggaatgatacca

SEQ ID NO: 684515 - DNA, 658 bp, Homo sapiens
tccccaatataaccatttaatgggtatctgctgagtgactatatggataaacaagatggtggtattacaaagtgttttttaacattttgtgatataaaccatatgtaattttaacttgtatgtattctaaatagtttaaaggttaacttttttcattttctattatttttgtattttacaagtagattgacttgataaatgttaaaacagcagatagtgacaaaagcagcaayaaacatttgccatttaactactcttttactttctatatcttatagcaaaaaagaatttagaaacttaagtttcatagtcagaaatctatagaactctgtttttcccgagatggtggaccagaggcctttccaacgtgcctcatctacttggaagaattttgtccaagaaggaaatgaaaaatcaacagaaagtgaaagaaaacttcagatactggggaagagaaggtgagcagggagacagtggctaggtctggttgagaactgagtgaagctccaatataggagaggggaagagaatgtccctctgcaatctacctgtctactgaggaactgtgcaacctaggccatggggaacaccctatccctcccaagccctggatataactaggagagaggccaggagcgtgtgaaaaggaatgatacca

SEQ ID NO: 684516 - DNA, 658 bp, Homo sapiens
tccccaatataaccatttaatgggtatctgctgagtgactatatggataaacaagatggtggtattacaaagtgttttttaacattttgtgatataaaccatatgtaattttaacttgtatgtattctaaatagtttaaaggttaacttttttcattttctattatttttgtattttacaagtagattgacttgataaatgttaaaacagcagatagtgacaaaagcagcaacaaacatttgccatttaactactcttttactttctatatcttatagcaaaaaagaatttagaaacttaagtttcatagtcagaaatctatagaactctgtttttcccgagatggtggaccagaggcctttccaacgtgcctcatctacttggaagaattttgtccaagaaggaaatgaaaaatcaacagaaagtgaaagaaaacttcagatactggggaagagaaggtgakcagggagacagtggctaggtctggttgagaactgagtgaagctccaatataggagaggggaagagaatgtccctctgcaatctacctgtctactgaggaactgtgcaacctaggccatggggaacaccctatccctcccaagccctggatataactaggagagaggccaggagcgtgtgaaaaggaatgatacca

SEQ ID NO: 684517 - DNA, 673 bp, Homo sapiens
tattacatgcatgcataaatatattkcaggtatattgctctaacaacactaatcaaaagaaagctggagtcgtgatattaataccagacaaagcctattccagggcaaagaattttgccaacactaaagaaagtaaatttacagtacttaaagagccatatcaacaggaaacaaatgctgaaaataaaagaagcaaagacttattgaaatgcaggggtgaataaacacatgcacaattacatttcgagatttcaatatccctctctatcaataattgataggacaagtagacagacaagaataaagagctaggataactaggatttgaagaacactatcaagcagctaggcctaatggacacttatggactattccacccaatcaaagaagaatacacattcatttcaagagtacatggaacattatcaacatagactattctggaacataaaacaagtctccataaatttaaaaggattcacatcatgcaatgcatattttgtgatcattgtgaaattaaaaatcaataaaagaaagatatctgggaaatccccaaatatttggaaactaaataatgtttttctacacagcccatggaccaaagaaaaaataaaatgagaaattagaaagcattttggattaatgaaactgaaaacaaatatcaaaattaga

SEQ ID NO: 684518 - DNA, 673 bp, Homo sapiens
tattacatgcatgcataaatatattgcaggtatattgctctaacaacactaatcaaaagaaagctggagtcgtgatattaataccagacaaagcctattccagggcaaagaattttgccaacactaaagaaagtaaatttacagtacttaaagagccatatcaacaggaaacaaatgctgaaaataaaagaagcaaagacttattgaaatgcaggggtgaataaacacatgcacaattacatttcgagatttcaatatccctctctatcaataattgataggacaagtagacagacaagaataaagagctaggataactaggatttgaagaacactatcaagcagctaggcctaatggacacttatggamtattccacccaatcaaagaagaatacacattcatttcaagagtacatggaacattatcaacatagactattctggaacataaaacaagtctccataaatttaaaaggattcacatcatgcaatgcatattttgtgatcattgtgaaattaaaaatcaataaaagaaagatatctgggaaatccccaaatatttggaaactaaataatgtttttctacacagcccatggaccaaagaaaaaataaaatgagaaattagaaagcattttggattaatgaaactgaaaacaaatatcaaaattaga

SEQ ID NO: 684519 - DNA, 1332 bp, Homo sapiens
tcaactttgtagcctttattctcagtaagttagttttgttctgggagcagaaacaagggtgctggcagcaaattctaagatctgctcattcaaatactatagaaaacataaaagaagtgtaaaacatggttcctatcttgcaaaaactataatctgactaagggaaaagatgaaaatataaggagaaaaataaaatgatgcaatatcgtacacattaaatcttgtgacaaattttaagtgctaaaagaatacaaagaacgtaacaatgaagtaagaggctatataagaaacaattctcagaggatcaaatttatgtgtaagataggaaataaaggtatataagtaaaattaatgaaagttttaaacagtttaaagtttatgtaataattttatgctaaactaayttctgcctgtaatatgggtccataaataaaacaaactctagctcagcaaatacaaaagcaagtaatacttctatggtaaactaacaaaatattgagaaaattatccttaaagataaagcagtcatggtttatggtgaagaaaaattcctttaaaatctttaaattctttaaacttcaaaataaatcccacatatgatgctattttcgtttatgtccctatatttaacaaatgattaaaacttccatttataaattgtacaccatatatgcagagtttacatacaaactcactaatgtatttcattacagatgtagtattatatcagtatataataaggaaattacgttattcttgtaaaatgacaaaacctaaatattctggaataggtgaggaccacttcttgttattaggagaggaagaaagacagtatgaagtcactcaagcagaatgataagtaaaccaaagccagatcaaaggaataaagaaaaaaggctgaaatgtgaatctgaaatatttatttccttcaaaaacattatccatgccttgtcccagggcagttcaatatttcaaagtaactggaaaatattctcacttacattcatcactatgcacaaatagatcaaatttcaagcaggcaaattttctatttatcaaatataaatgtaatatttatcatgtgacagaagcttttctgctcattatagatgatttctaagtgatatgaaatgaaaagtcgcaatagatatgtcccactacttttagagaattgtattgctacaaaatataacatttatagtgtagccataatttttaaatctttggaaatgatgaagcagagtgaacatttgaatgtctaccctgctcatcacagttagggcagttcacatattatttgacgttatttctattagaaaagttactacattt

SEQ ID NO: 684520 - DNA, 1332 bp, Homo sapiens
tcaactttgtagcctttattctcagtaagttagttttgttctgggagcagaaacaagggtgctggcagcaaattctaagatctgctcattcaaatactatagaaaacataaaagaagtgtaaaacatggttcctatcttgcaaaaactataatctgactaagggaaaagatgaaaatataaggagaaaaataaaatgatgcaatatcgtacacattaaatcttgtgacaaattttaagtgctaaaagaatacaaagaacgtaacaatgaagtaagaggctatataagaaacaattctcagaggatcaaatttatgtgtaagataggaaataaaggtatataagtaaaattaatgaaagttttaaacagtttaaagtttatgtaataattttatgctaaactaacttctgcctgtaatatgggtccataaataaaacaaaytctagctcagcaaatacaaaagcaagtaatacttctatggtaaactaacaaaatattgagaaaattatccttaaagataaagcagtcatggtttatggtgaagaaaaattcctttaaaatctttaaattctttaaacttcaaaataaatcccacatatgatgctattttcgtttatgtccctatatttaacaaatgattaaaacttccatttataaattgtacaccatatatgcagagtttacatacaaactcactaatgtatttcattacagatgtagtattatatcagtatataataaggaaattacgttattcttgtaaaatgacaaaacctaaatattctggaataggtgaggaccacttcttgttattaggagaggaagaaagacagtatgaagtcactcaagcagaatgataagtaaaccaaagccagatcaaaggaataaagaaaaaaggctgaaatgtgaatctgaaatatttatttccttcaaaaacattatccatgccttgtcccagggcagttcaatatttcaaagtaactggaaaatattctcacttacattcatcactatgcacaaatagatcaaatttcaagcaggcaaattttctatttatcaaatataaatgtaatatttatcatgtgacagaagcttttctgctcattatagatgatttctaagtgatatgaaatgaaaagtcgcaatagatatgtcccactacttttagagaattgtattgctacaaaatataacatttatagtgtagccataatttttaaatctttggaaatgatgaagcagagtgaacatttgaatgtctaccctgctcatcacagttagggcagttcacatattatttgacgttatttctattagaaaagttactacattt

SEQ ID NO: 684521 - DNA, 1332 bp, Homo sapiens
tcaactttgtagcctttattctcagtaagttagttttgttctgggagcagaaacaagggtgctggcagcaaattctaagatctgctcattcaaatactatagaaaacataaaagaagtgtaaaacatggttcctatcttgcaaaaactataatctgactaagggaaaagatgaaaatataaggagaaaaataaaatgatgcaatatcgtacacattaaatcttgtgacaaattttaagtgctaaaagaatacaaagaacgtaacaatgaagtaagaggctatataagaaacaattctcagaggatcaaatttatgtgtaagataggaaataaaggtatataagtaaaattaatgaaagttttaaacagtttaaagtttatgtaataattttatgctaaactaacttctgcctgtaatatgggtccataaataaaacaaactctagctcagcaaatacaaaagcaagtaatacttctatggtaaactaacaaaataytgagaaaattatccttaaagataaagcagtcatggtttatggtgaagaaaaattcctttaaaatctttaaattctttaaacttcaaaataaatcccacatatgatgctattttcgtttatgtccctatatttaacaaatgattaaaacttccatttataaattgtacaccatatatgcagagtttacatacaaactcactaatgtatttcattacagatgtagtattatatcagtatataataaggaaattacgttattcttgtaaaatgacaaaacctaaatattctggaataggtgaggaccacttcttgttattaggagaggaagaaagacagtatgaagtcactcaagcagaatgataagtaaaccaaagccagatcaaaggaataaagaaaaaaggctgaaatgtgaatctgaaatatttatttccttcaaaaacattatccatgccttgtcccagggcagttcaatatttcaaagtaactggaaaatattctcacttacattcatcactatgcacaaatagatcaaatttcaagcaggcaaattttctatttatcaaatataaatgtaatatttatcatgtgacagaagcttttctgctcattatagatgatttctaagtgatatgaaatgaaaagtcgcaatagatatgtcccactacttttagagaattgtattgctacaaaatataacatttatagtgtagccataatttttaaatctttggaaatgatgaagcagagtgaacatttgaatgtctaccctgctcatcacagttagggcagttcacatattatttgacgttatttctattagaaaagttactacattt

SEQ ID NO: 684522 - DNA, 1332 bp, Homo sapiens
tcaactttgtagcctttattctcagtaagttagttttgttctgggagcagaaacaagggtgctggcagcaaattctaagatctgctcattcaaatactatagaaaacataaaagaagtgtaaaacatggttcctatcttgcaaaaactataatctgactaagggaaaagatgaaaatataaggagaaaaataaaatgatgcaatatcgtacacattaaatcttgtgacaaattttaagtgctaaaagaatacaaagaacgtaacaatgaagtaagaggctatataagaaacaattctcagaggatcaaatttatgtgtaagataggaaataaaggtatataagtaaaattaatgaaagttttaaacagtttaaagtttatgtaataattttatgctaaactaacttctgcctgtaatatgggtccataaataaaacaaactctagctcagcaaatacaaaagcaagtaatacttctatggtaaactaacaaaatattgagaaaattatccttaaagataaagcagtcatggtttatggtgaagaaaaattcctttaaaatctttaaattctttaaacttcaaaataaatcccacatatgatgctattttcgtttatgtccctatatttaacaaatgattaaaacttccatttataaattgtacaccatatatgcagagtttacatacaaactcactaatgtatttcattacagatgtagtattatatcagtatataataaggaaattacgttattcttgtaaaatgacaaaacctaaatattctggaataggtgaggaccacttcttgttattaggagaggaagaaagacagtatgaagtcactcaagcagaatgataagtaaaccaaagccagatcaaaggaataaagaaaaaaggctgaaatgtgaatctgaaatatttatttccttcaaaaacattayccatgccttgtcccagggcagttcaatatttcaaagtaactggaaaatattctcacttacattcatcactatgcacaaatagatcaaatttcaagcaggcaaattttctatttatcaaatataaatgtaatatttatcatgtgacagaagcttttctgctcattatagatgatttctaagtgatatgaaatgaaaagtcgcaatagatatgtcccactacttttagagaattgtattgctacaaaatataacatttatagtgtagccataatttttaaatctttggaaatgatgaagcagagtgaacatttgaatgtctaccctgctcatcacagttagggcagttcacatattatttgacgttatttctattagaaaagttactacattt

SEQ ID NO: 684523 - DNA, 1332 bp, Homo sapiens
tcaactttgtagcctttattctcagtaagttagttttgttctgggagcagaaacaagggtgctggcagcaaattctaagatctgctcattcaaatactatagaaaacataaaagaagtgtaaaacatggttcctatcttgcaaaaactataatctgactaagggaaaagatgaaaatataaggagaaaaataaaatgatgcaatatcgtacacattaaatcttgtgacaaattttaagtgctaaaagaatacaaagaacgtaacaatgaagtaagaggctatataagaaacaattctcagaggatcaaatttatgtgtaagataggaaataaaggtatataagtaaaattaatgaaagttttaaacagtttaaagtttatgtaataattttatgctaaactaacttctgcctgtaatatgggtccataaataaaacaaactctagctcagcaaatacaaaagcaagtaatacttctatggtaaactaacaaaatattgagaaaattatccttaaagataaagcagtcatggtttatggtgaagaaaaattcctttaaaatctttaaattctttaaacttcaaaataaatcccacatatgatgctattttcgtttatgtccctatatttaacaaatgattaaaacttccatttataaattgtacaccatatatgcagagtttacatacaaactcactaatgtatttcattacagatgtagtattatatcagtatataataaggaaattacgttattcttgtaaaatgacaaaacctaaatattctggaataggtgaggaccacttcttgttattaggagaggaagaaagacagtatgaagtcactcaagcagaatgataagtaaaccaaagccagatcaaaggaataaagaaaaaaggctgaaatgtgaatctgaaatatttatttccttcaaaaacattatccatgccttgtcccagggcagttcaatatttcaaagtaactggaaaatattctcacttacattcatcactatgcacaaatagatcaaatttcaagcaggcaaattttctatttatcaaatataaatgtaatatttatcatgtgacagaagcttttctgctcattatagatgatttctaagtgatatgaaatgaaaagtcgcaatagatatgtcccactacttttagagaattrtattgctacaaaatataacatttatagtgtagccataatttttaaatctttggaaatgatgaagcagagtgaacatttgaatgtctaccctgctcatcacagttagggcagttcacatattatttgacgttatttctattagaaaagttactacattt

SEQ ID NO: 684524 - DNA, 1332 bp, Homo sapiens
tcaactttgtagcctttattctcagtaagttagttttgttctgggagcagaaacaagggtgctggcagcaaattctaagatctgctcattcaaatactatagaaaacataaaagaagtgtaaaacatggttcctatcttgcaaaaactataatctgactaagggaaaagatgaaaatataaggagaaaaataaaatgatgcaatatcgtacacattaaatcttgtgacaaattttaagtgctaaaagaatacaaagaacgtaacaatgaagtaagaggctatataagaaacaattctcagaggatcaaatttatgtgtaagataggaaataaaggtatataagtaaaattaatgaaagttttaaacagtttaaagtttatgtaataattttatgctaaactaacttctgcctgtaatatgggtccataaataaaacaaactctagctcagcaaatacaaaagcaagtaatacttctatggtaaactaacaaaatattgagaaaattatccttaaagataaagcagtcatggtttatggtgaagaaaaattcctttaaaatctttaaattctttaaacttcaaaataaatcccacatatgatgctattttcgtttatgtccctatatttaacaaatgattaaaacttccatttataaattgtacaccatatatgcagagtttacatacaaactcactaatgtatttcattacagatgtagtattatatcagtatataataaggaaattacgttattcttgtaaaatgacaaaacctaaatattctggaataggtgaggaccacttcttgttattaggagaggaagaaagacagtatgaagtcactcaagcagaatgataagtaaaccaaagccagatcaaaggaataaagaaaaaaggctgaaatgtgaatctgaaatatttatttccttcaaaaacattatccatgccttgtcccagggcagttcaatatttcaaagtaactggaaaatattctcacttacattcatcactatgcacaaatagatcaaatttcaagcaggcaaattttctatttatcaaatataaatgtaatatttatcatgtgacagaagcttttctgctcattatagatgatttctaagtgatatgaaatgaaaagtcgcaatagatatgtcccactacttttagagaattgtattgctacaaaatataacatttatagtgtwgccataatttttaaatctttggaaatgatgaagcagagtgaacatttgaatgtctaccctgctcatcacagttagggcagttcacatattatttgacgttatttctattagaaaagttactacattt

SEQ ID NO: 684525 - DNA, 655 bp, Homo sapiens
ttgactataaatacaaacattatgctattattagatgttatactgatagccttcccaggcttgaatgtaatattgtgcttcaggacaatgtatacaaaaataaatggaaaaagttttatccacatttatgtcaagtgttttgtttggagagtgtactatacagaacaattaacttaaaaggatcaagtccatgtggaaaggaagactatcagaggagaatgcaaggaaggaaatgttttgcagatgtactgcatttaaattaataaaatctcattaggttttatgtttgccaataacggctggaaaagttaccatacattgtaggaacaattacccaaatcttcactgtctcattaggtttgtcatactgttttcattataatacattagaacttgcaagtgagccttcagtaatgacatattgttccaattctcctttcagcaggctctaagatattttagtatttgtgctataagccagcaggtgtcttcactttgctttttctgaatcagttttatacacagacctccagacacagaatggwatgtaaaagggctttcaacaaccacataaaactgagtctgattagagtaaagcaatacacactatttttatgattttatggtaattcaacgcacgaaaaatgtgcacctt

SEQ ID NO: 684526 - DNA, 909 bp, Homo sapiens
agaagtcagatttctccatagttgacagcagaagaaagagtagagttattaacataattactatgattattattaatgtaaaaataatattaaaagttaattttatttttttgatggtaaatatgatagaaaataaaatamgttaaaatcattaaaagcataaatacatattctatgcaaattatttagagtatactacatccttcaaattttgttcaaatttttttccactgaaagcagcataaataatgttataggtttaatataatataagtatagtatataacatatattatatattataagtttgtggtttttttacattttcaaatgatatatttctttttatgatccatgtaagttagtggcaaggcttataaattattataagttattaattaactttctgtgcctgaaaaatatatatatatattcaatttaaatctagccagtgccaaatttgatcctcagaaaatactataaaatccaatgagaaaaaatgtttaatgtgatttctcattttgaaataaaaggcctttctctgtttggcagggttgtctttcattgtggaaatgctcagagagaatgagcttaccattttcggaagtgattctttgagtcttttctgtgaaaggtgacatgctttgccactatatagagttttgaaacaagggatttctctttgtatgacccttagaaaggaactgagcacctctcaggatgagactgccatgcttccatatctgtgatcaatgatgtaatgcatcctaatttattcatatctcactgagtgcttatctttttaatttattcataaacatgaacatataccatttttgaacatagttcatattttaaaatctgaataattatcatttttgaatagatgatcaaataggcataaaaatc

SEQ ID NO: 684527 - DNA, 598 bp, Homo sapiens
tttttcaggtggaaatgttatgggttgttccacatgtactacagacaggtagcccagggggcagagctgcagccccctccctggtgcccctgaagctctgcttctaggttcctgggaagctattaaatggcattcactctgagacggtgctaggcagttgaggatggaggtgagaaatgctggcctgaccctagcctagccccatgcagggtgccacagctgccatggggagcacagccctcccggtcctcatgacagctgcagattcccattgcacagatggggaaactgagactctgagggcttacacttgcacatggccacactsctaggaagtggcagagccaggctcagaatctccgtctgcctgattctggaacttgaggttggaggtcctggagggttgactagcgctgggcagtgatgtctgggtgtgcgtggcgggtcccttgtccagcagtgacttggcttgaggaagacagagcccatgctagggtcctgctcagttcccaagatctgctctgagactctgtggtttccagaatccatgggcaacccagggctaccctgtcacctgctccacagccccgagcttgct

SEQ ID NO: 684528 - DNA, 638 bp, Homo sapiens
gtctctgggaaggagtgtgcactagccgacacctcagtgactggcctcaggggtgggagaggcttctaaacaccctaggcccctcccgaggtccctggagaggcccgggagccgtggagttagggggtgtctgaggccacccaagatgagggcagacagggccaagagcccaggggtcacaaggtgctttgttgtgggcacctgtggacttgcagggggcatggtgatggggacagaggtggggagggttttgtgcttgagtctgtgaggaggcactgcgtcctgggttcccggctgtgaatctgagcccaggagtggggcaacccatctgtggaaacactgataacaagaaacccagagcttcccctgctgaacccataccttcggggagtrtgcacgtgcatatgtgcctgccaggggccactgagaccgccggtccccctcagcccgctgcaggcagttcctctcccaaaatctcccatttggagcgtaggtcagtttttgatggtccatttgttctgttttaagtatggactgcttggaaaaacagctgaagaaaatggaggaaaatatgttaatttgtcatgggtagtttgttcagtgtttacagctgggggaaaaagagaggatttgggtat

SEQ ID NO: 684529 - DNA, 2820 bp, Homo sapiens
ggaagatctctaatggagatgactttatgactttgtttaggaacagcagaaaaataaacattttaaagtgctgttatataaaaataaaacaacagttatttctctatgttttgaaagctaaaactaaataaatgatagtaggagcagaggtgctttgttacaagtgcttctcaagcacttacaattaatacctttaatggcggagggaaaaaatactgcttcaacaatataaagatatagcagttcacagtggcaaccaagcaagatgttactttgaaatgccctgctttaacagtatacctggggactttgcattctcctctaaactgggtttaatataaagcaaatcccaccacagctgtcttcaagctttctagtaaaatggccctccagaaagatgatctttggtgttaacccctgtcaaaatgacagctcgccaaatggagaagtcaaatcccagaaaaaaacaatagaaagtttcatagaagttagcgaaaaaaataaaattttgagtgttaaatgattctcacatattgaataccattttacttattttctctaacaaatccattcaccagtatcattataatttatgacctttcttgtggtacaatgctgtcctttcataaatgtacttcagtgaagtaggattactcctgtatattattactatggatgctacagtcatgctttctttgtgcgcaagttgccatgagctaaagcctcattaaaaaaggtagatctgtttctaggtgtgtctactcctatattttatcaagtatgtatgtatgtatgtatcacaatatctaaatattagcaagcttatgagacagtgatattgataacaatatcttcagtagaattaagatttatcttctttgagatcagaaaataaaaccatgttagatttagcttagaacatgcrtacctaaaaaagattgcttaaattagcttataagtgagaactgtgataagtatgttaagcaaacaacttactggatgttatttcttccattctgtatactcttaactaccacatatcataaagtcctaagaatctagtttgggaaagtataatagaagactgaagcaattatttagatcatttaatctgaaaaaatcccatcgttgtgccaattctttggtatttcaaggataataagatcaatgttttccatgattattgttagtattattttatcattaattgtcattaatttatgatttatttaatactttcttgacaatatcggtatatcttaaaatcctgctaaattttacaggtgtaaattctggatattactaagctgacctaaattacatatctccaaaaagaaaaactaaggtgacaatacagttaaaaccaaattttagtttcagattctaaggaaataatgtataaatttgaaaaatagctatgttcttatataattataaaataaaaatattatttctacctaaattaaatatacaatgtattaatctagattaatgaacatgctccaaatactgtgaaccaaattactatttcccatctattacaacatacgattcccatctattacaacatacgattttttactactttgtacgttaagtgtattattgaaatgtaactattatgtctccttatattttctgtgacatttaaaacattctcattattttaaaaaaatgtatgtgctaatacttatgaaaaggctttttttttgcctgagatttctataactgtgaaaagcataagggagaatttcctttccaaaaacatggacattaatgaagttgttttttgaggcctgttcttcataactgttttctaggtgatggactatttatcaacttgctccataatccgtttagagttaaagaggaccacagaaactccacctccaggtgtcacaggttactaaacacaataactaaaacaaattaaaaaacttatctcagattccctcctggagtctactgccttgcttatacagttggacgacaaagtcagccactgcctgaattcatattctgcactatgtgattcaggaaacagtgagtccaagcatttcttactcttaaaattgtgttcaatgtttgcagtcactttcctatccctgatattatcaggaaaggggctgcaatttcctttatacttctctgagtcaactgcaaagacaagagaacaagcagcaccaatgaaaaccacggggttctatggaggcatcatggggtagtgagtagaagcatgctgctcagctgtatctcactggcttcaaatcctgactatacggcgtatggtgcattaacagccagctgaccacaaaaatttctatgctggtaaaataggtttataataatgccagttaatctaaagatgatttaagtgaagactatttggtatttttcaaggactcaataatcattaactgtgatcatgatcttccccttacctactttcaataagtaaataatttacatttattaaacaaaagaaatttaatcttgcttttctgaaacaacacaattctatttcaattttctttacatagaaggagcatctcactgcagataaagatatatgtatattttttctccactcaaaattatgctgagactcaaaaacagaaatatctagtacgatatcaattcatatatcagttatgtttagagggagttgggctaaacatacagcattcatttaaaatgaaggcctcccatcatactttgctgatggtatttaagtattgaaagccaactttttctacctgcttactattatgtcatagtagcatgatttcccagacagcagagactttgtctttttgtaca

SEQ ID NO: 684530 - DNA, 1467 bp, Homo sapiens
tagctactgtaaaccagacatggagtatgcatctcaggcagatacaaagctgaacactatttggtccctgccattataaatttttattttaactgtgtatttacagaacattctaggtgttcagataattgtaattcacagtcctggaccagacagagatgaagtccttccatcgcagcctcacacatttgccaaaactaaacaatagctgagagtatcatcgccactatcaccgtcrtcatcatcgtcattggtccatagggagctgattgggagaacgtggagggatgggctttgccctaattcatctttagaatattggtaccacacagtgccttgcttcagcctgccggtgtctctcactctcactccgtgatttattttgttttcttgggtcataccaccagttttgtaaacctctctgatgcccacttcctgaacctttgtcagtgctttgtggccctggactgaggagagagatgtcagcctgatttctgtgtccctacagctcatggtgctattgacactcattagtcctcagtaaatctcctgtcttgggagcttgataagcagaaatcatcagcttgtttagttgtgcctgatgcctgggcctgtcctgttctattctagcctccacctcctacttctatatggtgacctctgtgattctcaagcgtgaccatttcctgagttcataacaggacctcttttgtgccttcgtctctttgggtgggaatcttgtagagtatcaaggaagcccttctgggcagatggaagatttcagttaagcacaagtcttttctttatgttggcattgggtaaaacatactcagtggatatacttcagaagaaggagcctgtagttaaatagactgggacattgtctttaaaaagtttcttcactatagggcaactcttaaggctgttggccacattttaggaaaacctgctttgtatagttgagttgtatccaccagaaccttaggctgtagacttttccctacatggctgtcaatgcctgctaacccagaagagctgttcagtcagaagacacagtatcaggcatgttaaaaaagatctgacactccctattctgtccgtgtgagtgcccctgcccagttgggaaggcctcacggtcatctttagcatcattatgtgagagtgttttggcagccctgcatgtcgtattctgaacaagagacatcatcactctgtactacagccagaatgctacactacaactggggcactgcacgatgctgtttgagtgatctaagggccatgggggtagccagaagaaaatctactactgcaccttacgaaatgactaggacctgttataaaaaagtaaaagtcataatcagccttttaccctctggcctttttcccttactttgtcccctgtaacctgccctaaatatatttctcccattttctctctcaattcatcttgccccttctctgtgg

SEQ ID NO: 684531 - DNA, 1467 bp, Homo sapiens
tagctactgtaaaccagacatggagtatgcatctcaggcagatacaaagctgaacactatttggtccctgccattataaatttttattttaactgtgtatttacagaacattctaggtgttcagataattgtaattcacagtcctggaccagacagagatgaagtccttccatcgcagcctcacacatttgccaaaactaaacaatagctgagagtatcatcgccactatcaccgtcgtcatcatcgtcattggtccatagggagctgattgggagaacgtggagggatgggctttgccctaattcatctttagaatattggtaccacacagtgccttgcttcagcctgccggtgtctctcactctcactccgtgatttattttgttttcttgggtcataccaccagttttgtaaacctctctgatgcccacttcctgaacctttgtcagtgctttgtggccctggactgaggagagagatgtcagcctgatttctgtgtccctacagctcatggtgctattgacactcattagtcctcagtaaatctcctgtcttgggagcttgataagcagaaatcatcagcttgtttagttgtgcctgatgcctgggcctgtcctgttctattctagcctccacctcctacttctatatggtgacctctgtgattctcaagcgtgaccatttcctgagttcataacaggacctcttttgtgccttcgtctctttgggtgggaatcttgtagagtatcaaggaagcccttctgggcagatggaagatttcagttaagcacaagtcttttctttatgttggcattgggtaaaacatactcagtggatatacttcagaagaaggagcctgtagttaaatagactgggacattgtctttaaaaagtttcttcactatagggcaactcttaaggctgttggccacattttaggaaaacctgctttgtatagttgagttgtatccaccagaaccttaggctgtagacttttccctacatggytgtcaatgcctgctaacccagaagagctgttcagtcagaagacacagtatcaggcatgttaaaaaagatctgacactccctattctgtccgtgtgagtgcccctgcccagttgggaaggcctcacggtcatctttagcatcattatgtgagagtgttttggcagccctgcatgtcgtattctgaacaagagacatcatcactctgtactacagccagaatgctacactacaactggggcactgcacgatgctgtttgagtgatctaagggccatgggggtagccagaagaaaatctactactgcaccttacgaaatgactaggacctgttataaaaaagtaaaagtcataatcagccttttaccctctggcctttttcccttactttgtcccctgtaacctgccctaaatatatttctcccattttctctctcaattcatcttgccccttctctgtgg

SEQ ID NO: 684532 - DNA, 687 bp, Homo sapiens
gatgggtcacctaaggtcaggagctcaaaacccaacatggcaaaacaccatcactgcttaaaaaaagtaataaaaaattagcccagtgtaatgacacacacctgtagtcycagctctcctggaagctgaggcaggagaatcgcttgaacccaggaggtggaggttacagtgagccgagatagcgccactgcactccagcctgagcaacagaggaagactctgtcgtaagaaaacaaaaaacaggtgggggcctggctcctcacccacccgtcagctccaggactggccccttcctgggccaactggccaaacaactgggaagagcccccaactccaacaggattattttcccagcaggagttacagatgcagccacagattgatgatctgccttaacatgatcggagatgctttgtaatctactgtccagctgaaagcgctcatgttatgaggaagaaactacaaatgatgttcaaatctattttaaactattttgggccatttttatgtacctttgggttcaggcattatttgggggtttttgtttccaaagtaactaaataaagtcatattgcttattaaaaagaaaacaaaaaacaacaagaaaactatattcattatcttgcagctcccactggtcaggagtctggggcttggtttagcgggtccagctgcaatccagctgct

SEQ ID NO: 684533 - DNA, 1428 bp, Homo sapiens
aaaaataaaagctatcagcccattacatatggtccacagtaacatccttctatgaacacacacacacacacacacacacacacacacacacacacacccctacctctggcactgttaacaataggctttggagcattaacaacctcaggtgaaaacaaaccagtcattaacaacagattctgagaagattacaacctaaataactatcactggaacacgtaagttacttaatataaagtggttccatatggttcatttataattcacacagcgccaggcagcaagaacccatcagatgacacctactggtgtcaccagatatgctttaatctttccaaaagggcagcaaaggaggatgtatttgagagatttttcaggtactactgggttctagaatattcttagagtaaaaaattatttcttggcttcccaaccgtcacctctcctttgagtttttcagtatatatcttcctgaaattggctttaaaaagcttcaaggagaaaaawttttgaagtgtatctgcttgctaagcttaccatgactaatgttaactctttttgtgtggttcctggttgtgagcagacaggctggaactaagcacacatgtgcagtgcaccaactggactcctgtcataaaactgataaaaggtgatctgttcatcttcttaagtactcttagcactattattcatgacatggtacttagacacaaatgtacacaattctaaagcagatcattcaagtatttcatttttcctcatctttcttcttcccccagtacatataattgacatacacatatgttgagagctttcctgtatttctttaatcactgtcaggatcactcataaatgttaattaagaagaagatttaaacgttactcctcaactgtgccaaatggaaaaactttgagtttaccacacgcttctcatgagcattcgttctccgtgagtgttcatgctgccctatgcctctctagtgagctcagggatggaagcgcacgtgcacacacacacaaacacacacacggagacacacactgaaaatccccgggctgctgggtcaggagtcgggcagcagtgaccaaaagggagaaggcagtgagctgaggagaatcccagtaacaggagaaggaagggctccgagacgagagcctggagtcctcatcccaggcttccaaccccgaggcagaagacaagtggtcagccaggaaccatggaggagggcagcccgagaatgctcttatttcaggaacttcaggaaggcttctctgtgcccctaaatatctccttagtctactggccaggacttgaagccttaaaccagagataaagcttttcagtccacaatttgagataaaaggcttggacagcacctgggagagttaacaggcacgagtgtaaataatatcagatctttcctaatt

SEQ ID NO: 684534 - DNA, 626 bp, Homo sapiens
cgcagagacgaggtttcaccatgctggccaggctggtctcaaactcctgacctcagcctcccacagtgctgggtttacaggcatgaaccactgcacctggccccactcatgtcactctagaggtagtgactgagggcctggctgcgtgcccgaccctggggtgggggttaaggcatcacagagacgaatcaaaagtcagtgcttgacaaaggggcagccaagaaagcagagatgtccatcaacaggaggcagacaagcatttgtgcatttggcacgggtcacttgtgcacctactaggcaccacgcccagatggacaaaacccgcacaaaatcccatattacggcctcagaacaggacagacaaaatgccacgaacatcgagagatacaatttccagctggaggcaactggggaaggcttcctggaggagaggggtcagcgtggggccctcggggctgtagggaaaggccatccaccctcrctgggtcccagctttactctacctccctccagcaaacgtgcaatggctgtcatgtaactggctggtaggatgccattataactgctctccacgtttgcgccacagtgctcctggtgccgtgacttaacttcagaatcggcccctc

SEQ ID NO: 684535 - DNA, 495 bp, Homo sapiens
ggctgggattacaggcacccaccaccacacccggctaacttttgtatttttcatagagacggggcttcatgatgttggccaggctggtcttgaactcctggcctcaagtgacccacccgtctcagcctcccaaagtactgggattaccggtgtaaaccaccaygctgggccctaaccacctgttttctacgtgtcgaatatgaggaacatggaacagaagaaaatagcgctgtccctggagttcaaattccagtggggaagagaggagtctgacaatgcaattacaattcagtaccatttaagcaaagccacaggtgaacaaaaagccacaggatctggggacagggcacccaaccaagactgtggtgggcgtgggtgtcagagaagcttcccaggggtggtgaggcctaagctgaacctgagaggtgaggaaaacagaccaagctgaccaaaccgctccaggcccttcctccactcacagggatgctcctcccg

SEQ ID NO: 684536 - DNA, 495 bp, Homo sapiens
ggctgggattacaggcacccaccaccacacccggctaacttttgtatttttcatagagacggggcttcatgatgttggccaggctggtcttgaactcctggcctcaagtgacccacccgtctcagcctcccaaagtactgggattaccggtgtaaaccaccatgctgggccctaaccacctgttttctacgtgtcgaatatgaggaacatggaacagaagaaaatagcgctgtccctggagttcaaattccagtggggaagagaggagtctgacaatgcaattacaattcagtaccatttaagcaaagccacaggtgaacaaaaagccacaggatctggggacagggcacccaaccaagactgtggtgggcgtgggtgtcagagaagcttcccaggggwggtgaggcctaagctgaacctgagaggtgaggaaaacagaccaagctgaccaaaccgctccaggcccttcctccactcacagggatgctcctcccg

SEQ ID NO: 684537 - DNA, 664 bp, Homo sapiens
ctctatgcattcatttatttagaccatgaatcctttgcaacagggttgttttgttctttctgtatctctggcacttggcacagtgctcaggaaataggccctcaaaaaagtttgttaagtaaatggaataaattatggtaaatactgaaagaagagactaagaaatacacattctgaattaaaataatttgcattctaaaaaagaaagcacaaaatataattctggaagtgattttcttccctgaktcttcaggaaatgtggaatgtaaggcagtaggaaatatctgataattaagattcttcttcatatgtcattttgaagatatccataaactgcagaattatatttgtattacatacagaatagttaatttatatctaagagtggtaactgctttactccattaaaactggaacaagcttttaccctcacaggtatcttccaacttggttctttaactttccaagcattaacccaatttctttcaagtgtcactgttacagagatagaaaaaaaaaaaagtgactcattcttgtgaatgagtcctgacttcacatggaacttaagagcaggaatgtgtgtataaatatgtaggggtacacacaaacatgtacactgcttatacagtaaagcacttactctccaatagaaaagcttaaagcc

SEQ ID NO: 684538 - DNA, 664 bp, Homo sapiens
ctctatgcattcatttatttagaccatgaatcctttgcaacagggttgttttgttctttctgtatctctggcacttggcacagtgctcaggaaataggccctcaaaaaagtttgttaagtaaatggaataaattatggtaaatactgaaagaagagactaagaaatacacattctgaattaaaataatttgcattctaaaaaagaaagcacaaaatataattctggaagtgattttcttccctgattcttcaggaaatgtggaatgtaaggcagtaggaaatatctgataattaagattcttcttcatatgtcattttgaagatatccataaactgcagaattatatttgtattacatacagaatagttaatttatatctaagagtggtaactgctttactccattaaaactggaacaagmttttaccctcacaggtatcttccaacttggttctttaactttccaagcattaacccaatttctttcaagtgtcactgttacagagatagaaaaaaaaaaaagtgactcattcttgtgaatgagtcctgacttcacatggaacttaagagcaggaatgtgtgtataaatatgtaggggtacacacaaacatgtacactgcttatacagtaaagcacttactctccaatagaaaagcttaaagcc

SEQ ID NO: 684539 - DNA, 623 bp, Homo sapiens
tgcatttatataaaaaataagttgagctgatatacattcactttacaaaaaaatgcttcgctttataagccagatattcacaagttttttaaatagtaagctaccctaagttatataataaactttgaaattcaaattgcaggccggcacggtggctcacacctgtaatcccagcacttggggaggctgaggcggggcggatgacctgaggtcaggagtccaagaccagactggccaacatggtgaaaccccgtctctactaaaaatacaaaaattagccgtgcctggtggcgcgtgcctgtaatcccagctacttgggaggctgaggtaggagaatcacatgaaccctrgaggtggaggttgtagtgagctgaaatcgtcccactgcaccccagcctgggtaacacagcgagactccatctcggggaaaaaaaaaaagaaattcaaattgcgtttttatattttatttttggggggatacagtaaggtctatttatctttctaattagccatgaagagatttttcctagtgagaggacagatggggtgggggctgctggcctttctgctctgaagctgcatcgctgtggtagacaaggactctccatctcttcacagaagcc

SEQ ID NO: 684540 - DNA, 972 bp, Homo sapiens
aatggttgctaaggaggaggaactacttataagcatgtgacttcaggaaagtttcaattccctgcttctcagaacctttctttgtaaaaagggggaaacaatagcttttaagcataagatgagacatggcacttgaagcatttgggcacagagcctggcacacatcatatgttcagtactttttaaattgtcattactcctcccccagcgaccatgactatagtggggtttatttgctttgatggcagggcccaaaactgtccttcagaaatctgactaaagggtgtctttgaaacactatctttgttttgttacaactgaagagcctttaaattagttagtctggaaatcaatagccgatttctagcaggggaggtagaaggaaggatggccacagcactccattttgaaagtctgattcattttgacccacatcgtctacaaagtcttctgccaatttctctgagagacatcctcccccaaattctaggtgatctgttctgttcctcataaataacaaggtaactttgagtctgtcactttcatttcacctgtcagctcttccttttatggaattgacctgaagagaagtggctttcctcttcttttacctgaattcactctctggctggttcctctactaacactacattttttgccatcctcccttggtcatcacctacaatgtttcctgctatgttacttccctgtacctctcaggactacaggggacaacctgggttattaggagctaagctgcaaagagatggagaaatgaaaatttacacttgtactggccaaaatttaagatttgggatatagtagtgtttaacaacctttttataactaatgggcccttgtataatttttttgaactrctatgaatgtagtgtttcgataaagattacttttatgcaggaaaaacaacaaataatgtcttcctatgagaaagccaaatgtaccacaatgaga

SEQ ID NO: 684541 - DNA, 576 bp, Homo sapiens
tttaaactatcagatttcatgagaactcattacgagacagcattaggggaatggtgctaaactattagaaaccactcccatgatccaataacctcccaccgggccccaccttcaacatgtggggattacaattagagaggagatttgggtggggacatagaaccaaaccatatcatgccctgatggtgtactcagacacactagaggggcatacttcctttcctagaaacagctagacattatgctaggactcttcttccttatagcawcaccaagctggatgacccactcatttattttactggcagacatcactttagcagtatgtagacaaaacaaattttgtacattaatcaaaattttggctactgattcagaatgactgccaggccacaagaaacatggccctcagctattcatcttgtcctttacactagtggactcccaatatttctgttcacatacctctgaaagggttttgaaaaacgatatgccctcatatatttttatattgacatgtaaacatttttatatatttaagtagttacagatgtaacttctattattttataaaac

SEQ ID NO: 684542 - DNA, 646 bp, Homo sapiens
aaagtattataatccaagccatttattgcattccctcagccttagaactatcaggtgtttcctgcaaatattacctccacattatctcagaattctctttgtgcatttccagttacctatttaacactgtcatatctacttagcaattctttacattaagtcattttcctaaataattgacatacagacactttctgtaggattaatatcactatatatttccaaagaatgggtttttctccctaagggctcatgttctcactccattcattactaattagctgtcggctaccaaacgcataaaagcagtaatcaggcctaagaaggaaatgagacattgtcattgcttctgactcagttagtcttttttagcttcatatctgaatactctaacagaaaataatattcttacctccaaccatttctgactgtaaaatctcatgtttttaccttcagtgtgtaggtagcttctttataaaccattcctttctgatttatttcctctttgarttttatcataaacaaatgcgtaatctcatgaaagaagttcccactggcagaactttagcttccttattcatagccatattcctaatatacagtatttattttctattgtataactcttcaatgtaacaattgcaat

SEQ ID NO: 684543 - DNA, 592 bp, Homo sapiens
tattgtttctttatttcttactgtaatatttgtttatgacagcaccttaggattcctatggacagccaagcgtcagaaggctgcttaaccagtacatgttcagaaatccttctgattgtaccatcatttgattgtattagcttcattttgatctgaaagctcacaaaattgctatttcctcagctgacattatgtgattacattgtgtctgtgtatctcacagactattttagcatgcaacttctgtttgagaaaaactagtcattttctcccccctctccattttagaaatgaagaaactgaggccaagggaaagaaagatgcctaccatgttacaaccatgcttctgtatttcagttttcatctcatacctgagttttcattscatgttgttttcttataagcattacacattaaaagatttttatgctttttctgtcctctatgtgtcctatatgtactgtccaatagattctgtgttgttcaaatctgtcatcttcgttcactataaatatgtcactataaaaataatgcaaccagccaggtgctgtggctcatgcttgcaatcccagcacttttgaggccgaggcgg

SEQ ID NO: 684544 - DNA, 2313 bp, Homo sapiens
gaaaggtagcccttgatccctagtaatggatgttaccaggtattatcaagaataagcacagcaataaaattgcaaggcaataattattagatgtataatttccatgaactcatagattactgaaaactgttctaccatgagacttcaaacttaagaataaaatgattttcatgaagaagcagtatccacctaagatgtttctgatttagaagattgctgtgtgaagtatttagcttcttcctaaatccaatggaacaaaacccaggtttaattttcatgtacttacttatttccctcactgtctaatactcctataattagttttgaggaattttcatcttggaaataagaactaaactccagccttatttttttttttttttttttttatttagcacagtgtgatctggtgtagaagtgaactatcaactctgatcatctatctgttaatacttgtctgtgttgcagttctcatatatataatgttcagagtctcaaagtttgctgtatatttttaatcacatcatactatttgagaaatgaccatttgacaaatgttcaaacacatctgacacatatgcaggttaaaactcatcacaggccgggcatggtggctcacgcctataatcccagcactttgggaggcccaggtgggggatcacctgaggtcagaagttcaagaccagcctggtccacatggtgaaaccccatctctactaagtatacaaaaattagctgggtgtggtggcagtcacctgtaatcccagctactcgggaggctgaggcaggagaattgcttgaactcgggaggcggatgttgcagtgagttgagatagcaccattgtgctccagcctgggcaacaagagcaaaaacttcgtctcaaaacaaacaaacaaacaaaaaactcatcagaaactcaatatgctagaacaatatgtcagaggtatatatctggaacgaatatgttcccagattattttcttagtctaggctgaaaaatgacttaaaaagaacaccaagaacagaaacaaacattttacatattactctgagtgtaaaatagttataaacacttggttttaaaatttagcatcatctttaaaggcagaattttctcctatcctatgattaaaaggttttccttctaaaatctgaaaaaaattacactggcccatgtagatctggagatataaacaggaggataaatagcatctttgttaatagcacaaacaatgtaaatggtcattgacaggggaatgaaaaaaatgtatcatttacagagtacagttatatttatcagtaacaatgagtgtaccgcatgtaatagactataagaaaattagtgacacaatgtcatagaataaaagcaagtgatagatatatgatgacttcttcataaaatgcctaaatgagcagaattttttttaattgttactaccagagcagggcaaggagcattgagagatctacacaactactattttaaataggttgaccaaaaagacttactgcagtaaaattcacataaaaacttcaagactgtaaagaagtcaaccatttgtccatttaagaggtgagagcttcagatagagggaacaggtgaagtgaaagcccttaaaggcatgcccaactactgtccaattcagattttccattggaaatattttagtcacaccatcactttctctgtgctctggagtctctctcaaattaggcaattactacttaaaatgtaatacatcatttcctgtgaaaagcctaacttgaaatatagaaactcatatagattcttcccttttttgcttacttctaacagaatgattagtatactatttacaagttttgttttctactgtctcttcacatttgaatctgagtacctttcaagtgttgagttaatmtcaataactgaatttctgttatgcagcaccatcccagcacatagtaggcagtcggtataagttatcaagagaatgaataaaaaactatgtaaatgatgaaagagaaataaaatattctcaggacataattattggattaggctaggatatattaaattacaaagtactcaactttagtataagaaaaaccataaaacacacacacacatatatatatacacacacatatatgtatatatacacaaattcaaatatatcactgcacagcctctaccattatgcagcctacacaaaagtaatagaggtaagtattaagaagtaatcatgctacaagaataaatgtgtgagctatgagggaataacaggtggcctaatatggactaggttcaaggagaggctgttattaaaatg

SEQ ID NO: 684545 - DNA, 2313 bp, Homo sapiens
gaaaggtagcccttgatccctagtaatggatgttaccaggtattatcaagaataagcacagcaataaaattgcaaggcaataattattagatgtataatttccatgaactcatagattactgaaaactgttctaccatgagacttcaaacttaagaataaaatgattttcatgaagaagcagtatccacctaagatgtttctgatttagaagattgctgtgtgaagtatttagcttcttcctaaatccaatggaacaaaacccaggtttaattttcatgtacttacttatttccctcactgtctaatactcctataattagttttgaggaattttcatcttggaaataagaactaaactccagccttatttttttttttttttttttttatttagcacagtgtgatctggtgtagaagtgaactatcaactctgatcatctatctgttaatacttgtctgtgttgcagttctcatatatataatgttcagagtctcaaagtttgctgtatatttttaatcacatcatactatttgagaaatgaccatttgacaaatgttcaaacacatctgacacatatgcaggttaaaactcatcacaggccgggcatggtggctcacgcctataatcccagcactttgggaggcccaggtgggggatcacctgaggtcagaagttcaagaccagcctggtccacatggtgaaaccccatctctactaagtatacaaaaattagctgggtgtggtggcagtcacctgtaatcccagctactcgggaggctgaggcaggagaattgcttgaactcgggaggcggatgttgcagtgagttgagatagcaccattgtgctccagcctgggcaacaagagcaaaaacttcgtctcaaaacaaacaaacaaacaaaaaactcatcagaaactcaatatgctagaacaatatgtcagaggtatatatctggaacgaatatgttcccagattattttcttagtctaggctgaaaaatgacttaaaaagaacaccaagaacagaaacaaacattttacatattactctgagtgtaaaatagttataaacacttggttttaaaatttagcatcatctttaaaggcagaattttctcctatcctatgattaaaaggttttccttctaaaatctgaaaaaaattacactggcccatgtagatctggagatataaacaggaggataaatagcatctttgttaatagcacaaacaatgtaaatggtcattgacaggggaatgaaaaaaatgtatcatttacagagtacagttatatttatcagtaacaatgagtgtaccgcatgtaatagactataagaaaattagtgacacaatgtcatagaataaaagcaagtgatagatatatgatgacttcttcataaaatgcctaaatgagcagaattttttttaattgttactaccagagcagggcaaggagcattgagagatctacacaactactattttaaataggttgaccaaaaagacttactgcagtaaaattcacataaaaacttcaagactgtaaagaagtcaaccatttgtccatttaagaggtgagagcttcagatagagggaacaggtgaagtgaaagcccttaaaggcatgcccaactactgtccaattcagattttccattggaaatattttagtcacaccatcactttctctgtgctctggagtctctctcaaattaggcaattactacttaaaatgtaatacatcatttcctgtgaaaagcctaacttgaaatatagaaactcatatagattcttcccttttttgcttacttctaacagaatgattagtatactatttacaagttttgttttctactgtctcttcacatttgaatctgagtacctttcaagtgttgagttaatatcaataactgaatttctgttatgcagcaccatcccagcacatagtaggcagtcggtataagttatcaagagaatgaataaaaaactaygtaaatgatgaaagagaaataaaatattctcaggacataattattggattaggctaggatatattaaattacaaagtactcaactttagtataagaaaaaccataaaacacacacacacatatatatatacacacacatatatgtatatatacacaaattcaaatatatcactgcacagcctctaccattatgcagcctacacaaaagtaatagaggtaagtattaagaagtaatcatgctacaagaataaatgtgtgagctatgagggaataacaggtggcctaatatggactaggttcaaggagaggctgttattaaaatg

SEQ ID NO: 684546 - DNA, 1294 bp, Homo sapiens
gtgtgtgttttgtgggcactcctttccaactctggttcccctctgtctccttggtccaagctggaagagcaggtttggaatatacttctctgtctaatgaggggaagggaatgagacaggcatttattgaacacctactatatgccaggccctgggctaggccttttcaccaaatgctgtctcactggagcctcaaagaccctgagtagtggcagcattcaacccagaggtcatgcaacttgttcaaggtcacagagctatgatatgatgaagctgtggttacacccagacccgagagctcctaaaccacagtggctgarcgtggggcaggaccctggagctttggacattaagtcagatgccgtcagcagggtcctggggcagctcctggtctgcaggggagagacacagcccttgagagacacagcccttgacctgtgggagtccccagtctgttgggagagacacaagccttgcactaggggagttcccagtctgttgagggagctccaacctctaacctgggaagccctagtctgatgggaagtcagatcctctgccaagggaagctcagcaaatgggggacagagctcctgctttgggagcacccactctgacggagggatatgtctttgctctagagagtctctggtctgatgaagaaaacgtcacttctgtcctggaggaaccctcagtcagatgagggagacaccgatccacacagggaaaacagaaataaggtgcaaatgaatgacaggcaggcagagcaagtgcacagggcagacagtgagctcagagcacgaggggagaatcagccctggcctgcgtgggcctcagggccagactgggggtccctccctgttcgttgcctctctctcccttcctagatgtgtggtctctgaacttcccccgggctgcccctttcccagtctgcggagggaaacaccctggccagggcagaggtagagaccttctcctcttggtgctgacagccccagccggctcccccttttccacagaagcctccagcggccttgggactctctttcctcctctctggacaggtgacaagtgggggtccctgggggagaggaaggagaaagaccaggaaggcagaaggagctgaaggatgagcatagggcctgatgaaagggtgccaaagtcacaagtcacaagggcagacgagtgtttaccttctacaaagtagcactttccacacacacaggtacacacacacacacacacacttgcgcacacacatgcatgcacacacataggcgcacgcacacacagg

SEQ ID NO: 684547 - DNA, 1353 bp, Homo sapiens
cttggcctgagcagatagagtccacccttcactattcagttgggttacctcatgggtcccccataataaacctgttccccacccacacccataataaactgaaaaaacatttatttatttatggttttgagacagagtctcactctgttgccctggctggagtgcagtggtgctatcttggctcactgcaacctctgcctcctgggttcaagcaattctcctgtctcagcctccagagtagctgggattacaggcatgtaccaacatgcctggctaatttttgtatttttagtagagacggggtttcaccatattggtcaggctggtctcgaactcctgacctcaggagatgcacccgccttggcctcccraagtgctgggattacgggcatgagccaccgcacctggcctgaaaaaacatttattgaacccctctcttgtgccaaggcactgtgcccaggccacggaagttacaaggaacacttgttgggtgccacctctgtgttctaaaggatgcacaaccatctgtaacctgcacaaaccaccctgtgagagagatgtgacaatcactcccatgttacagatgaagaagacgcagctttgagcccagaggtaactagctgaaggtcacgtgggaagacagtcaaccagctgcagtgcaaacgcacctgcttctgcctccaaaccccttcctgtgccttccatgctgtcacttgctggtgattccacagggcgctcctgggatctcatgtgtattgtcatatctgcaaatgagcaaccgagatccccagaggttaaattcctggtccaatgcccttccactggcaggtggccacatcccctccaaactcagtttcctctgaccccagaaccccggctccctcctgcctcagtgacaccctcccaccatgggacacgatgcctttgggtcctactctctgttttcctgtttcctttgagaccctctgtgccccctgaatgaggtcttgatcatcagggactctgccagctggggagctttgtaaggtgtagtcaccctgggagagtccttgcttgggcccacagtcttggggactgaggtctgtgcagtgacaatagaggattgttaaataaggagtcacaatcctccggcacattgtccaaccgtggccttttcctctgacacgtaaactctcattgaacccatttcacaggtgaaacagctgatgcctgagttgggccctttccctttcatcaaggggctggagcagctgagaccaagtccctgacatggccccctgggcctggctggctctgtctctagtagaataagaggtgagatcagggacagagaaagagggagcaggaagcaga

SEQ ID NO: 684548 - DNA, 1353 bp, Homo sapiens
cttggcctgagcagatagagtccacccttcactattcagttgggttacctcatgggtcccccataataaacctgttccccacccacacccataataaactgaaaaaacatttatttatttatggttttgagacagagtctcactctgttgccctggctggagtgcagtggtgctatcttggctcactgcaacctctgcctcctgggttcaagcaattctcctgtctcagcctccagagtagctgggattacaggcatgtaccaacatgcctggctaatttttgtatttttagtagagacggggtttcaccatattggtcaggctggtctcgaactcctgacctcaggagatgcacccgccttggcctcccgaagtgctgggattacrggcatgagccaccgcacctggcctgaaaaaacatttattgaacccctctcttgtgccaaggcactgtgcccaggccacggaagttacaaggaacacttgttgggtgccacctctgtgttctaaaggatgcacaaccatctgtaacctgcacaaaccaccctgtgagagagatgtgacaatcactcccatgttacagatgaagaagacgcagctttgagcccagaggtaactagctgaaggtcacgtgggaagacagtcaaccagctgcagtgcaaacgcacctgcttctgcctccaaaccccttcctgtgccttccatgctgtcacttgctggtgattccacagggcgctcctgggatctcatgtgtattgtcatatctgcaaatgagcaaccgagatccccagaggttaaattcctggtccaatgcccttccactggcaggtggccacatcccctccaaactcagtttcctctgaccccagaaccccggctccctcctgcctcagtgacaccctcccaccatgggacacgatgcctttgggtcctactctctgttttcctgtttcctttgagaccctctgtgccccctgaatgaggtcttgatcatcagggactctgccagctggggagctttgtaaggtgtagtcaccctgggagagtccttgcttgggcccacagtcttggggactgaggtctgtgcagtgacaatagaggattgttaaataaggagtcacaatcctccggcacattgtccaaccgtggccttttcctctgacacgtaaactctcattgaacccatttcacaggtgaaacagctgatgcctgagttgggccctttccctttcatcaaggggctggagcagctgagaccaagtccctgacatggccccctgggcctggctggctctgtctctagtagaataagaggtgagatcagggacagagaaagagggagcaggaagcaga

SEQ ID NO: 684549 - DNA, 1017 bp, Homo sapiens
acatatgcctagcggattaccttaagaaacaatacagctcaagagccccaagtttttcacctgtgaaatggggatggtgctaatatcactcactttgcaggattgttgcaagacttgaatgggaagctgtgtgtgtatacagtttgtaaagcactgcataccygcaatggcgatgattataactatgggctgggggatctagggtgacttgcctttcactctcaagatgagtagaaatttgataggcagagtgtagttattgctgagaataactccaatggttacacacatatatactcataccatgtttttgtttgttctcttcactggatcagtgtcttctgaatagtattcagggttagagagagcgggagtaagtcttgctcactcagtgcagaagagattgttccattaattcctcaaatgccccatttcctgtgggctgtgcctacggccactggaggtgtctgtctctgaactgccctgcttggctgccaagcagaattaaaatttgtctttttaatttaccactttattcatctatcaaatacttactgaatacctattgttcaacagcctctgagatgagagttcttttcctaaaggatttcctcaaaacatataactacaacaaagctactgaaattaaaatgaaaaacaatgagaaagaggtaaacatgtttaggcatagaacctgtgtaacatgaatttaggctctgagcttcttggcaaccagggcaaaaagggaaatatattagattacataatttccactatctgggagaaaaatgtgtgctacttttttttttttctaaaagagacaaactgttccttggtactacattcaagcaggtcatcatcacacaaggcagtcacacagggactctgagcagcataatagacaaagcctccaactgcagatttacagcaagtgcagccgtggtcttcctgtgcttgtttcttgtgtctgccctcaataaaagctgagggcaccatggtaaagctcaaacgcaatgg

SEQ ID NO: 684550 - DNA, 1017 bp, Homo sapiens
acatatgcctagcggattaccttaagaaacaatacagctcaagagccccaagtttttcacctgtgaaatggggatggtgctaatatcactcactttgcaggattgttgcaagacttgaatgggaagctgtgtgtgtatacagtttgtaaagcactgcatacctgcaatggcgatgattataactatgggctgggggatctagggtgacttgcctttcactctcaagatgagtagaaatttgataggcagagtgtagttattgctgagaataactccaatggttacacacatatatactcataccatgtttttgtttgttctcttcactggatcagtgtcttctgaatagtattcagggttagagagrgcgggagtaagtcttgctcactcagtgcagaagagattgttccattaattcctcaaatgccccatttcctgtgggctgtgcctacggccactggaggtgtctgtctctgaactgccctgcttggctgccaagcagaattaaaatttgtctttttaatttaccactttattcatctatcaaatacttactgaatacctattgttcaacagcctctgagatgagagttcttttcctaaaggatttcctcaaaacatataactacaacaaagctactgaaattaaaatgaaaaacaatgagaaagaggtaaacatgtttaggcatagaacctgtgtaacatgaatttaggctctgagcttcttggcaaccagggcaaaaagggaaatatattagattacataatttccactatctgggagaaaaatgtgtgctacttttttttttttctaaaagagacaaactgttccttggtactacattcaagcaggtcatcatcacacaaggcagtcacacagggactctgagcagcataatagacaaagcctccaactgcagatttacagcaagtgcagccgtggtcttcctgtgcttgtttcttgtgtctgccctcaataaaagctgagggcaccatggtaaagctcaaacgcaatgg

SEQ ID NO: 684551 - DNA, 654 bp, Homo sapiens
tcccagcactttgggaggccaaggcgggtggatcacgaggtcagcagttcgagaccagcctgaccaacgtggtgaacccctgtctctactaaaaatacaaaaattagcctggcgtggtggcatgcacctgtaatcccagctactcaggaggtaaaggcaggagaatcgcttgaaaccgggaggcagaggttgcagtgagctgagattgcatcattgcacttcagcctgggcgacagagcgagactccgtctaaaaaaaaaaaaagtgtgtarcacttcctcctttgctctctttcttctgctctgccatttgcctgcttccatttcaccttcctccatgaatgtaagtttcctgaggcctcccagttatgcttcatgtatagcctacagaactgtgagtcaattaaacctctctataaattacccagtctcaggtagttctttatagcagtgtgagaacagactaacatgtacacctccagtttacaaattaagaaactgaggctctgagagggaaggtgccctcaggttgcagacctggagctagaagccacatttcctgattcttcaatgctcttttcaccgtaccccaatgcctctgatgagatgatgagtgaaaacattttgctgttgcttttacacaattctagtgtaa

SEQ ID NO: 684552 - DNA, 621 bp, Homo sapiens
tgtgcccagagagggtcagccacacccccatcacagtaggatgctcccagcttcgcagcaagggaagctggtctggcctccgagcccaggccctggtgagctgctgccctgcgagaggaaggtagcccactttgtagatgaggtagttgtggctcgggagtttgctgtaaatgacacaaaccctggttagtggtggagacaagcatgaggtttgccttgttccttgctacccctgagtgaggggtgcagcctctgttagaaactcccagcttccttctggggcaatgggatgcacctctctcctgctttctgtgcactcatgctctctctggctctctctgtctctttctccctttgcctccctttctctctccccsacgccccatacccaatgtcagcacctgcccttgctttcatcttcctgggggtggggttgggggttgaaaggtgtcctgtgcattcatggagcccaggcagccggcccattgctgcctctccctccccctgccccagccgtcctccatcctccgggcatccccaaggcctcattattagggtagcggtgaccccgccccccattgtctggccctgccatgaaaggtagagttttggcagagaacc

SEQ ID NO: 684553 - DNA, 664 bp, Homo sapiens
aggagggccaggctagtgagaccctgtgatggagtaggggttggcacaggtggcttgtagagatgggaggggtcccaggcaccaaagaaacagaccctccctggctgtggttgccacattccctctccagggtccatttccttagctgagcaatggaggaggtcagagctgttgctgtccggggctgtttcctgatttaaaaatctctgcctatggtagggctgtgagactcatggagccccttcctctcctgggcccrcactcacctatttggtccttaaattttgttcctgggcatcagagcagtccctggagctggaggtcagtggcacctggccatggcttagaggagtgctcagctgtctggaggtggaatcctggctctgccgcttgccgggcaaatcacttcacctccccgtgctaactcttctgtgcctctatttcctcgtctgtaatatggggacatggataggatctgctacataaagttgtgtaggagtcaaagacattatatgcataaggtgcttaaacagtatttggctccatgaaaacactcagcaaatattaggtgtttttattcttcaagatctttactgagcaacaagtaggtgagtttcctgaaatacttggtgttgtgaaccaaacagatgtcatccatgaaacc

SEQ ID NO: 684554 - DNA, 2015 bp, Homo sapiens
aggaagatcacttgcacccaggggttcaaggctacagtgagccatgtttgtgccattgcactctagcgtggatgacaaagtaaggccctatctttcaaaaaaaaaaaaaagaatggcagtgtaagaaaaactatggttgggctcataggaaattaaagtagtctagacaaaaattatctaggtctggtgcataaagtttttttagctattggcttttttttccccataaatattcgtttaggaacttttcacattttaaactcttttctttcataggctcacgacttatttagatgtacagcggtgcctggaatatttgggctatctaggctattcaatattgactgagcaagagtctcaagcttcagctgttacaggtaagtatctagatactgttcagctcatgattagagatattttttaagactccattttcaaatgtaacaaagagtaagaatacactcatcttcattagtcttccatctacactctattagttttccttgtgatcagatcatttcttttgtgttgaggtgcttgattttattgtttatgaaaagaaagaaagtagagactttgcttcaagtctactccctggggttactccactgatgaaaatgaggaagagctgtgggcattaaaggatttaccagttgatcttgcgttttaattttctttaaacattaaaaataatgcgtattaactgttttctgtattaatacagctttcacaaatcttgtaagccaggcattcttgccaagcaatgtgcaccacttaaagtaaaccatatgtatggaaatagcaagttaaggaactgatcatttcaagagtttcttatatccctgttggtggaaaatctgccatatcttaygggaagccctagcacaagaagacagcctttcttaaattgacagagcaggtaccctttaaaatacttaaccaattagacagtatttaattcaacaccagagaataagaaaacagtcactagccagccatgaggttctttcactcagcacattgtggacatttttctgtatcaataggtatacttttatatatcttaatgttaaataatgtttcacaatatggatgttctataacttatttaactatcccataattatatatttttatcattttcggttttttttctactatcactagtatctctggtgaggtctgttgtagttcagtcttcaggtatagcctaaggaggttgtgtttgtttgtttgtttgtttgtttgtttgagatggagtctctctctatcaccaggctggagtgcagtgatgagatctcaactcactgcaacctccgcctcctgggttcaagcgattcagctgcctcagcctcccaagtagctgggactacaggcatgcaccaccatgcccagctaatttttgtatttttagtagagatggggtttcactgtgttggccaggatggtctcaatctcttgaccttgtgatctgcccctgttggcctcccacagttctgggattacacgcgtgagccactgcacccggctctaagaaggtctctttacctcaggaagggatgcttgctgtccctatgatacagcattgttttctggcatgcctcttttacagtttacatttgaaaggacggctaaccccaaagtgtgtgtccctttccgttttatggatccagctccaagagagtgcagatttgaaatagcatcttttagtttataatatgtgacagtttatcacagaaaaaattagatggaatataatgttggctatattcttagtaattttcattcatttataggatattttccttatgaaaatatactattttatgatgaaataaatgtttggttactcgaaattcacattccagtcaactttcagaaatgcattttttccactaactggggcccttctgcattctgtgtacttcattcacatacagcttgactgttgtacaatatgtttgtttatagatcagctacttcataaaaataataagcagcaatgccctattttg

SEQ ID NO: 684555 - DNA, 641 bp, Homo sapiens
cgggcgcctgtagtcccagctactcgggaggctgaggcaggagaatggtgtgaacccaggaggcggagctggcagtgagctgagttcccgccactgtactccagcctgggcgacagagcgagactccgcctcaaaaaaaaaaawatatatatatatatatatatttatttatttatttccctcacagagattgtaggcatttgttgttatgtttatacctatgcctttaacataggtataaactatggctttcttaaatgaggtcctctttcatctatcttctagctgatctttgtttgtgtgtgtgtatatacacacatatgtatacatgtgtgtttctaatttttataggttaattttataacctgcttcatgattatttttgtatgatttttaggggtttcagatatataatactatctctaaatacatatagttttgactatttatttccagttctcatgcttttatttactttctcatctaattgcgttggttaataacctcaatataacgttaaataatagtggggatgatctgcatccttattatgtttctgactttgaaagaggagcccgtagtattttctcattaagtttagagaacaaatgagaaaaaatatatttatagagtctttcata

SEQ ID NO: 684556 - DNA, 1571 bp, Homo sapiens
tgcctctatctggaatttaaaaatattttgttgatatgtcatgtcacataatatccctcccaatacattactgattagataatagaggttttttgtttgttggtttgtttgagacagaatcttgctctgccaccaggctggagtgcaatggtgcgatctcggctcactgcaacctccacctcctgggttcaagcgattctcctgcctcagcctcccgagtagctgggattacaggagcatgccatcatgcccggctaatttttgtatttttagtagagacggggtagagtttaccattttagaatttggcgggtctttaggcttctctaactgttctaagacacaccacatcctctggtrcaatgttggagttgttttattttttttgttttgtttttgtttttgagacagagtctcactctgttgcccactctgttgccagtggcgtgatcttggctcactgcaacctccacctcctgggttcaagccattctcctgcctcagcctcccaagtagctgggattacaggcgcacgccactatgcccagctaatttttgtatttttaatagagatggggtttcactatgttggccaggctggtctcgaactccggacctcaggtgttccacctgcctcaggctcccaaagtgctgggattacaggcgtgagccaccactcctggcctggagtcttattttacttttcattcaaatgctttttaacatcttaggcttcagcaggctaatttcaaaacccctagccttgaatgttttacttatgggtagattgggtaggttttaagggtgagtatcagtggctcaaatgtaacttggagaatcacatttccagatcttctaatgtactcaaacgcaccatacaaccataggcaactgctatggctcagacagagagacagatagatgataggtaggtagatatatagataaaggtacagatcttttttttctacctgtatttttatatctatcatatcataatatcatatatcaatcaacacacatcaaatgtggaggattccatgtatttgtgagccaaataatatttgctatctacctgcaattattctgggtttttataaatttttttttttttacacacagttattgatgctaaacctactcatgaattacttacaacaaaaggtaaggccattgcaaaatttcaagttctgtgttagtaatacatccgtactgtttgttttaaaaggcataatcataatcccttccaactcccctgctctctcagtagaatttgcttaagctaaactatcctttgtcatcagcctactttgaataatactttagaaaaagaggccttggagtcaggttggtgtttttactataagcagttattgaaggcatttttttttttcgctctgttacaaacagctgccttgaacccatggaagaaatttctcttaagaatctctgtgggtttttttcttttcttagaattttttttttgttttaatttttatagactacttgaattaggtaactgatttcacttcactcattttgttggctgcttaaaaaaaaactgaaagtga

SEQ ID NO: 684557 - DNA, 1571 bp, Homo sapiens
tgcctctatctggaatttaaaaatattttgttgatatgtcatgtcacataatatccctcccaatacattactgattagataatagaggttttttgtttgttggtttgtttgagacagaatcttgctctgccaccaggctggagtgcaatggtgcgatctcggctcactgcaacctccacctcctgggttcaagcgattctcctgcctcagcctcccgagtagctgggattacaggagcatgccatcatgcccggctaatttttgtatttttagtagagacggggtagagtttaccattttagaatttggcgggtctttaggcttctctaactgttctaagacacaccacatcctctggtacaatgttggagttgttttatttkttttgttttgtttttgtttttgagacagagtctcactctgttgcccactctgttgccagtggcgtgatcttggctcactgcaacctccacctcctgggttcaagccattctcctgcctcagcctcccaagtagctgggattacaggcgcacgccactatgcccagctaatttttgtatttttaatagagatggggtttcactatgttggccaggctggtctcgaactccggacctcaggtgttccacctgcctcaggctcccaaagtgctgggattacaggcgtgagccaccactcctggcctggagtcttattttacttttcattcaaatgctttttaacatcttaggcttcagcaggctaatttcaaaacccctagccttgaatgttttacttatgggtagattgggtaggttttaagggtgagtatcagtggctcaaatgtaacttggagaatcacatttccagatcttctaatgtactcaaacgcaccatacaaccataggcaactgctatggctcagacagagagacagatagatgataggtaggtagatatatagataaaggtacagatcttttttttctacctgtatttttatatctatcatatcataatatcatatatcaatcaacacacatcaaatgtggaggattccatgtatttgtgagccaaataatatttgctatctacctgcaattattctgggtttttataaatttttttttttttacacacagttattgatgctaaacctactcatgaattacttacaacaaaaggtaaggccattgcaaaatttcaagttctgtgttagtaatacatccgtactgtttgttttaaaaggcataatcataatcccttccaactcccctgctctctcagtagaatttgcttaagctaaactatcctttgtcatcagcctactttgaataatactttagaaaaagaggccttggagtcaggttggtgtttttactataagcagttattgaaggcatttttttttttcgctctgttacaaacagctgccttgaacccatggaagaaatttctcttaagaatctctgtgggtttttttcttttcttagaattttttttttgttttaatttttatagactacttgaattaggtaactgatttcacttcactcattttgttggctgcttaaaaaaaaactgaaagtga

SEQ ID NO: 684558 - DNA, 1571 bp, Homo sapiens
tgcctctatctggaatttaaaaatattttgttgatatgtcatgtcacataatatccctcccaatacattactgattagataatagaggttttttgtttgttggtttgtttgagacagaatcttgctctgccaccaggctggagtgcaatggtgcgatctcggctcactgcaacctccacctcctgggttcaagcgattctcctgcctcagcctcccgagtagctgggattacaggagcatgccatcatgcccggctaatttttgtatttttagtagagacggggtagagtttaccattttagaatttggcgggtctttaggcttctctaactgttctaagacacaccacatcctctggtacaatgttggagttgttttattttttttgttttgtttttgtttttgagacagagtctcactctgttgcccactctgttgccagtggcgtgatcttggctcactgcaacctccacctcctgggttcaagccattctcctgcctcagcctcccaagtagctgggattacaggcgcacgccactatgcccagctaatttttgtatttttaatagagatggggtttcactatgttggccaggctggtctcgaactccggacctcaggtgttccacctgcctcaggctcccaaagtgctgggattacaggcgtgagccaccactcctggcctggagtcttattttacttttcattcaaatgctttttaacatcttaggcttcagcaggctaatttcaaaacccctagccttgaatgttttacttatgggtagattgggtaggttttaagggtgagtatcagtggctcaratgtaacttggagaatcacatttccagatcttctaatgtactcaaacgcaccatacaaccataggcaactgctatggctcagacagagagacagatagatgataggtaggtagatatatagataaaggtacagatcttttttttctacctgtatttttatatctatcatatcataatatcatatatcaatcaacacacatcaaatgtggaggattccatgtatttgtgagccaaataatatttgctatctacctgcaattattctgggtttttataaatttttttttttttacacacagttattgatgctaaacctactcatgaattacttacaacaaaaggtaaggccattgcaaaatttcaagttctgtgttagtaatacatccgtactgtttgttttaaaaggcataatcataatcccttccaactcccctgctctctcagtagaatttgcttaagctaaactatcctttgtcatcagcctactttgaataatactttagaaaaagaggccttggagtcaggttggtgtttttactataagcagttattgaaggcatttttttttttcgctctgttacaaacagctgccttgaacccatggaagaaatttctcttaagaatctctgtgggtttttttcttttcttagaattttttttttgttttaatttttatagactacttgaattaggtaactgatttcacttcactcattttgttggctgcttaaaaaaaaactgaaagtga

SEQ ID NO: 684559 - DNA, 262 bp, Homo sapiens
aacaacaacaacaaaaatccatctcaggggcattttggtgagtatgttaagaattagtcatttcatttttaatgtcttctcaagtacaaasaaatgtgcaaaacaaacattctaattccagttctgacatcctatttcatcctggatccccaaaaagcaggtaaggtagtcaggaatgcagcaaggatggctatttcacattacttctatttgaaattaaatggctttcatgattgcaaggaaactgctgccaaatgtcttg

SEQ ID NO: 684560 - DNA, 2326 bp, Homo sapiens
tttgggttggagagattttttatgactgtaccttgagtcatgaggtatttgcaatattgctgtccttgtgacagtgattttaacatctacattaacacccacttttcctgtttttgatttaataacatcggcttaaaaatactatctcagttacagcttatgatattccatactagcataaaaattcattagaggtttctcracagtagtttatagaaaaacagagttggggatgataaaacctacaacagctttctaatttttttagaggatagaaaatgctgtgaactaattatttctacattgtcataacatgaaagtaacagaatataaaataagtttacatattgagcaactatttagagaaaacaaaaaaatgatataaagtttttcttattcaccagtaccaactggcgttagtagccacttgaggccttctattgggtataaattcaatccccacccctcaatcccaccccagtgccattttttttttttttttttaggaaagagtgcaattaatgattagtgacgtctgccgtgggtgtgggaaaggagagaagtatcatattggtcacatcttatcaaatctcctatgggccataccattataatacggtgttcttcagacagtcagacttctcttttaaagccattgagtggttttcgcatttggcttagaaaactaaactctccatttttgtttgtttgtttgtttttgtttttgagacagggtctcactctgttgcccaggctggagtgcagtggcgcagtctcagctcactgcaacctcagccttcctggctcaagtcattcttgtgcctcagcctcctaagaggctgggattacaagcatgcaccaccatgcctggctaattttttaattttttgtagtgatgggatttccccacattggccaggccagtctcgaacttctgaactcaagtgatgtggcctgcctcaacctcccagagtgctgggattacaggcgtgagccactgcgcctggcgaaaatctccattttctatattggtttattgtattaaaagaagaaaaacttcaataaaataatatttcaaatagatgctaaaacacgagaaaatttttagagaatatattttggcttaaataaattagattttactctgaaattccagtttcaaagcgttacttcaacatatgatggttacagtgctgtcactcaagtcttgagccaataatcagttctatttttttctggaacatggaaggtaaaaatttctggaatatgggaagacttactgcaagggaatacatataaaatatccttttttgtgcgtgaaaatttaggtgtctgtctacctattcagccagatgcaattagagaatactagttggcctcaatcagattattagacaataaaacttattaggggactagaatttattcttctttgtgttgctaaatttttatacatattaggcagtcatttaatttattcacttgggggtgatgattatatttaaccgcttgcatcctacgagttcagggagaaaacttccgggttaactttgggtggagtaaagaatgaaagtggaatatgattaagaaagggaagcaaatgctttctaaaattaaacttcaattcctaagaagtaggtgcaagattaaatcaccttgcgaaatagtatgagagtttcttccaactaaaattagagatcttgtggaaattaaaaatcggtttcatatttgttcagtcaagcattcaattgaataattaccaagtaatgaaaatattaaaatatattcacttttgaagtgaggatgttttgcataaatgatgtacaagtgtgaattcaaatatataataactatggtaaacatcaaaaccactagttgatgtctcaaagttgagagaggtattgtattgataaataaatgtgtaatatgatttactaattagcacatcaattaataacttagagctagaaatgtatttgtttgaaagtttctttttagtgctgataccttatctgttagttcagttatcctgttattttagttacagtatcagcaaatgtttaagatacctttatgcttattactaactttatgataactttatgcttattactaactttaagataactttggccaggtgcagtggctcacgcctgtaataccagcactttgggaggctgaggcgggtggatcccgaggtcaggagttcaagaccagcctggtcaagatggtgaaaccccgtctatactaaaaatacaaaaattagctgggcatggtgtgggcacttgtagtcccagctactcaggaggctgaggcagagaattgc

SEQ ID NO: 684561 - DNA, 641 bp, Homo sapiens
ttgtcttatttttaaaaacttaaagtaccaagtgaaaaactcatttccattttcaaaggcacaattaaatttcaggcttttaatcttttaaaaccctatatatwtttttttttttgagatggagtcttgctctcttgcccaggctggagtgcagtggtgtgatctcggctcactgcaacctccgcctcccaggttcaagcgattctccttcctgcctcagcctcccaagtagctgggactgcaggcgcatgctgccacgtccggctaattttttgtattttagtagagatggggtttcaccggtgttgcccaggctggtctcgaactcctgagctcaggcaatccgcctgcctcggcctcccaaagtgctaggattacaggtgtgagccaccgctcccggccttaaaaccctattaaccagactctgtctctaattgattctggagaaaattgcaaacttcatcttcctcaactgttgccacatagtcatcatttcttatagaataaggcactgatcccatctcaatctagtaacttgacctcagtgtatcttttgaggtttcccttttgctattccttctgtagctgtcaagttagactcccaaactttagaataaatccccaataattgctcggccaca

SEQ ID NO: 684562 - DNA, 641 bp, Homo sapiens
ttgtcttatttttaaaaacttaaagtaccaagtgaaaaactcatttccattttcaaaggcacaattaaatttcaggcttttaatcttttaaaaccctatatatatttttttttttgagatggagtcttgctctcttgcccaggctggagtgcagtggtgtgatctcggctcactgcaacctccgcctcccaggttcaagcgattctccttcctgcctcagcctcccaagtagctgggactgcaggcgcatgctgccacgtccggctaattttttgtattttagtagagatggggtttcaccggtgttgcccaggctggtctcgaactcctgagctcaggcaatccgcctgcctcggcctcccaaagtgctargattacaggtgtgagccaccgctcccggccttaaaaccctattaaccagactctgtctctaattgattctggagaaaattgcaaacttcatcttcctcaactgttgccacatagtcatcatttcttatagaataaggcactgatcccatctcaatctagtaacttgacctcagtgtatcttttgaggtttcccttttgctattccttctgtagctgtcaagttagactcccaaactttagaataaatccccaataattgctcggccaca

SEQ ID NO: 684563 - DNA, 652 bp, Homo sapiens
tgatttcaatggccatgatgacaaagatcagcaaaaaacaaatccattcaaggaaaatgccactttcttccatgagtagcatgcccactgtacttttatacacaacttcatgtggtctataacttcataaggttaacaaacaaaatctatatgccttttttcacgggataaaaatcaatgtttttcttgtatcattgtaaaactgaagctcaattcataattttttatgtacataagtctacgagaaaaaaatatttgaaggaaattgattctagaatctagaagttcttcctctatgtaatgcatattaatgtttaaatacatttatagttaaaattccaagtatcttgattctttagaatttaaaatttcattactagttttttgttttagcacattgtggtcagataatgtgtgctatatgttttctgcttttaaattttatcagtattttctttgttgactaatacatttcatttacatcgggaaaaaagtatattctccattgtacaacataacatgcagctattaaagtaagcttgttgattttactataacatccatagtctagtttatctsttgcttgtgaagtttgtcagagactgagaatgatatattaaaatatcccatactatagtcccagctacttggg

SEQ ID NO: 684564 - DNA, 1658 bp, Homo sapiens
tagttattggtgccccagacacagaaagaagggcgtggggatgagaaatgggagaggaagacctgttcaagacctgttcaggggcttctggagtccagacccaggctggggaccccttggtcttgtctggctaaggatgggaagggagaattcattcccctcttgttccgtctccagttgaagagagaaaggctcctgtaaatcccaccgctctccttgcggacaagaccagtcccaggtttcccaaaaccacaccaagagctttggatcctgccttgtgctgagaaatcaggattccggtctagggagtccagcatttgagtctgttctccctgtaagcagagctcagtgggagagcgttctcccttctgatacctacagaggtctttgggggtggggggcccagggcagccacagatgtctcccgacagtgcccagctccccgaccagctccacgtgccaagctcagggatgttttccttggaaagcatagacccaaagacctcctaagggtgggcctgaaattcctctgcatacggaattggaagaagaggtaggtggtttaaaaaaaaatactgagtgatattagagagtgtagcaaataacattcttgtgaatattatgaaattacttagtataacacaactcaataccagggtatgacctacactaggcaccctgacttctgattgccagaattaaggatggtgcaattttagtacatggtattatgcatcacctaccctgtattggctgtaatatttttatataatatgatttcttttattaactacctaatatgaaatatacaataatagatttctagaaagacaattcacatgttcataatacagcaatgtattttagagagatggccctttaattctctatctcaccaaaacacaaagcttcttaggagattggggtccagcaggaattcctggggcagggaagccaatgggctatgccaaggggctaaggggtaagggatcaggtgcccaccaaacccactgtggattgggggcacaggcccagagcaatgtgcaatgggtttagtgtgaagaggtagaagagaaggagctgttctatgtatgaatgtggtgtggagtaggggtgaaggattggagagaagctgagaaatatctttgagcaaaataaacatctcaaagattcctaggacacaaaacaaaacaaaacaaaacaaaacaaaactccactaaaaataaatacttttttgatcacagcctcctagagaaaaatatctttgaaataaaaaaagtatatcccaattgagatttaatacacttgcaaattatggcatggaaatggatataaaacctagcatgcctcagcagctatgtgctsccacaatccccgtgtggaaatagaattgggctgatgtatctcagtgagtgcagaggtacagacaagaggcagacgaataagaaattatcttcagacactctccatctttctacccactcagagatcttttagaagtagtgagatttcaagataactctgtctgtgcaattgtggtttgttcggcaacatgtaggcataaacactgctgtctctctacagtgcctctggctctgagaatcctcatctgtggtagtctgggctggtgtgggagatggaggcaattgttcagcaag

SEQ ID NO: 684565 - DNA, 2675 bp, Homo sapiens
ttctgcacatgctcaaacaagtgtagtctacacctaatttagctttcagttttcagggagtctcttaagttaaaccacaaggcccaagttaagatatcctgtacgggagtgctgccctgcatggtgcactgtcttctccaggagcaggaaggtaagacaacaggtgctgtttctgccccttctcaaaaccttctgctctgctgattccaaatgctcaaacatgttcaaatgcaaacactcggattggatgggatcttttcttttctccaacatgaagatagctttatcaacatttttgactattgaagaaagtttctgcaaaggtaatggataagcaagtgctgctctgttataatatttttgttggatcactttaacaaaatgtgaagattaagtgttgtgaagtgcattcatctccattcattcaatgtaaagaataatgatgcctgtttttgtttttgttcctgtgtttttctttctttctttttttttttttttttttgagacagagtctcactctgtcacccaggctggagtgcagtggtgcaatcttagctcactgcaacctctgcctccccattcaaactattctcctgcctcagcctcccaggtagctgggattatagtcaccagccaccatatccggctcattttttttgtatttttagtagagacagggttttgccacgttggccaggctggtctcgaactcctgagctcaagtgatccacccggctcagcctcccaaagtcctgggattaaggcatgagccaccatgcctggccattaaatgtgctttaaacactctcttcttctaagaagtcatagtcatattaaataatcatttttataaatgtctttaaaccctatgtaatttcccaaaattattttggatgtttttctgatctgtgaagtctcaaactctgagaaccactgatgtagactaactctccttctggagctggaatcttgagatttctctccgtccctaaggaatcatccagaatctgtttgattaccttgagagatggaagctcataatcattggtcagctgtgaccactggatcattctttcttatgtcagtctgaaatcctcccctgggtcgctgcaccataagagacatcagaacagcagagttatctttaagaattttccaaccacttttaaatatgggaagaggagcagacttattttcatatgcctatggctgtttccttaagcctaccactytggtattttgtaacaagttgctatctctctgaaatttagggatgcttcatggggctgattagcctttattctacttgtgagcccttaactggcctcaaggttgagacagcagggatgtgtgtgtcagtctgtagcaacatctcctctatctcagctgcacccctagaattcttcatttggttgagaacccttagggttgcccttttccatttcagtggggacagtgctggaagaacaagtcagtgtcctccactggcacaggttcttccagactcttggactcagatcccctgcctgccccaggtctccaaaccaacacctactgcactaatgaaaattcacagtagagggcagtctctcatgcataacaaggcttcctttgtggagatgtgtatttaattgaagaactgatagaaaagtttctttaattaggctgacttcataaaggggagacaaatcccttgccatcctagaagccatcttttgtctgtaggaaaggccattttgtttttgaacaggagatttccctcttcttatttccccactgttgggtctcatttgtgaagttcaaagatagaagggggttaattttagagtagcctttctgattttttttaaaccaaatatgcatggtggtaggaacatttgaacacactgcagcaagacttgctgatttctcaatcttttttttttttttgagatggagtctctgttgctctgttgcccaggccggggtgcagtggcatgatctcagctcactgcaacctctgcctcctaggttcaagtgattctcctgcctcagcctcccaagtagctgggactacaggcatgcaccaccacgcccggctaatttttgtatttttagtagagatggggtttcaccatgttggccaggttggtcttgaactcctgacctcaggtgagccacccacctcggcctcccaaagtgctgggattataggcgtaagccactgcgcccggccttctctgacaatcttaacagcttccctgactacaaaggataagcctggagaggattattaatgccaaacatctgttttgctttttatggtcaggcttgtgctgagtctgtctgacacaatatttaatagtcacagaaaccctacaagggagatcagcttgtggttatcatttacagatggggagactaagatagtgatattgagaaatttgctgtgtgaccatgagcaagatactggacttctctgggccttaccttgtttatctgtaaaacaaagacattgagattaaatagcttccaccatccccattttctctaggcttgggacaaaataaaatcaaaaacactaaagccagacttaccatggcagtgggattgtctgggggtggaggtgttgatgttattgacaaggaagcaggcccatgcttttgtcattggtttaaaattccttgagccgagcc

SEQ ID NO: 684566 - DNA, 1095 bp, Homo sapiens
ttttcatatctcctgtgcttcattatcctggagctacagacattttcaagttttcattattttaaaaatccctcacatgaatcatgatatcgtcttgcagkctctactcttagtgtcagctctttccatggtcccttgtagttgagtgtctatccccactctttgacaaatcagattcagcacttttctctctgatctcatttgctgtgacaggcctgtgggatgtgaggtacagcctgctcacctcttaaggatcttatctgcatggcctttctgatgcttctcctaaatctcttattggtacacgtgttccttctcctttgtggtttgcttctcctcctcttctcccacaaataatatccacagatattacctatatgttcataggtaacaatagagacattcctttcttacctcccttagtgatctcatctacaaatggtacttcaagtcttctatggagcaatctcttcccttgagttttcttttttgcttctacctgctagacatttgcatcatgatgacccacaagcatctcaaactcaatatatgtaaatccagactcattactgtcttttcaaagcatgctcattctcctgacttctgtcagtgccacagtgtctagcccatacacggtgccctatgtgttctttttgaatgactgaatgaatgaagagtagatagtaatactttccttcaagcctcctaagatcaaaacattgaaatcattttgattgccctcccatgcacatccatttaattactacattagagatgctatcctgcagtgttcctcctactcaccctcttctaatattaatctcttcacatcctctctcactttaaccaaagcagtaccttcttaccatatcttacagttttctttccaacctcatatagacctagacactctcctctcctcatcgctaatatcctgggcacttgcctccaattcatcaacttcagcctctatttatgtatcaataactgcttaatattttcagctttcctctttctttagcttttcttgtccctcatttcttactgctcactaaacttctctacttaaagtttccactggtgcttcaaactgag

SEQ ID NO: 684567 - DNA, 1095 bp, Homo sapiens
ttttcatatctcctgtgcttcattatcctggagctacagacattttcaagttttcattattttaaaaatccctcacatgaatcatgatatcgtcttgcaggctctactcttagtgtcagctctttccatggtcccttgtagttgagtgtctatccccactctttgacaaatcagattcagcacttttctctctgatctcatttgctgtgacaggcctgtgggatgtgaggtacagcctgctcacctcttaaggatcttatctgcatggcctttctgatgcttctcctaaatctcttattggtacacgtgttccttctcctttgtggtttgcttctcctcctcttctcccacaaataatatccacagatattacctatatgttcataggtaacaatagagacattcctttcttacctcccttagtgatctcatctacaaatggtacttcaagtcttctatggagcaatctcttcccttgagttttcttttttgcttctacctgctagacatttgcatcatgatgacccacaagcatctcaaactcaatatrtgtaaatccagactcattactgtcttttcaaagcatgctcattctcctgacttctgtcagtgccacagtgtctagcccatacacggtgccctatgtgttctttttgaatgactgaatgaatgaagagtagatagtaatactttccttcaagcctcctaagatcaaaacattgaaatcattttgattgccctcccatgcacatccatttaattactacattagagatgctatcctgcagtgttcctcctactcaccctcttctaatattaatctcttcacatcctctctcactttaaccaaagcagtaccttcttaccatatcttacagttttctttccaacctcatatagacctagacactctcctctcctcatcgctaatatcctgggcacttgcctccaattcatcaacttcagcctctatttatgtatcaataactgcttaatattttcagctttcctctttctttagcttttcttgtccctcatttcttactgctcactaaacttctctacttaaagtttccactggtgcttcaaactgag

SEQ ID NO: 684568 - DNA, 1458 bp, Homo sapiens
gcctctgcattcatgtataggggtgtgtgtgtgtgtgcgcacacatgtgtgtgtatgcatttctttatgggcgaaagtttgattttctgggtcagggaagactcattaraaacatcattagttagggttcccttcccttactatttttaactgagtatttattaattgaaattaaatcttttgcctcgataatgccttggtcgagcctgaatctctattgcaaaatgcaagatttgtgaaattaaaacaaattttaacattcacaaatgtaagtattataaattaagataaaacatctgacccagacaaacaaatgatcaattttaacaacagaattataaagggaggtttaattaatcaatttgttgacagtactggaagcatagtgaatgatcaataaatatttgtgaaggaagttagtgatgccagattattaattataatatcctgtgactgaaagaaatttgattaatattggatttcagcagttttattaagtcaaaatttttattagtctaaaaatttctcatctatttcctttcaaaagtaataatcatttttaatggtatgaattctgaaattatagatggcacaaacttatatttgttttaaaaaactgaacatcatccagtgttctcttctgttagagatatatgaactctacatagtatatgtatatatatacatatataataatattacagaatgtgcattacattactatatatgtacacgtaagtataatctattatttactcacaaaaatgttacaaatagcaatgtacttttttatgcagaatgacatgtaagagaatttagtagcaattcatctcctttgaccttctccctatatatgacaccagatgtattctcttgaaccaagattatgttcaattactttgttcaaagacttatgctcatcttgaggcaaaacaccatgctcctggtgctgaaaaatctgagataagcgtatttccttgcttttatttaaggataaattattagctctgctataatcaggcaaaaaaaaaatcagtagttatatacactttctgtgccaaaccagacttctttctgtctgtctatagtgaatgggacacaggaaggatattgtatctcctgaataaggattattgattattctcctcaccataaaggcaagccaagtggatacaagtctgtgttgtggtcaggataaagaaatgggctaattgatttcttaatgattaagtcctaaagagacaaaaactgtatcatccatgccctaacaatcctcatctgctttcacagagccttgtggttctaaattgaataattaaataaaaaatggaaacattcttttttagttgactggtttgtacctcagtttcccttgcaaaaagtacagatacctccttaagtctgaaataactagctaaacacaaatagttaactttataaattcagaaatttaaaatt

SEQ ID NO: 684569 - DNA, 1458 bp, Homo sapiens
gcctctgcattcatgtataggggtgtgtgtgtgtgtgcgcacacatgtgtgtgtatgcatttctttatgggcgaaagtttgattttctgggtcagggaagactcattagaaacatcattagttagggttcccttcccttactatttttaactgagtatttattaattgaaattaaatcttttgcctcgataatgccttggtcgagcctgaatctctattgcaaaatgcaagatttgtgaaattaaaacaaattttaacattcacaaatgtaagtattataaattaarataaaacatctgacccagacaaacaaatgatcaattttaacaacagaattataaagggaggtttaattaatcaatttgttgacagtactggaagcatagtgaatgatcaataaatatttgtgaaggaagttagtgatgccagattattaattataatatcctgtgactgaaagaaatttgattaatattggatttcagcagttttattaagtcaaaatttttattagtctaaaaatttctcatctatttcctttcaaaagtaataatcatttttaatggtatgaattctgaaattatagatggcacaaacttatatttgttttaaaaaactgaacatcatccagtgttctcttctgttagagatatatgaactctacatagtatatgtatatatatacatatataataatattacagaatgtgcattacattactatatatgtacacgtaagtataatctattatttactcacaaaaatgttacaaatagcaatgtacttttttatgcagaatgacatgtaagagaatttagtagcaattcatctcctttgaccttctccctatatatgacaccagatgtattctcttgaaccaagattatgttcaattactttgttcaaagacttatgctcatcttgaggcaaaacaccatgctcctggtgctgaaaaatctgagataagcgtatttccttgcttttatttaaggataaattattagctctgctataatcaggcaaaaaaaaaatcagtagttatatacactttctgtgccaaaccagacttctttctgtctgtctatagtgaatgggacacaggaaggatattgtatctcctgaataaggattattgattattctcctcaccataaaggcaagccaagtggatacaagtctgtgttgtggtcaggataaagaaatgggctaattgatttcttaatgattaagtcctaaagagacaaaaactgtatcatccatgccctaacaatcctcatctgctttcacagagccttgtggttctaaattgaataattaaataaaaaatggaaacattcttttttagttgactggtttgtacctcagtttcccttgcaaaaagtacagatacctccttaagtctgaaataactagctaaacacaaatagttaactttataaattcagaaatttaaaatt

SEQ ID NO: 684570 - DNA, 2310 bp, Homo sapiens
ctttatatgtggattggttatgtggcacttttaaaactcattagaaaccagtcactacttgaaatgttctcagaaaatcacagagaagtcgggtttacagatttagtgaagtcgtgaataatttccaacttagaatgaaatatgccattgggaaaaaagggaactaaatgacatgaggattaaaaataaaaaggagtttgttagatttgagtttgaatatcaaaaagcttccaaaacctagtctttagatatttattaaaaggaccttttaataaaagcattcttgagaataccattaccttggagtcccccatgtcttatataatattctactttcaacaatatagtaaacaaatgtcttaaagcttcttgtaatgcaaacatctttcaaccctatcgggaacttcctcagccatgcatagtttatttgaaatccaaaggttcatctggttctgctagactaaaattagattattaaaaccagaattttatactcacccgagcctccttttgccaagtatttgttctttgcataaaggacagaatctaacatagactcaaacagaagaaaatagccctgcataaaaaaaggggaaacaaagagtttagaaatgtgcaatactctcataagcaggtcaatttaaacatcggtgctactcttttaattacagaatatttttttttctgccacagatgtaataatattctgcaaaatctgaaacttttttttgcagtaagttattggaaaatcaggccagcttataaagtgaacccagaaagtttattgtggtaaaatatactgcattttctttatctatgattctactttccagactactctttcttcctcattaaaaaatgtttggatagacattattaacaagccctataactccctggaatgatgcaatatccatctagagcagtggttctccacttgattttgcctgctggggaacacgtggcaatgtctgagtaatttttgattgttgcaactgggggtgggggatgaacgagatgctactggcatctactgtgtagagccaaggtatgttggtaaacatccttcaatgcacaggacagcttcttacaagaaagaatggcctggcccaaaatgtcaatagcactaaggttgagaaactctagtctagaaaaccacttcccaaataatttcctgtctagtgactttctttttggtattaaaaaaaaaaacaaaaaagaaagtggagggatccttagtcaaaaaggtttaagaaacgccagctgccatatcctcctattagagattcataatgtgcatgagcacactaaaagttctgagtagttctcatggtaaagagaactgctgaacatattttaaccaagtattacccactttctgactacagaccttttttttttctatttaacatctatcaacaccttgcagaactagtgttcatggaaataaaattcatgaaacatgatcctggtgtactaccgattttagagtatgataatgaatcctctaccaagaaagggtaaataatacagtacaaatgaaaaaagaatttgccactactggtgtcacaaatacgctacattccaatactgtgcttcacagtttattatacaaatgacaaataatcatgactgagaaatcactatcagtttcagtcagtctttctccttctagggtccaaccccccaacagccctatgcagcagggaaagccaagtgctcagcacatagtacatcttattgctcagggtgaaccaacattaattttacctttactttagcattctatatcaaaactgttctcatccactcatttgttttgttcacaaataaatgatcagtggggtaagtataatattctttaaccacattaaaaaaacattttaaaggtttctctagaacaagaaaaacctgcaaacccagaatggataatcttcacaagagattaacagcaattttaatttatagaaaatacagctctcatgcttgaatcacttataaaggaactgaactgaattgccggcaactctacgtcggtattgacctattccccccagctcactgattcattgatacaaaaataactgcctattaaacagaggcttaggaacaaagcttgtttatcaatatgttacrttaggaaaattaaggatttgacagaaacatgtttttctggatagagtacttcagtaatatgtaaaattcttacaagttagttccccattaatattatctatgtattcaaagaacaagggacttatgggattcaactaagaaatctttaccaatctgacatattcacgcagattt

SEQ ID NO: 684571 - DNA, 1388 bp, Homo sapiens
tttttgatgtgattggagctggcagtcagttgttaattggaaacaagacatttcaagtaaaaacatacagattcgtttgccagcattctttgaggatatatccactgactggaatcctcatcatcttccctatctaaaacamattcataggttttaggtaatttccagttttggttactttaaatagaagaaaaaaaaaatctatgagcacttgccaagtagagaatcctccttgaattctacgatttccaccctcctactcgggctcttcaaactaggaggagacaactcaggaaggagaaaacactaaaaaaaattgtggaatggagtaaaacaatttgtttacaaacaatttacaactgtttgtgagtaaaacaattttacttgctccattccatagcattttttagtgttttcttcttcctgagtgtttccaaagcagtcacttttgtttgcatagaaaaaaaccaactatatcctttatataatcttgtcaatagtttgtgttcatatttaactgattttacataaataagcaggcaaacaaacacaataagatcttggtaaacaacgcaactgacagaagcagaacagtggcagcaagctgaaggtggctttacgtgtttagagagagccacaggaacctagcaaagtgttacgtaaaaagaatgcagaacatcacaaatttggtgaattagttaaatgcaggttgattatgatgtcttctatgacatattcatgtaacaaagtatactgtcataatgtcacctctccaagaaaatcctttatgccccataccaggtcaagtacctttataatatgacccaaattagaggctaacttattatcaacgcatagaaacaatcattctaaagcagggtttctcgatattgacactaatgacattttgggccagataaatttgtaggggctttcctgtccattgaaggatgtttagcagcattcctgggctctactcaccggcaccattgtccccacccaacccacagtcccaaattctaacaatctaaaatgtttccagagattgcccacagctcaaataatcccaggagtgtgaaactgtcccctcttccaccccattgaaaaccactgttctagaggtatccaaaatgcaaataaataagcattctttcctaatctactgtgttctctgcttaaaaaaaaagcaccaaacttaaggtcttacagaatgcaatgcaatctctatttatttcactgttataatagccttagatattaaacacttttactgcaaagttttttcaatgattccccagtctatcacttgacccttccatcttaaaatgtgctaatgctaaccacctaatttatcataaatgtgataatgaaattacatgagagttttc

SEQ ID NO: 684572 - DNA, 1388 bp, Homo sapiens
tttttgatgtgattggagctggcagtcagttgttaattggaaacaagacatttcaagtaaaaacatacagattcgtttgccagcattctttgaggatatatccactgactggaatcctcatcatcttccctatctaaaacacattcataggttttaggtaatttccagttttggttactttaaatagaagaaaaaaaaaatctatgagcacttgccaagtagagaatcctccttgaattctacgatttccaccctcctactcgggctcttcaaactaggaggagacaactcaggaaggagaaaacactaaaaaaaattgtggaatggagtaaaacamtttgtttacaaacaatttacaactgtttgtgagtaaaacaattttacttgctccattccatagcattttttagtgttttcttcttcctgagtgtttccaaagcagtcacttttgtttgcatagaaaaaaaccaactatatcctttatataatcttgtcaatagtttgtgttcatatttaactgattttacataaataagcaggcaaacaaacacaataagatcttggtaaacaacgcaactgacagaagcagaacagtggcagcaagctgaaggtggctttacgtgtttagagagagccacaggaacctagcaaagtgttacgtaaaaagaatgcagaacatcacaaatttggtgaattagttaaatgcaggttgattatgatgtcttctatgacatattcatgtaacaaagtatactgtcataatgtcacctctccaagaaaatcctttatgccccataccaggtcaagtacctttataatatgacccaaattagaggctaacttattatcaacgcatagaaacaatcattctaaagcagggtttctcgatattgacactaatgacattttgggccagataaatttgtaggggctttcctgtccattgaaggatgtttagcagcattcctgggctctactcaccggcaccattgtccccacccaacccacagtcccaaattctaacaatctaaaatgtttccagagattgcccacagctcaaataatcccaggagtgtgaaactgtcccctcttccaccccattgaaaaccactgttctagaggtatccaaaatgcaaataaataagcattctttcctaatctactgtgttctctgcttaaaaaaaaagcaccaaacttaaggtcttacagaatgcaatgcaatctctatttatttcactgttataatagccttagatattaaacacttttactgcaaagttttttcaatgattccccagtctatcacttgacccttccatcttaaaatgtgctaatgctaaccacctaatttatcataaatgtgataatgaaattacatgagagttttc

SEQ ID NO: 684573 - DNA, 649 bp, Homo sapiens
aaagcttaattaaaaagtaaaatgaaaacagagtattatgactaagagatcactggtttgaactgtaaacattttaaagtttcttttaatagcaattgcattagccttaaaaaactcagtaactgaaagacttgttttgattccatccaaagctaaatattggtaccttttaaatatctctatcatttatcaagtagtttttttttttttttttaaagagacaggttctcactctgtcacccaggctggagtgcagtggtacaatcattgcttgctgcagccttcaactcctatcaagtagatcatcaaagaactgaattgagaactgaaaggtaacatgaaatttacctttacttcactaacttatgtttactttcatttacctttcctaactttatttctgaactttctaaaattctaaatatgtaggcccagatttattttccagtttgggctttaaaaagcaatttatccaaggatgacttctaattaggatgtagaaggttgcaraagaccctcactctaacataaaaaagaccctcactctaacataacaaaaagaaaacactagactgactaaacatttctcattaaaaccacagaggagtcttacttgcaaataggtctaaataactgtctccagagggga

SEQ ID NO: 684574 - DNA, 1486 bp, Homo sapiens
atggtggacagtggctgcagttttgcagatgaagcctgggcctcaaggtcagacaagccagaggagcagggcaagcagtcacccacagtcacggcactctggctgrgctgagggcaggtgagaactcagccatggaactgaaactggaggcagaaggtggagagcattatgacatttttcttttgatttaccgcttttgtaagaagtggcgcatatacccagagaagtatgaagataaggtaaaaaccactacaaatactgcaatcccaaggcactactgttaacactatgatgaatatctttgcaggcatttctgtatgcatgtgcagacacatgtgtgtgcatatattaggttatattcagctctaagtgacagaaaaccaaaacaacaatgatgtcaccatgatagaagctcattcctctttcacatggaagtctgggtgggaggctcaggcctggcaaggcactccataatgtcagtctcctagactccttctgtcttgttgctaaattgtaggtagcctccacctcatggtccacaggacagaatttgccgtctaggaaagagaaaggaacaaaacaagagaaaggggtgggggtggggcaacaggaatacgtgttgctcttgaggaagcttccacatatttctgcttacatcccattggcctgaaccaagttacatggtcatacccagatgcacaggacttgggaaatgtagccatgtgcccagttaaaaatcctattagtgtgaaagaagagaggagtagatatccaggggtgtctggcagtctctgtcacaatcacagtgtctatgcaatattacataataggatcacagagacagtataatagtgataaagattagaagtctggagataattacaggttgaaatctggtttagacactattcagtttacttatctgtaaattagggattatagcagaacaaacctatttcataggattgttgtgaagattgaatgagctaatgtatgtaaaagggcttagcatggtgcatgacagtaagggagtaagctctcagcaaagtcagttattacattttctgcctttttttatcctcaccaatataacgtgaataaagttctatgttatcatctatagatttccttgtactatctttttaaatggctacacagtgttccattatgcagagagaacattatttaatttgtccaccactcattgccaccatagattgttcttaatttttgccattatcaacaatccttgcatcaacatcattttgtacttgcatgattacctcgttatagtaaattcctatctgtgaggtagctgggtcaaacacatgtgtattttacatgtgacaatatattgccaaacttaggcaaacagctagcttctgaagacattggaacattccagtttaaccaacagtttttgggtacctactagatgctgagccttgtgctagaggctagagagggtccaaagataaattaagac

SEQ ID NO: 684575 - DNA, 1084 bp, Homo sapiens
actatttcctgataattgttttatttatttatttttaaatgactgagcttccctttcaggcctctaaggagtgatgtcactgaaattaccataatagtgtagaaagctcacggatatccatatcacagcaaatttcattcccaaagctcatggcactttatagtattcctttatttgtgataatgttattccctttttggcataaagaatattttcctccctatctgaaaagtaagaataagtcaattgaccaaagttaggttgtgactcagatgaagaatttgtggctgaacacgaacctcccctttgctaaatatactaaatacaaggctatatacagaatcaatggactgaagcttttgaatgccaacactgcatactgaaggtattcgacactttgtttcaaatcagcatttctctttgtccctaagaaaaacatttagagaatgatctttctgtcgtacaggcatatatcccttctggttcttactgcaraaaaatctttttctgaaggacaaaatatcttttattttgtctctgaactgctttaagtctctccaggtcttacatatctataattcttcagaaaaacttgcacaaaatcgatgtgtaataaatttaaatataatagaatgattgtaattgaaactcctcaaatgttaagaatcctacagaaggcaacacattgacttaaattcacattaagattgcatcatcatctacttgcattgcacttgacaatttaaaatcattttcacatgattgcagtttcagaaactgggaccctcaaaataaataattttcacagtaaaaggcttgccccaagtcacaaaaatataaaattacatagccaaagtttgattcacccagatgtttggattacaaattaaaaatattctttctaaaatgccacactttgtcaacttcagatcttttattagctctcattgtggcaagaacaggttagcaggcacttaactcccaaaaatggacagaaattgaaccataaagtcagaggcagcaaagacaaggtgtcagagtgtgtaatgaaaatggcacaggcttcaaaagccaggccaacttc

SEQ ID NO: 684576 - DNA, 2170 bp, Homo sapiens
attgacttcttttatacttgaaagatgtgttcaggctcttttgcaaaccatatattcaaaagcatctttttggaacaactcttgattttataatattgctggtatctctatctttcactaactggcctcttcttaaacctttttttattactggtgataaaaaagtatgatttcttctttagattgtagcatatgatttctgcagcttctgcaaataatcccccttctcctttcttgacttctaatagaatttaatggaagactctaacagataatctcatgataaattggaaatagaaggttaataatttttgtgcctttttgctttctgaactacattcaactgaagatctttctgctcagaaaaataatcaactatccaaaataactaggaattaagatgtaaaaaaaaaaaagacagattgaagcataaaagagacaggacaaaagcaaaatatcaaggaataggattaaatcaataaaaagcctgagggagaaatgtatatttttttcataaccaaccatgttaaaggaaaactactagaacaacatagtgtctcgtagaatctgtttaaagtatgcccactgaatcattacatttatatgttgtcatagatatacatatgatagatatgtctatgatagtctatgtagatatatcatagactacatatgtagtcatagatgtatctagtaatcatcactacaagtagcaaatatatcaaacagatgctgaataagattttccatggcattgacatgttgcttggtcagttttctcatcaagaatttcagaaacacagatgctctagtttgtcagtagatttttctttattttttttctttttacttgttttttgtttttgtttttatttttttgtttttgtttttgtttgaggcagggtctcactctgtcaccccagctggagtgctgtggtctgatcatggctcactgcagcctctacctccctagatcaagggatcctcctgcctcagcctcccaagcagctggagctacaggcatgtgccaccatgcccagctgaatttttttttttttttttttttgtagagacatgggtccactctgttgctcaggctggtctcgaactcctgggctcaagtgatccttccgcctcagcctgtaaagtgctggaataacaggtctgagctgctgtatttgacctgccaagtgcttttttaatattgcttagtcctggttgggtataatcaagaaaaacatcagagaccaaagaaaaagagggtttcattgaaggaaatgtgataaaaatgctataatacatctctgtcctggaggcacttgctatctagataggtagcataatcatactcaaagaaaatacattatttaacaaaaatgtacagctacaaaatacaaagtaaatacttataataccattgggagggagagataaagaaaattaatttattcacatcaataggaatatcaaaatacaagaactttccactcatatacttgttcaccaaataatcttacttaaatctgattttaatttaaacattttttctaatatacattaatattagagtttcaccttgcattcttcatttgcaatgttaattatttatttttcacttattggaacactatgcccycataatcaagtaatctgttggtaagtttcactatttatttctgaaatcagtggattggccttatgtttatcagttcttcacgtgagaaagaggagattgttggcaaaatcaaataaaatacagtggctctgagcctctacctacttcattcaggaccttaacatttgctgtctcttctcttcctcattaactgtggaaatcacaaaggggagtgcttaaaagtggtctttgagctactgtcaccgcatggggtatttgcggcagtttttttctctcttgtttcagtttctactttgttgtgtccactgtatgaagagtggcttgagttattcccaccattgccagtgcacctcctgtgtgaagacaaatacccacaccaggattagaagggggaaatctactgaaatggcagtggggagggatggaaagaacatacccaggaaggctggagaagaggcagaagatgaaagcggagcctgtatcctgtctcaagtgaggagacaggtttatgagatggagagagcacagaaggtg

SEQ ID NO: 684577 - DNA, 1034 bp, Homo sapiens
tgaccttcaaagcagtccctttgtgtttcctataactggaagagaaatgaatgatgttcaaagcattaacactcaaaatccagagcaataataatggatgttcaacaaggtgtcayaaattgaatctcatactactgttttgtgttattttacctttgaatggagaatacatactctgtgtttttcacctttactaaaaatatataactggtatcatttctgttgatttcatgagaattcacatttattccttcaaagttaaacaggaatgcattgatgttctcttcccattattttctttaataagtttttatttttaggaataaaaatttacaggataaaatgtaagaccatggtaatatagttagagataaatattattactcaataaatattgattatttagaggccttccatctgcacaatttacaagcccaaagagtaatcccaatcagaaagctgagattaaaccagtttgcttctgttaggttaatcagtcaatctactctaaaaatgaaacttccagatatgaggatttatatttcttttctttttttgtgggggtgggggggatggagtcttgctctgtcacccaggctggagtgcagtggcatgatcttaactcattgaaacctccatctgcaaggttcaagcgattctcctgcctcagcctccaagtagctgggactacaggcgcaagtcaccatgcccagctaatttttgtatttttttttttagtaaagtcaggtttcactatgttggccaggctggtctcaaactcctgacctcaggtgatctgcctgcctcagcctcccatagtgttgggattataggcatgaggtactgtgcccagccaagaagatttatttctgatcattaatattattcacacctacataagcagaatctgagtttctttctgttcattttaacacaaagatgctctccagtatgtgacagcagccaaatccagctatcatatttattcagaatgagcaagaactgagacatatctcttcataagagataatttt

SEQ ID NO: 684578 - DNA, 1034 bp, Homo sapiens
tgaccttcaaagcagtccctttgtgtttcctataactggaagagaaatgaatgatgttcaaagcattaacactcaaaatccagagcaataataatggatgttcaacaaggtgtcacaaattgaatctcatactactgttttgtgttattttacctttgaatggagaatacatactctgtgtttttcacctttactaaaaatatataactggtatcatttctgttgatttcatgagaattcacatttattccttcaaagttaaacaggaatgcattgatgttctcttcccattattttctttaataagtttttatttttaggaataaaaatttacaggataaaatgtaagaccatggtaatatagttagagataaatattattactcaataaatattgattatttagaggccttccatctgcacaatttacaagcccaaagagtaatcccaatcagaaagctgagattaaaccagtttgcttctgttaggttaatcagtcaatctactctaaaaatgaaacttccagatatgaggatttatatttcttttctttttttgtgggggtgggggggatggagtcttgctctgtcacccaggctggagtgcagtggcatgatcttaactcattgaaacctccatctgcaaggttcaagcgattctcctgcctcagcctccaagtagctgggactacaggcgcaagtcaccatgcccagctaatttttgtatttttttttttagtaaagtcaggtttcactatgttggccaggctggtctcaaactcctgacctcaggtgatctgcctgcctcagcctcccatagtgtwgggattataggcatgaggtactgtgcccagccaagaagatttatttctgatcattaatattattcacacctacataagcagaatctgagtttctttctgttcattttaacacaaagatgctctccagtatgtgacagcagccaaatccagctatcatatttattcagaatgagcaagaactgagacatatctcttcataagagataatttt

SEQ ID NO: 684579 - DNA, 593 bp, Homo sapiens
gaccttatattcaatgtcattgtctcacgctagagttcctcaattctctcagctcattgtacctatatggggaatgttttaaagtaccaactggataggctccatctcagaccaattgaatctgaatctcttgggaggtgcatcccacattttggtagttttgaaagttctccagctacttctaatgtgtaactaacactggcttattccagcggttcttaaatgtgagctgtatcagaatttcccagagagcttgttaaaacataaatttctgagtcccacctccaaagtrtctagtgggtctgcatttctaatgagttcccaaatgatgctgatgctgctggactgggaactacactttgagagtcactagcttatactttcatgtagattgcattgtgcttagcttctccactttgggaggacagggaatgctatcagggctactttatagaaggaaacaaaaagacttgaaatgaaaataacaagatgctttaggcatagtttccaagttaatcacttccatgttgctcacaattgaatagagatgccagaaatcatagaatgccattcagctgagagatggaggcaac

SEQ ID NO: 684580 - DNA, 2151 bp, Homo sapiens
catttttttcccctctgtcctcctgccccaggaacaaacgtcatgtcccctctgctggccctttatcaaaaatgcatactccatttggatagagtggggcctcacatacccgcaccaattgctctggctgaacccagatgcttgcatctgggaagggggacactgacacaaaaggcagggtgtgggtcatgctgaacatctggccagaaggatcttatgcagctggacaagctgaagactggtggccctggggatactccaagtcatttgctcttcccagattatctcctttcttatgggccaaagcaaaggatgctggcacatgaatggacagatggattgatgcataggtagctaggtaggtaggtagagagacagagtgaagatggctttggcgagaacaaatgacccattttcaaatttaccctcaaaggtaccatccttttgttaagtaagcctcctacttcacctctcctcttttcaatctgccctcatttctatttgcaatgtaggaaatgaatctttttctccctctttatttcgtaaagtgttactcacttcttactttggctctagaatggaagttgaactcaggcccaccacaacctttcaacccataaaaaagttcagaacagcctacgggtaaggaaaattgttccagcaagccgaggcaaacatctaatcatatgtgtgcagggggctgcttgagatgaactagccccacactctccattgtaaatggcaactgaggcacagaaagataaagtgacttacccagtggagaatcagaaacaaaaaatctaactgtatgtatgcaacccaaagaaagtttctaatatccagccatactgggtactggggactctgaaacaggcaggaagaattgtaagatatgtcaggggtcaagacagagaaaaggaaaggggtctaaggagggcttctaccaagcaaaaggctctgaaatgaccaaccatgaaggagaccacaaatccattgggaccacagaaggaaatctggaaattggaaaataaggtaggtaaaatggaaccaataggttgctactctttccaaggataagtgaaacaytgtcatacaaaacagcattggacttggagggaaacaaacaaacaaacaaacaaacctctgtcatagtcctggttctgcaacaactcaatatgggatctgtcatgggatcatttacctatgcaggtctcattttaccacctatgaaatgaatgtcattttccctttggccctaccctgccagcaccctaaagcatccctctcaccccaaggctggagaaaagatggagggacaccatctcctctgtcccctgaaaatacacacctctaagagcttgtttacactttgtggaagaattcctattaataatcagaaggtcagaggggaggacaaagagatagtcttgtactatggatctgttattggcttacaaacaggaatttggacagatggccactcagactgctacatgagttccccattccagtgaggctgaagtcaaatccacaccctagctaacagtaaacaatcttccaattcaaaaggcattagttcaaatggccaaggcattggggtgggggtggcagtggacgggtagtgtagagaccgcgggggtggtttcccaccagcctaagaagcaagttatatactcaaaattgccatcctagctgaactgtgtccttttgctaaatcctctcagcctcatgaaattttaaaggttaaacctgaaatcactgacacctccagtcttaattttaggctcccttcttaaagagcaacaaggatgactaataataactttgtacataactccaagcaagcctggtcttgattccttatatttttcttttattgcttctttaaatgatggggttctaatatttacaggtgagatctttaacaaaatcccccagatatggagccaagagagcttttatatatatttttaaagactccatgtgtaaccttggcacatacaacccatactcttacagtggtgtgtacatttgcttgctgtccaagtcatagctatttcaacttctgggtggaaatgtctttaatcctccacctttcagattgaagagataattagagaccacatgaaagacgagacctccaaatgccct

SEQ ID NO: 684581 - DNA, 1126 bp, Homo sapiens
ctagtactttgggaggccaaggcgggtagatcacctgaggtcaggagttcactaccagcctgattaacatggtgaaaccccatctctgctaaatacaaaaatattagctgggcgtggtggcgcgtgcctgtaatccgagctacttggggggctgacacagaagaatcgcttgtaactgggaggcggaggttgcagtgagccgagatcatgccattgcacattgcactccagcctgggtacacaagagcgaaactccgtctcaaaaaaaaaaaaaaaaaaaaagtgttagagtgggggcagaaccctccaaaaagttaaaagtgtcaaaaacacttatcatgtcactaataattgcaacacatccacaaccacagcataacagtgtctcatatgtaaatgaagtatttgcagttattctatttttttgccaccctgcagaacagggaccctgggtcactatgctattttctatcccgaccacaccttaaggaggcaaaacaaaaagttttcccaggttccagtgaacatgtgatcatttctttttcttggcactaccttgaagatacatacatattttttgttttgcttaaactgcaacttgtatatgtgtcaaatgcaacccaatccattcagcttaaaagtcctattgaaagatttcaccatagsagtgtgtttcccttgtggtaacaaaacataattttgtatcagcatttaatagtaaacctacttaggattcattcgggagccaccaggtgaccaaagtactctgctaacaagttttcctgcattagcatatgtaattttcccagcagcattatgaagacaatgctggtactgtttaaaacaaacaaacaaacaacaacaacaacaaaaaaacactgaccagaaggattaagaaactaggaatagcaaggttaactcgtttgttgagagtttttagctatttgtgccagaaccaacattcacccacccaagtcagtcagactataaagtgaaagaagtttcccaggggaacactgtttcctctgaatgttcacaaaggcagtcacaaaagtataagcctctatgataatttaaagcagtcaattatgctccaagtccttttaaaacacatacgtatgcagta

SEQ ID NO: 684582 - DNA, 1143 bp, Homo sapiens
gaaacaaaccatatgtcaaatgaagggacctcactgtccccagggctcacctgctcctaattaggcctggagtagggarggagcggggcaccagagggcatcagccagcatctgttcctcagagtgtgtgggtgttgggggcaatgaaggaaagggaaggcttgggggcctcgttttccctgctgggagcccccaggccccccaaccctctgattttatcctgtcatacaagagttgctggaaacgctatcattctggcaagtcactcagtcaaggaaaacctctttaatctcttttggggtgcatctagtccacaggtttttaagcttattgaccgtacttgtctccactttgacaaacacaaaaccctctccttaaacttaacttgaaatttaaaagaacaaatcaatctcacgagactaagcgctggtttcttttcagggctcatatcttattcttccagattctaaaggcctctacttaccctcacacccaccttccctccccgagtccattttacagatgagggaataagtccagagaggttaagtgacctacctgaggtcacacagtaacggcttccgggcctggccaacagcaccgccctcatttgtttctcttgaggccttctcttcccaccagccccacagggcaaagtcgctctttgaagccaccttcagaattcttctccccactccctgaggccctccccaccaactgcgaaagtgtggcctttccagaggtggccagttcattcagccaccctggggagctaatgtactttctgaatctaaagcgacatgtgacttcaggaccacagacaggggaagaggagtttgatacaagggatctgtttcagggcccgttcaagagatgcctagaggctgtcctgagagggtgccccttgctaaactcctaccttcagaaaccatctgcatggctgtcctgcccctggcctccttggcccactgggacgttgctgccagtggctctgctggctggcttcatcttaaatggaactggaacgtcagagaagagatgaggctccaaaggcagaggccaccccacccccaaatccctcccaactattagcctcaaagtttccccatccatgagctctgctgtcgggttaaactttttaga

SEQ ID NO: 684583 - DNA, 668 bp, Homo sapiens
gaggtggattgggctgttaactaataaaaaggttgttttatttttctggattttgtgatatttgtggtagttctccgctttttaacacttgtaatttgttatgctttcttttctcattcctaataaattgtcgtgtttgtgctaattttgtattagttatttggtgttatttttcttttgttttctttttttgagacagaatttccctcttgttgcccaggctggagtaaaatggcacgatcttggctcactgcaacctctgcctcccgggttcaagcaattctcctgcctcagcctcccaagtagctgggattatgctcgtgtgccaccatgcctggctaattttttgtatttttagtagagacggggtttctccatgttggtcaggctggtctcgaactcccaacctcaggtgatccgcccgccttggtctcccaaagtgctgggattacaggcgtgagccatcgcgcccggccttggtgttatttttcttacctaacctcccccgccgcccccagtaaactgcagacccatgactcggtcactctctttgggccttgygtccttcctcctaggcagggatggggccctgaccttgccttgaaccctcttccagggagaattaaagagatgatcctgttaattgttcggtcgtccctgacacctgc

SEQ ID NO: 684584 - DNA, 897 bp, Homo sapiens
tgttatagtagcacaaacgggctaagacaccctgtcacaaggatttggtcattcagatttgtgaaggactagcaatctgaaagaaaaactgaaattgagagacagggttgaggttggagattcaggtgaggcaggtgaatacacgaactcctgttgtgggcttagttctccctttgttagctccatgtttatatcatggtgctcctgaggctaattatggttttagttcccaatctaaggtcacgtgagcttagatgtggatctttccccattggagccatcagatgagaccccagccctgggmaacatcttgattttagtttgcaagagactctgaaacagatgaccaaggtaagccacacctagtttcttgacccacagatactgtgagataataaacatgtgttgctttaaactactatatttcatggcaatttgttatgcagcaatgggtaactaatgcaaggaggtcaatcgaaggggagggtggcacaggtattagtgtttgagatttgtggctggatataagtcagagaggaaaacaagtaggctctgacccaagaagtttagatagagagtggcaagtggggtctcaggcaaaggggttggctagaacatttgctgagcctggctggagacccctaatacctgccaaagatgtcggtaaagtggagaggtctggagccagatgcagaagtagcttaactttcaaagagcccaggccagctgagagcctcaccctgtcctactcatagatgatcagttgagtcatcctgaaatatacattcagaactatattaagggggccaataattgctaccacttattatgcacctgctatagctcaggctcagttcttttgccaacatgacctctattctcatgactctgagaagc

SEQ ID NO: 684585 - DNA, 897 bp, Homo sapiens
tgttatagtagcacaaacgggctaagacaccctgtcacaaggatttggtcattcagatttgtgaaggactagcaatctgaaagaaaaactgaaattgagagacagggttgaggttggagattcaggtgaggcaggtgaatacacgaactcctgttgtgggcttagttctccctttgttagctccatgtttatatcatggtgctcctgaggctaattatggttttagttcccaatctaaggtcacgtgagcttagatgtggatctttccccattggagccatcagatgagaccccagccctgggcaacatcttgattttagtttgcaagagactctgaaacagatgaccaaggtaagccacacctagtttcttgacccacagatactgtgagataataaacatgtgttgctttaaactactatrtttcatggcaatttgttatgcagcaatgggtaactaatgcaaggaggtcaatcgaaggggagggtggcacaggtattagtgtttgagatttgtggctggatataagtcagagaggaaaacaagtaggctctgacccaagaagtttagatagagagtggcaagtggggtctcaggcaaaggggttggctagaacatttgctgagcctggctggagacccctaatacctgccaaagatgtcggtaaagtggagaggtctggagccagatgcagaagtagcttaactttcaaagagcccaggccagctgagagcctcaccctgtcctactcatagatgatcagttgagtcatcctgaaatatacattcagaactatattaagggggccaataattgctaccacttattatgcacctgctatagctcaggctcagttcttttgccaacatgacctctattctcatgactctgagaagc

SEQ ID NO: 684586 - DNA, 735 bp, Homo sapiens
  misc_feature 10: n = A,T,C or G
tatgacaatnttactgagtgttaaaagtaaattttgtagtttattcattttgtctctcacccctctcacctacccaccaccagactgacttttattaaacacctcacatttattatacttttttaaagctcgattcctttctttatgagcccattttggatttttattataatctataaaagaagcctcaaaattctccctatattcctctaaaataaagacwaaaagtcatgaccacttgtccctttctcgtaatattacaatttaatccttctctgatagtagattaaagaaatgttctacttccctgtagttaaattttaattatcttatagaagaagtcagttataaataaacatggacatacataagaaaacacctatttttttccgggaaatacggagagtggggtgtgtgtgaaagagagagagacagaaagggataaatggaacaaaggtgttagggtgcagcttcggagtgggtagatataaaataataaaggaaaaaagaccaatgaatcaaatgaatatggtaaaaatgtatttaaatgtgaaatacctgaggatataggcatgtatgttttttcaacaattaacaatttgtaataaaattttctcatatgggattaaatatatgtgtgacttgatcccaagtgtgctgtgctataggatacatattacctcataagaagaatgctgtggaaaaaagggaaagatgagaatgttataatcaatg

SEQ ID NO: 684587 - DNA, 714 bp, Homo sapiens
aaaagaatgctctcaaagttgttcttgccaatacaagaggggagttgatgcataaatatccaggcttcctcccctccttgggtaagcaacaccgaaggggctttgcacagtctccctggggttgcctcggggctgaacctcgctgctcaccacactgatgaatgctcactgatgagagctcaccagtgcctttccatgctgtgtcctttgcacactcctctactcacactttctggggtcascgctcagtgcactattgcacgtacatctttgttgagctcacaggctctacttctggggaaagtaggacaagagcccatctctttcagccttgcgcatttggacacgtgcttatcggccccactccttgcaaattcctggaaggcacgtgatacttgtggatccctgcatgcttcagagcatctggcaaacagtaagtgcctaatagatgtttgctaaaattgcataagtgtaactttacactttccaaatagacatcaacacctgttcctacaacttcctcatgtcaagaattttgcatgcacattttcagaaaggcaggaaagctctgggatgtttgtgactgtttgctgggctccagtccgctgataatcagatgttctttgcatagcctgtgattcacaaacagtatctgtaactagaaaagtgtctttaatagataaaccaagaacaaagacattcaatccccagtcc

SEQ ID NO: 684588 - DNA, 648 bp, Homo sapiens
tcaggctcagcacaatcggccacaccctatctgaacacacaggtgagacagaggtgggtgttggcttcttttgggggtctctctgtccctctcttttgtgtacacattgttctctcctgtctatctctgggaatgggtgggtcattgttttggaccaggagcagagaaaacaaggccacagaacgagccaggcacagggatgctttgatagtgaagaacgataattcacaactggagaggaatttcctcttctgttttcccatctcttttcattttgttagaaaccgctatatcagacttacccttgggtgtcacaacagaggtacaaacaaatcaggaagtcttcagagaagaaaatatttcttttcccrtctgccccagcttcctttaaatgaataaagtcagtcccacggtgcaagaatagagtactctgctagaacaaggcattttctgatatgacccaaggttatctatttaaaccaactggttctctactcaatctgctacgaagcaaggtttttttcctaaatgtcaacacaatctcatctatattttggttgaaaatcaacactgacaataaatctaaagttgacgacagagagagggagggagcaccaggcggaggctgtatgtgtggagtgaagtgca

SEQ ID NO: 684589 - DNA, 1103 bp, Homo sapiens
ttttttttttttttgtatttttagtagagatggggtttcgccatgttggccaggctggtcttgaactcctggcctcaagtgatccacctgcctcggcctcccaaagtgctgggagtacaggcatgagccaccacgcctggcctgaacatgggttttttttaaactggaggcaactcttctgttaaggagcacaaagctctcaaattttggccctagctctcactagccaggtggcctgtgtctgtcgtatcccttctgaccacctctcctttgctgtgagaagaggccatggctcctggcccttggggctgtgtgaggattaactgagggatgtgcaaaacgcccagcacctggcaggtgtcatgaagggtctgacacacaggagtctgggccacgagcccaagtcccacgagtggggtgtgaggaggcccaccaagcccctccccactgtccctcctggctcctgggaccctgactcacctggagtagatgccsgttctatacatcatgaagtcctgagtcacctcaaaggcaaagctcacagggttgtagagggccacagcctccaccatcgcttcctcgtcatactgtggaaacaggaccgagacagaaacacatggcctgtcacctccccactcctttcacagtacagccttttgcctcaagctaggggctagaggcccagagcagcatggatggccagaagcagctcccctgcggcctctctcccttcctgtctctggctgggtctgtctggccatctctcgttcctctccccaactctgctcctaggaaaccctgcaccctctgagatagggaccacggggtacagcgtggacctactcattcagtcattcacatccattccctgaggtcctctcctgggccagcagctctcacccctacacccataaacccagagtctacaaagctttgctgctagaacacaggggttataaaccatggacgggtaggtcccagatggcggtggaaacgagaagacccatccgagggctgtgtgacttctgagtagaacctgtcccctccaagggggaaggtaggtggggggaagtcagggtggcttcctggaggctgcagctttg

SEQ ID NO: 684590 - DNA, 667 bp, Homo sapiens
tgtggtatgtgtttttgtatctgtgtgtgtggtgtgtgtgtctgtgtctgtgtgtggtgtgtgtgaagggcagggtagagggcctccactggctgagggccaaggcatcacttggagcttttctttcatctccaccccaaaggagctctgacagagccccttccagtgaccttctcaggtgtcccctcctccagcacaggagacctggaggctgctgagctgctccacacagagcctcaggaccttgcggccctgcatgagaccctgatgctcagctaaccagctcatccctaaagggggagggaatgagcatctcagaccccctcctgactcctcataggccsagggcctttgctcatgctgtctgttcagccacacagcctcctctcccctggcagaccaccttaacatgcctcaaggcctgttcaagtgctacctctgctgtaaagcctgtggcctgggcaggatctcctgtcccccgacacagcccactacttgtctcattgctgtgagctcagcatcagtcccagctccatccctcacacacatgtgaccctggaaaagactcctgcccctgtccacacttcctctatcaaataaggacattgaccctcacagagacattgcacagataagttagcagtgagctcacagtggatgtggattt

SEQ ID NO: 684591 - DNA, 638 bp, Homo sapiens
cacacccacacacacacactacacacaccaaacacacaccacacacacatacactacacacacccagcaaacataccacacacacaccagaccacacacacagacaccacacacacaccacacacaccacaccacacacaccacgtacacacacacacatcacccacacaggcacacgcacacacaccacatacacacgccacaccacacacaccacatacacacatcacccacaggcacaccacacacacacacmccccacatacacatgcacacaccccacaccacaaacaccccatacacaccacccacacaccacacacaccacccacacaccacccacatggcacacacacaccacccacacaccacccacatggcacacacacagaggctgtttttctccacggtcctcgctccattcacatgacttggaaccacttaggctggagatccctgacgtcaggaaccgtgtttcctgcctttctatctcagcgtgtagcaagggccttggtgcagacctcagtgcccgtctgtggaggaaatgggaggaagggagacacttagtctaggagggatggccccacttcccttgggacccggcagatgggctgcttgcaggtgctcagcccagccgg

SEQ ID NO: 684592 - DNA, 423 bp, Homo sapiens
ccagcactttgggaggccaagacaggagaattgcttgaggccagaagtttgagaccagcctaggcaacagagtaaaggctcccaactctacaaaaaaataaaaacattagccaggcgtagtggctcatgcctgtagtcccagctactcaggaggctaaggcagaaagatcacttgagcccaagaggttgaggctacagtgagccatgatcgtgccactgcagggcagcctgggcaacagagtgggatcctgactctgttaaaaaaaaaaaaaaaaaaaaaaaaatttaagtcctcatggtctggtagggaaactttgagttttcgggcatggctcttagaggrtaaacacatggtgattttaataacaagatcaaacattgaattcatcagcttaaagcactaagggaatcaggcctaagcca

SEQ ID NO: 684593 - DNA, 1466 bp, Homo sapiens
atttaaacctgtacacttttatagcagctttattcataatagccaacaactggaagcaactgagaaggcctacaatgggtaaatggttaaataaactggtatatccatataatggaataccactcagcaataaaaagaaatgaactatggatacatgtaaacacttgagttaatttccatagaagtatgctgagtgaaaaaagccaatcccaagaagttacataactacataattccatttatacaacattcttaaagtaacaaaattatagaaatggagaattagtggctgctaaggagaaggtggagatgggaggaaagtacgtgtggctatacaagggcaacatgacggattcttgtatttatggaaatgttctgtagtttgattgcatcgatggcaatatcctgattgtgagattgtactctggttttgcaagatgttactatcgggggaaactaggtgaagggtacacagaatctctctgtattatttcttgcaaatacaggtgtactacaygtatgtgagtctactattttctaaaaacataagccttaatttaaaaaaaattaaagcatataaaaataaagtaacattacattcccacacctgatacaaatgaaaaaaggatattgtatgcataaaacaatttctgctataaatatgaccatgttgtaatatcaacaactaacgctggaagcaaaataactaaaaaattagtttcatggccaggagcagtggctcacgcctgtaatcccagcactttgggagactgaggagggcagatcatgaggtcaggagatcgagaccatcctggctaacacagtgaaacctggtctctactaaaaatacaaaaaattagctgggtgtggtggcgggcacctgtagtcccagctactcgggaggctgaggcaggagaatggcgtgaacccaggaggtggagcttgcagtgagccaagatcgtgccaccgcactccagcctgggagacagagcgagactccgtctcaaaaaaaaaaaaaaaaaaaaattagtttcataatcagtagatgtggaacccagtgaaaatattctgaaaagaatctggacaccaataatgaaagcaacaaaaacagagaattctctctacctatcacaggctctcatgggaattacagttaaattttttaaaaattagcaaataaaaatagggccaggcatagtggctcacacctgtaatcccagcactttgagagacccaggcaagcggatcacttgagcacaggagaccgagaccagcctgggcaacatggtgaaaccccatctctacaaaaaactagctgggtgaggtggctcgtgcttgtagtcccagatacccaggaggctgaggtgggaggatcacctaagccacggaggttgaggctatgagagccatgatcacaccactgcactcctgactgggcaacagaccctatctcaaaaataaaatga

SEQ ID NO: 684594 - DNA, 604 bp, Homo sapiens
ggaaaaattgagaatcaatctgaatttttcaagctggctataaaagacaataatacttgagctttcaacatgacaggattaaactatttctttatggcactgatactcagtttgatcaaaaggcatatctaggtgatatatccagtatttcaagagcctaaaatcatcattttagggctgtaataacatggcatttaaaagtgaagataggcyggaagtggtggctcatgcctgtaatcccagcactttgcagagccgaggaaggtagatcacctgaggtcaggagtttgagaccagcctgggtaacatggcgaaaccccgtctctactaaaaatacaaaaattagctgggagtagtggtgggcacctgtaatcccagctacttgggagggtgaggcgggcgaatcgcttgagcctgggaggcgcagattgcatttagccgagatcacaccactgcactccagcctgggtgacagagaaagactctatctcaaaaaaacaaaaataaataaataaaagataatcttgatagattttttaaaggatgatgtggtacaaacattttgtcattttttttttactctttcccagcccatgattattct

SEQ ID NO: 684595 - DNA, 604 bp, Homo sapiens
ggaaaaattgagaatcaatctgaatttttcaagctggctataaaagacaataatacttgagctttcaacatgacaggattaaactatttctttatggcactgatactcagtttgatcaaaaggcatatctaggtgatatatccagtatttcaagagcctaaaatcatcattttagggctgtaataacatggcatttaaaagtgaagataggccggaagtggtggctcatgcctgtaatcccagcactttgcagagccgaggaaggtagatcacctgagrtcaggagtttgagaccagcctgggtaacatggcgaaaccccgtctctactaaaaatacaaaaattagctgggagtagtggtgggcacctgtaatcccagctacttgggagggtgaggcgggcgaatcgcttgagcctgggaggcgcagattgcatttagccgagatcacaccactgcactccagcctgggtgacagagaaagactctatctcaaaaaaacaaaaataaataaataaaagataatcttgatagattttttaaaggatgatgtggtacaaacattttgtcattttttttttactctttcccagcccatgattattct

SEQ ID NO: 684596 - DNA, 645 bp, Homo sapiens
tatatatttgctatagagccgtctgcatccaagacgcagtcaattccagagtaccaggggagtaaggcccrggctcccaggaacctgagaattgggagcataggaaaaataatccttcactaccttgctttctgttggggcaaggagagtggcagacagaggcaaaggaaaagactctattgtctttacttcgctccctaactgcattattaagaacacattttggtttaaaaaaagtgtaaaaatggctagaaatggtaaaaaaaaaaaaaaggctagaaatctgcatcttacttagatagatgggatgggtcggtttattatcttagatctggctgataaacacagctaggcacagattttaggcaggtaagcaagtgactttaagtctgtctcctggccgggcatggtggctcatgcctgtaatcccagtactttgggaggctgaggcgggcggatcacaaggtcaggagatcgagaccatcctggctaacatggtgaaaccccatctctactaaaaatacaaaaaaattagctgagcgtggtggtgggtgcctgtagtcccagctactctggaggctgaggcaggagaatggcgtgaacccaggaggtggagcttgcagtgagccaagatcatgccactgc

SEQ ID NO: 684597 - DNA, 645 bp, Homo sapiens
tatatatttgctatagagccgtctgcatccaagacgcagtcaattccagagtaccaggggagtaaggcccgggctcccaggaacctgagaattgggagcataggaaaaataatccttcactaccttgctttctgttggggcaaggagagtggcagacagaggcaaaggaaaagactctattgtctttacttygctccctaactgcattattaagaacacattttggtttaaaaaaagtgtaaaaatggctagaaatggtaaaaaaaaaaaaaaggctagaaatctgcatcttacttagatagatgggatgggtcggtttattatcttagatctggctgataaacacagctaggcacagattttaggcaggtaagcaagtgactttaagtctgtctcctggccgggcatggtggctcatgcctgtaatcccagtactttgggaggctgaggcgggcggatcacaaggtcaggagatcgagaccatcctggctaacatggtgaaaccccatctctactaaaaatacaaaaaaattagctgagcgtggtggtgggtgcctgtagtcccagctactctggaggctgaggcaggagaatggcgtgaacccaggaggtggagcttgcagtgagccaagatcatgccactgc

SEQ ID NO: 684598 - DNA, 637 bp, Homo sapiens
taaagcaatgagatttagagccttgaataaaagagtctattttcttttttccgtatttctgttgctaaacacggctgttgccaacaccatctcacttcattttccagagataagggcatttgtcatgcgtttctcagcccaccacttaacagttcaggagtggaagcttaaagtgtttccccctccccctcaggacacgtgcatttagaagaaaggacaagaatccatttccttatgtagcagaacctctgatagttctatcccagttcccagccacttcagagtgaagacagtcacccaacacctgctactaaaagcccttatcagccatgtttttgcggttaatctccttctgataaagtggttcatttttcagagctgtgaatattggtgacatgtaggagggaccaaaattttcagccctcattcaaccctcccttgttttttatcagttgattttcccatgttagaaaaggacagttgctggtacaatctcataaaatgggctccagtgtttagagaaggacagtcagaggagtggccacctgtttgttgaaaattgggcttctgggaaagttgctgcacaagtgtgtggcaaggtgtgtctgagrtagcttgacctgctttcacctggaat

SEQ ID NO: 684599 - DNA, 887 bp, Homo sapiens
ctgggtccgtaaccatcttcatctcttcttccttcttccttctctcctgtctttattctttcctttctcttttctctccctgtttttcagggtcacagttcactgtcaagccaaggagaagagtgtatttagagcaacactaatgattctggccactaactgggaatttgatcttctgggctcttctcccagctmtcccatggtgtgatcttaaactagattgagctcctgtttatccaactgtaaaatacaggtaatacagtcctacctcacaaggactgagaaagaatactgttatgtacagtgctttatgacctacagatggaaggtataatcagtgacaacttcattattttgaaagtgttttcagattcatcttgtcctcccctttctcttgacatcagtgctgtcctagaggtgatggtgtaagaatatgccatccttgaacatgcatggaatttcaaaaagcttataattcttatgtaaaatggtgaaaggtacagtttttctccaatacaaggaaagcgtatatttcgatacaattttgttgtctgaatttaagaaatttgaaagtcttaattacttttgagtatgtgaaaattaatttttagaaattctccatagccacagaaaacacaaatcccacactctaatcccaaccaagttattaatttctcagcaattctagactgtgtcatttaatttctcaaaatcaaaatcatatcttgagcaagttaatgtacctattgattttaggtagacttgagcttttttcttgatttaaataataaactagaaaaaaaatgagtcaagaaaaaaatctgggtacagaaaccacatatgatacttttctagaaggcgaatgaatggatggtggctttgccaat

SEQ ID NO: 684600 - DNA, 887 bp, Homo sapiens
ctgggtccgtaaccatcttcatctcttcttccttcttccttctctcctgtctttattctttcctttctcttttctctccctgtttttcagggtcacagttcactgtcaagccaaggagaagagtgtatttagagcaacactaatgattctggccactaactgggaatttgatcttctgggctcttctcccagctctcccatggtgtgatcttaaactagattgagctmctgtttatccaactgtaaaatacaggtaatacagtcctacctcacaaggactgagaaagaatactgttatgtacagtgctttatgacctacagatggaaggtataatcagtgacaacttcattattttgaaagtgttttcagattcatcttgtcctcccctttctcttgacatcagtgctgtcctagaggtgatggtgtaagaatatgccatccttgaacatgcatggaatttcaaaaagcttataattcttatgtaaaatggtgaaaggtacagtttttctccaatacaaggaaagcgtatatttcgatacaattttgttgtctgaatttaagaaatttgaaagtcttaattacttttgagtatgtgaaaattaatttttagaaattctccatagccacagaaaacacaaatcccacactctaatcccaaccaagttattaatttctcagcaattctagactgtgtcatttaatttctcaaaatcaaaatcatatcttgagcaagttaatgtacctattgattttaggtagacttgagcttttttcttgatttaaataataaactagaaaaaaaatgagtcaagaaaaaaatctgggtacagaaaccacatatgatacttttctagaaggcgaatgaatggatggtggctttgccaat

SEQ ID NO: 684601 - DNA, 1042 bp, Homo sapiens
ttcaagcctttggcttggactgagatttacaccatcagcttctctgttctgagcttttcaaacttggactgagtcatgctgccagcatcccaggatctcaagcttgcagtcagcctgttgtgaaacttctcagactccataatcacatgagccaatcttcctaataaatcccctttcatatctttacagatgtctatctgtctctacgttctattggtttctgtctctctggagaaccctgaataattcagaggccaaaccaatttgctggagtgctgagggctggggagatgcctaagcctcaggagctcagaggacaaggagagcctttgtctcattggtctacacgtctaagtgccttccagccttgcagggaatcccctcgaggaggggccagctcatttacataacaaaaactggcagaatttaatatgacatctccacagatgtagtcttcctttaaattaaaggcaccaataaatgtttgtagtcaagaagctcactgcatttcaaagtgaagcagtttggtcattacattcaatttaaacatcttgaaattgagatttctaggtgatgtgtattttttcatattttgtatttttcacaacttactgagcccatttgctttcactttctcaagtgtttaaaagtgcataaaaatcacaaatttgccagtgtcctatgccaggctcctttacatctgctataatcattcttttgggctaaaaattcttctctgctcatgtacttctaacctacaatcactgtgaagaccaatatacaatttaaaagccttgaggttctaaattagaatatgcagtttattgtgtggctccagctcagtgcamacttttccacaattttgcccagaaaacagatgcccattagtagcctcatcaagaagccccgccattactgtgactcttggtgttggaacaaaatgcatccaaagtttcctctgacttctagaaggagagtttaaagtagctgcctctgaaactgttttaaaattgtggcttgtgtaagcatttggtgaacaaag

SEQ ID NO: 684602 - DNA, 652 bp, Homo sapiens
atggctgttcagtttccctttttaccaattcacccctcctttgctgaagtttgtcagggtttgtttcagctatttttcaaccaaataatcctaaatggtataataccacttcttatctggatggattatctgcaaatttaatgctttccaatatcattatctcccagactacaagctcctggaaggcaaggactaggtttctcattatttagcctagcaccggcaaatggcctggtttactgtgggtgatctaggagtgttatggaatgaatggatgacgatatatcatcgtcatgaaaactgcttagcagaaatagtgataaaagaggcagaggagcttcccttgctcagcatttgatggactaagaggcagcagagttayagaaacatttctgtagccagagtttaaatcctgaggaacctgttcacctctcacttctctccactgctctcaatcccttccagtcactgtgcatttaatctcatttacataataataaaatactcctcagtgatggaacaagtagcctagcttgcgtccttgtctactacactcggcttcgattaatttcctgtcagcagaggaactttaatttcatcttcaacaaggttttcttagtgccaagagccatatgtgctttccagcgttgca

SEQ ID NO: 684603 - DNA, 652 bp, Homo sapiens
atggctgttcagtttccctttttaccaattcacccctcctttgctgaagtttgtcagggtttgtttcagctatttttcaaccaaataatcctaaatggtataataccacttcttatctggatggattatctgcaaatttaatgctttccaatatcattatctcccagactacaagctcctggaaggcaaggactaggtttctcattatttagcctagcaccggcaaatggcctggtttactgtgggtgatctaggagtgttatggaatgaatggatgacgatatatcatcgtcatgaaaactgcttagcagaaatagtgataaaagaggcagaggagcttcccttgctcagcatttgatggactaagaggcagcagagttatagaaacatttctgtagccagagtttaaatcctgaggaacctgttcacctctcacttctctccactgctctcaatcccttccagtcactgtgcatttaatctcatttacataataataaaatactcctcagtgatggaacaagtagcctagcttgcgtccttgtctactacmctcggcttcgattaatttcctgtcagcagaggaactttaatttcatcttcaacaaggttttcttagtgccaagagccatatgtgctttccagcgttgca

SEQ ID NO: 684604 - DNA, 581 bp, Homo sapiens
caatccgcctgcctcggcttcccaaagtgctgggattacaagtgtgagccacagcacccggcctcctctgtttccttttaagaagatgaggctaaaagcactgtcaactcactgggttgttctgaggatcagaggaacccaggatatttcagggcttagtcaagagttttccatgttctggggctcccaaacttaccctagaaaagaaagctgtaataaaacatactgtgaaaccccgtctctactaaaaatacaaaaaattagccgggcgtggtggtgggtgcctgtagtcccagctacttgggaggctgaggcgagagaatggcgtgaacccaggaggcggagcttgcagtgagcccagatcgcgccactgcactccggcctgggcgactgagtgagactccaactcaaaaaaaaaaaaaaaaagraagaaagaaaacataccaacaaaagcaaacacatgcacctgtgaccaaaatagaacatcaaagactctctcacatcacaaatgtgagccatactttagacagaacccacgttacaaacaaggtcccttacagttctagtgcatgctcagaaca

SEQ ID NO: 684605 - DNA, 581 bp, Homo sapiens
caatccgcctgcctcggcttcccaaagtgctgggattacaagtgtgagccacagcacccggcctcctctgtttccttttaagaagatgaggctaaaagcactgtcaactcactgggttgttctgaggatcagaggaacccaggatatttcagggcttagtcaagagttttccatgttctggggctcccaaacttaccctagaaaagaaagctgtaataaaacatactgtgaaaccccgtctctactaaaaatacaaaaaattagccgggcgtggtggtgggtgcctgtagtcccagctacttgggaggctgaggcgagagaatggcgtgaacccaggaggcggagcttgcagtgagcccagatcgcgccactgcactccggcctgggcgactgagtgagactccaactcaaaaaaaaaaaaaaaaagaaagaaagaaaacataccaacaaaagcaaacacatgcacctgtgaccaaaatagaamatcaaagactctctcacatcacaaatgtgagccatactttagacagaacccacgttacaaacaaggtcccttacagttctagtgcatgctcagaaca

SEQ ID NO: 684606 - DNA, 1143 bp, Homo sapiens
tctctcccatggatgtgatccccctctctcccacactacttcgctctcactttcatcttccctcagactcctgagacctgtcacctttcctctcccttctctaataactcctgcccccggtcctagttcagggaagaactgttaagtcaagaaatctgccaaggtggctgaggggacaactggggcagatgcgtagatgctgggcatgaggacaccaggtggccaggctgggtttcccaggcctctgaggcaggagggggtggacctgaactaaaagatggggccaacgaagccgggracagaagccaagtcctgctgctcgacagccggagcgcacacacaagccacccggaaatgctctgtggcctggatgggctctgagagttgccagttggacatactgacctagacaagcaattagctgtgttcaaggtctgctgcacagatcatatactcttgtaaactaggctaaatccactgttaagagtactgaattttcttcccctaaattctccagatttacagtcacaataagaattggaaaacaaatcagacaagggaactgaacatttgacacataccgaacatgagacttaatgttcttttatgtacttttggaaacaaaccaggtattcagtgaacactgggagatctagtaggtatgtttaatgagaatttgtaccgggaaggaatttgagatcaaggtcaggaatgattaatatgcatgcaggaagtcatcaacatttaagcataagcagtatgaatctcattaaatcttcaatagcttcctattgcctgaaggaactggtggcattctaatgattaaagcagtaacattaaggtagaaaacaacattagaaaattaatctgaccctcatgaaacaagctaccccaaaatactaagccacaaaaactggctttgcaagactgtcttccgcagctgtgatttttctttaaagtgcagcatctccttccgttaagttagaaggctttggtaaaagtgaccagtgacagaggtgttcaagggctctctttttaaaatctaggtaattgatactctcccccacgcttcaccccatggtgaagccatcacgttgctatctagctgtttgtcccgtctcccactcactagccccagaacag

SEQ ID NO: 684607 - DNA, 646 bp, Homo sapiens
agggatatcactattatgttactgtcccctacccatcttagaagagtggtatacaagcaccccactttcagtgatattacgcaaaacagtgtgcaaaatgccattaagaagcactaactggtctgggcacggtggctcacaccagtaatcccagcactttgggatgctgaggcgggggggatcactggaagtcaggagttcaagacctgcctgccaacatggtgaaaccacgtttctactaaaactacmaaaaaaaaaaaaaaaaaataggcaggtgtggtggtgggtgcctgtaatcccagctactcaagaggctgaggcaggagaatagattgaacccaggaggtggagactgcagtgagctgagattgcgccactgcacttcagcctgggcaacagagcaagactccgtctcaaaaaattaaaaagaagcactatctgtaaaactagatcttatctactaagatattacacagattttttaaagtagtaaaaagtagagaataaaacaatgtctctttagagatagaactccaaagagaaaatattcttatttttataataaagtaaaacctatttaaaatatgaaaggctgaaattttggcattaatctatgtataataagatacaattattaatatgtgaa

SEQ ID NO: 684608 - DNA, 523 bp, Homo sapiens
caggtgtgattcctgggtaaagcgacagggtgaaagatcccttgcatcaaacctcactccctcctgacacctgccaaaatgaaagtaaaggggtttcttagaggcatgacccacaaaaacatagagacctgacagggaaacaacagcagrttcacagtgacatacacaggaaacagacaagcaagtgggaagtaacccagcagatttgaggaagcaggacccaaagcccacagcggggaaggtgacaccaccccgatctccatcccggaatcccctacagactctgcgactgaggaagcaggaaccaaagcccacagcggggaaggcaacacaatcctgatctacatcccagaatcccctacagactctgtgactgaggaagcaggaccctaagcccacagcagggaaggtgacaccaccccgatctccatcccggaatcccctacagactccgcaactgaggaagcaggacctgaagcccacagcggggaaggcaacaccatcctgatctccatcccggaat

SEQ ID NO: 684609 - DNA, 2365 bp, Homo sapiens
tattgaataagcttagtatttaatagctgtaatatttaataagctatttaatatgctggcacctaataagttagtgagcaacttctttcacttcatttgtgtcttaactgaggatggctcattgactcaaaggaatataatttttagtagtgatatctgtggtgtttgctctgggttcttaggggtgacactatgaaacagaagacttttccatctcttctgtttctcccactcagatactaactcaggccgaaccctccttagcttccaagatcagatgagatcgggtgcattcagggtggtgtggatacagacacttccctttctcatccacaacaccagagtctggccagaagtaaagggagaagatggaaactgtagcagcaacctggaatacaagtttgagccctggctaggggagttagaagaattgggaagtgggaccaagtgtccataatcttaggaatctatggcccctttcaacctggcccaactaccattgcatcctggtgacctgcctacaaccatgcacgcatgcgtgcctcccacagctgcttcctgctcctcaccacgcgagctcctttgcacaccctgtcttcagcctcagtcttcccttccccaccctctgcctggtgggcacccactcataccttaaggctcagtgtggtggtccgccctctgaagagctgagtcagcagctctcccataagaaggctgtgcccctctccccacttccaagctaccccacgtaaacctctgttaccgcattcatcacatgttactataattacatgtttaaattgtttgccttccaactagacagggcacgtcttcagcctgacgcagtgctgtactcattctgtttacttcagttggaggcgaaagtgcatcagctcagccaattcctactgatgagatcaggccgagttaaaacctctttttatgacaaggtcctcatcagtgaaaccagggtaagagaaacaccaaaggcagaaaagtgccaatgacgcttcacaatgttgttgtggggataaaatgaaacaatgtaggtcaaggacctgatacgtttttataagtctatagtaagcgctcaataaatagttccctttccccttggatgaatgagtactgaacgtgcacaaggaaagggaagtctagaataaaaatacacaggtgagggaactgtgcttaggaagtttataagccaaaaaggagatgaagaaagagggtctgtctgagtctagttgatgggctgtccaggaataacactccccattcataccatcggtaccacagctacttaattgctggaatgcggctgtctcatacatagcagctctccttggcagaaagtcagtttcatccctgggtgcagcaggagcagagctaacctgagaaatccaatattacacggaggaaagcccacaccacgagaggcagcggtgtgtatctggttttaataagatgcctgcttctaagaacctcaacttccaaaggcaagacatttgctacctgcaagatgtgagctataattcgaaaatctcctaattatggtcagtgtctgcttttgtagcacaggtgtttccagagcgtgggcatctagtcctcatggcaatcctgaagaggaagatagggatgtttcccagagggaaactcaggtgcagagaggtaggaaactgcccacacaggcatctttgattgagctatctatcatcctactcactttcccctcagtccacaaaaagtgggaggcagcttaccgaaatcccttgaattctaaaaaataaatgaacccttgaggcagctgatatgaggggaatgggcaggtgaatggtacagaaatatcagagggagatgagcaggaggcccccagaggtgagcagccatcacactgggctctgagctgcttgatcagtgcaaaaacagaaacaagttattagttccaaacccaaatatatctgtctgtccctgccagcaggatcttgattgcaccatsccactcaacagcctcgcttgggtaagggaaacaccaaaagcagaaaaatccatgctgaaggaccccaggaccagcaccagttcctgagcatctttcccgggctgtaagtgttgtttacatgtctgtctctttgccaggggagatagaggaagcaccttgaggagaaaagctctcttttaaccctgcacagggctggtgcaggcactgaagttgactcattcctgatgtggcttttgacaagcaaacaaagattagaaatgtgaattacctgtagttggccaattattataaccttatatgttataacagataagtctatgactacaaaaatgtctgtgagcacagagaacctgataaaggcagaaccta

SEQ ID NO: 684610 - DNA, 567 bp, Homo sapiens
tacaaacaattctaacaaacatggctgtttgatttccaactccatagcagactcaggaaggaagctgaatgaagagataaaagtgtgtccattggcagaggactaaaggagatttgagcacctgtcagatgggtactgtaccagaagaaaggagcactttgaaagcgtagcttatggggtaggaaagtattttatttaggaaaaaaaacccttcatttattycaaatgataaaatgtaaaatgggtttccataaagtgccagatacatgagatgttgttgattttataaatgatgatcatgtatttacagccttttacagttttttatatccattgacttatttgtgtctttgtctttaaaatctgccattgcaaatagctgttttaataaaccaattttgccttggcccctgaaggcagttttggagatatttttgggtgatgggagggtgacaccatgatcctactcatgacatttagactatagtgtgctggctgtgttggtgcagatagatctatctccacattgattaagcctgagagcccctctggtgacttctcagtggg

SEQ ID NO: 684611 - DNA, 567 bp, Homo sapiens
tacaaacaattctaacaaacatggctgtttgatttccaactccatagcagactcaggaaggaagctgaatgaagagataaaagtgtgtccattggcagaggactaaaggagatttgagcacctgtcagatgggtactgtaccagaagaaaggagcactttgaaagcgtagcttatggggtaggaaagtattttatttaggaaaaaaaacccttcatttattccaaatgataaaatgtaaaatgggtttccataaagtgccagatacatgagatrttgttgattttataaatgatgatcatgtatttacagccttttacagttttttatatccattgacttatttgtgtctttgtctttaaaatctgccattgcaaatagctgttttaataaaccaattttgccttggcccctgaaggcagttttggagatatttttgggtgatgggagggtgacaccatgatcctactcatgacatttagactatagtgtgctggctgtgttggtgcagatagatctatctccacattgattaagcctgagagcccctctggtgacttctcagtggg

SEQ ID NO: 684612 - DNA, 567 bp, Homo sapiens
tacaaacaattctaacaaacatggctgtttgatttccaactccatagcagactcaggaaggaagctgaatgaagagataaaagtgtgtccattggcagaggactaaaggagatttgagcacctgtcagatgggtactgtaccagaagaaaggagcactttgaaagcgtagcttatggggtaggaaagtattttatttaggaaaaaaaacccttcatttattccaaatgataaaatgtaaaatgggtttccataaagtgccagatacatgagatgttgttgattttataaatgatgatcatgtatttacagccttttacagwtttttatatccattgacttatttgtgtctttgtctttaaaatctgccattgcaaatagctgttttaataaaccaattttgccttggcccctgaaggcagttttggagatatttttgggtgatgggagggtgacaccatgatcctactcatgacatttagactatagtgtgctggctgtgttggtgcagatagatctatctccacattgattaagcctgagagcccctctggtgacttctcagtggg

SEQ ID NO: 684613 - DNA, 994 bp, Homo sapiens
accacaagtgagctacaacttcatacctgctaggatggctataattaaaaagcaataacaacaacacataagaaaacaagtgttggcaaggatgtggagaaataagaacccttctacattgctggtagaaaggtaaaaagtatagtcactgtgatttgttggttcttcaagattgtaaacacagcaccagcatgttacgcagccattttacaactagagaaataaaaacatatgtccctacaaaaacttgtacatgaaggtttatagctgcattattcataacagcccagaaatgggaccactcaaatgttcatcaacagatgaatggataaacaaaatataatatacatatagtggaatattattaagccataaaaaaggaatgaagtactgctatatttcactctgaagggaaaagtacagcaccaatacaactctggggaaaaagaggaaagatgatatttcaaattttggtgacccatgatgcagggcacagatgcagtttggttcccagatctaagtgagcacaaaggcaacttgggtcctggagaatgaggcaccatgcagtggtgactctggactctggaatggtgggacattgtagtagcctaggcyctatgcagctggatgttgcagcaacgacccaggaatggtggggcccaagttgttgaggctccaggaggcagggcaacggtttagaagcagtacagctattattataattactccactggctagagtggggaacctcagcagttcagcctctaggggagctattccagggatatagggtgctgtggctgttcagcctggagtttgtgttggcgcagcttagccaaagctttgttttcctgagacttgaagcacttcatttcagctgagccccaggagagacagctgtactgctgggccaagattctctttccctgggaagtgggaagctcaggcttctctactgtttttctaacctttacttcatctatctctgctctga

SEQ ID NO: 684614 - DNA, 633 bp, Homo sapiens
attgagtgttaattccatgccagttatttttcccagttcagaagacactcatctggctctcaggctgtgcacaaacatgtgaaagagtcatacattttaacatgcaagcatcctgggaatcattgcattgcaactataaggacacacataaaaaagagagtgtgcaagacaacaattcacctgagccatgggtggaagggaaagatttcccagatggcctgagctctcattgagtcctaaaggacaagttggggctatttgggtagagaaggtaaagtacaggctaggaaactttccagaccagaaagagtacattgtgcagtgaactagagcttattatagttggggaatagatygtagagatgatgaggtgtagtagagatgaagacagaaaggtgaatagaagtagagcacttccgcaaaccaaaacaaaagagccattcccatttatagaatacaaatggttatagcttaaagactgagacattttctactccacctccctcatcctgtgattttttttcatggtaataaaattctagaaatttgccaaaaatgtatgtatgtgtttctaaaatacatactgaaaaatatttcactgaaaaaatattttgttaaaaattatacatttga

SEQ ID NO: 684615 - DNA, 1102 bp, Homo sapiens
tgaagagagacaggttttttttgcatttagagtgcatcgttttatcaaatttttcaatatttgatattggttctgcttttatgtcttatttttactctataatataaggtgtctgactctgtacaaaagaccataatgtgactcttagagctttgaatcacttttcatcctaagaaatctcaattattccctgagatgctcattttcattattagcaactcacagagttagaagcaattaatgtcaaatttaattggactctagaacttttctcgagtaattattcacaaattacaatgaaagactcttttgaatgaagctcctgactgaggcaaaaagacaaaggtgaggtggtagataatggaactattacacaaatgaagtggtcagagttggaggcagtaaggttatcagaacattcctaaatcagaaaagcaagcaaaatccagagaagtgagataactgtaaagatagagtaagaaagggtctttaaagttgtaagaaayaggaaatgatgctttacaaagttcctagtaaaacgtttgccatagattcagaaaaagagtgtgtttacgtttttctctcatgttaatcatgatgctgctgttagaagtttaagaaacctaagatggaaagtctaagtaaattgtgccacaaagaatagagtttcaggagttgaggaactaaataacaagataggggaaggaattaatatatgaaaccacagtaagaagagtatcattatattaaactaccttgatatttgatgtttcagatgttctgaccctgttaagaatacaaccttagccatatttaagactggcttggtgacccataagtgatgagaaattgactgaaaattaaatgttagtcccaacgtagtgagtgttgttttgacttctaacggtcttgtctcctgaaaacttgaatctgctaatggtttcctttcagagttaagcttagaatattttcaatgtcagccatgagatggattaagaagtaagagtaattcaaaagcaagccagcagtaaggtttaaaattacactgtgatcctagctagttctggtgttcaacatgacaggaaatactttattcgaacca

SEQ ID NO: 684616 - DNA, 1322 bp, Homo sapiens
  misc_feature 1207, 1316: n = A,T,C or G
aaattagctgggcatggtggtaggtgcctgtaactcagctactggggaggctgagacaggagaattgcttgaacctgggaggtggaggttgcagtgagctgagatcgcgccattgcactccagcctgagagaaagagcgagtctccgtacgtcttaaaaaaaaaaaagaaaaagaaaagagaggaaaaaaatagataacatttgaagcagctccactctgctggaaataaaaacaaaaagatctgatgcttataaacaaatcattattgtataatctgcaagacaaattaagatagagaatattttgttgtgtaacgtacactcttcagactgcatagacggtagcatcttcaccactcacagatgtacttaaaggtagttttagacagatgccacttatttaaagatgctgggaacagaaacaagattatttcctctgtaacttaccgcccaagcaaaacacagaaatcttatatgcctataaacatttcagttggcacattaatcctacattcatcaggaattaaaatttatttaccagattttagaaaaatctgtacttataaattcacaccatacatgcaggttttcctattttgatttaattgtaaaagaaacaataaaagaagcctcttttctttttcattactccaaatcaaaatgagcaacactaaatatctagagacaccgtaatttagtccaatgtgaatattttattacccttgctttaaaaatagacacattggaatgaatgaaaagttggaattaaaactgcatactaattgcattcagaaatctagaaaacacctcataaccatcacctggaagacttgctaaaagtaaagatgctcctcctcatcaagaataaattagcatctttggaaataacattgcatatatacacatgaaacaaattcctttggtgacagttatatacattaaaaatcaataagcactgcttcaattttttttaaccaaagttaatttttttttgtaattcaatatatattatgaggaaaaagttgtttctcatgagrgacagaatacagagagaggaactgataatgagatgtataacacatttttccattctttatattatttaatacttccaacaatcttagtagtaggtaatgcatatttaactatcttacagataagtctattgatgagtagaaactgtggtcagtatgctagatgactgttnggacagatctgtgttttgtctcatgttatagtgatacgactgtgggtaggtacattgctgtctagatagaccacgaccatgatcctgttatatggtggcgatatactanttgcta

SEQ ID NO: 684617 - DNA, 2339 bp, Homo sapiens
ccatccaatcacgaccctcacacagaacacggctcccaagcctgcctcccacccacaaaaaaaaaaacaaccctaacgaaatgtgtccctaaggtgctcaggaagggtattctcattcttctgggggtagcccagatgtcagtgtccagaggcctgtctctggcgcttccctttctgcagagataaaatttctgcccccctgcctgggcagtgggaggagtgtcttgattgctaggaattctgtgggaagcagtgagtgaagtaagggtcaatgctgtctctaacgactttcaatcactcccttcttgtccctgggtcacgctgggctgtatctgagtgcggtgcctctccagaattcctgggctgccctctcttctgcatccccatatcatgggtgtctatatgggctcactccagcctggaacatcagtgaccacttctttctcctttcggcccactggaagcccactgtcttttccaccaatggctaccctctcattctcattgttgagaaatgaaggactttttatgcctccactacccgtgttgtgggcctctctcaggaggcagctacctgtgaatgggtagtaagacattttaaccaaaattccacaaagtgatgagcactttcaggttctgtaatgaatacactgttttggtcactgatgctattattactgtgtttggcttcatcacacagattttaagttcccaggccaggattgtttataagccttcatatctatatgccaggaatagagtagctgaacaagaaatgagtgggctcatgtttgagtctcagaaagaatgttttctgtgccccaatgtatgtgcaactatacctttgttcattgtcgagcctgtgacatcatactccactgtctccctaaaagcctatgtcttcctccatgtttcctcgtctcctgaagctctcctcctttgatgctggagttcctcagggattgtgccttgatctctcttcccttctcaccctgcatgtggactcctgtggcttcaagaagcctctctgtgctgagaattccatgcttatatcccttagactacatgtatgtctgatacctgtctgtatgcttctatttgaacattcaacccacccgtcaagttcccacattccctgccatccgtttttattcctgtgttctccttcatcagtgaacatcatcaccttttacacaaatcagaaacctgggttctgtactccacctctccctattccttgcctaccactccatccccacttcccaatccaatccatccaagtccatccttggccacctgcttccctagacactcatcaccattatcctggttcaggccactgtcaccttgcacctgcattatttcatcattctcctaactgaactcctacccacagcattaccctactgatatgtcaacccaatatgtcactctctggtatgttgtaaagactttcatggtctgatcttggtttacttctccagcttcacattttggcaatacccatctcacaggcactatcagttatgcttatatcctccaatatgggtgcctttcaattagctctagatcttacaaatattcttccctctgcctgaaagattattccatccccacgccctcagccaacttttctcactcattcttccttcagatatcagcacagaaatgacctcagaagtctctcctgaccctctccaccaatgctgggttaggcctccaacggacacccaccaccccttgcttccccactgtgggtttcccatactgagtgtaattgcctgtgtccttgtctgtcaccccactcacctgtgagctcagtgtgggctatggccatgcctgcctgttcttcatttcagctttgtcccagggtctatgatatggtgcacaatccacacacatttgttacatgaatacatggaagaataaccaatattttattgcctttcattttaattttggtttcctaataactttttgtttctatctaaagaatttataatrtaaagttttcaaaagacaaatattttgcaattatgtatgtgaaaatgttgggccgggtgtagtggctcttgcctataactctagcactttggtaggctgaggtgggcagatcacttaagcccaggtgttcaaaactaaactgagcaacatggcaaaacttggtctctgcaaaatatataaaaagtagctgagtgtgttgttatgagcatatagtcccagctacttgggaggctgaggtgggaggatcacccgtgcatgggggagttgaggctgcagtgaggcaagatggtgccactgcactccagcctgggtgatagagtgagactctgtctcaa

SEQ ID NO: 684618 - DNA, 2339 bp, Homo sapiens
ccatccaatcacgaccctcacacagaacacggctcccaagcctgcctcccacccacaaaaaaaaaaacaaccctaacgaaatgtgtccctaaggtgctcaggaagggtattctcattcttctgggggtagcccagatgtcagtgtccagaggcctgtctctggcgcttccctttctgcagagataaaatttctgcccccctgcctgggcagtgggaggagtgtcttgattgctaggaattctgtgggaagcagtgagtgaagtaagggtcaatgctgtctctaacgactttcaatcactcccttcttgtccctgggtcacgctgggctgtatctgagtgcggtgcctctccagaattcctgggctgccctctcttctgcatccccatatcatgggtgtctatatgggctcactccagcctggaacatcagtgaccacttctttctcctttcggcccactggaagcccactgtcttttccaccaatggctaccctctcattctcattgttgagaaatgaaggactttttatgcctccactacccgtgttgtgggcctctctcaggaggcagctacctgtgaatgggtagtaagacattttaaccaaaattccacaaagtgatgagcactttcaggttctgtaatgaatacactgttttggtcactgatgctattattactgtgtttggcttcatcacacagattttaagttcccaggccaggattgtttataagccttcatatctatatgccaggaatagagtagctgaacaagaaatgagtgggctcatgtttgagtctcagaaagaatgttttctgtgccccaatgtatgtgcaactatacctttgttcattgtcgagcctgtgacatcatactccactgtctccctaaaagcctatgtcttcctccatgtttcctcgtctcctgaagctctcctcctttgatgctggagttcctcagggattgtgccttgatctctcttcccttctcaccctgcatgtggactcctgtggcttcaagaagcctctctgtgctgagaattccatgcttatatcccttagactacatgtatgtctgatacctgtctgtatgcttctatttgaacattcaacccacccgtcaagttcccacattccctgccatccgtttttattcctgtgttctccttcatcagtgaacatcatcaccttttacacaaatcagaaacctgggttctgtactccacctctccctattccttgcctaccactccatccccacttcccaatccaatccatccaagtccatccttggccacctgcttccctagacactcatcaccattatcctggttcaggccactgtcaccttgcacctgcattatttcatcattctcctaactgaactcctacccacagcattaccctactgatatgtcaacccaatatgtcactctctggtatgttgtaaagactttcatggtctgatcttggtttacttctccagcttcacattttggcaatacccatctcacaggcactatcagttatgcttatatcctccaatatgggtgcctttcaattagctctagatcttacaaatattcttccctctgcctgaaagattattccatccccacgccctcagccaacttttctcactcattcttccttcagatatcagcacagaaatgacctcagaagtctctcctgaccctctccaccaatgctgggttaggcctccaacggacacccaccaccccttgcttccccactgtgggtttcccatactgagtgtaattgcctgtgtccttgtctgtcaccccactcacctgtgagctcagtgtgggctatggccatgcctgcctgttcttcatttcagctttgtcccagggtctatgatatggtgcacaatccacacacatttgttacatgaatacatggaagaataaccaatattttattgcctttcattttaattttggtttcctaataactttttgtttctatctaaagaatttataatgtaaagttttcaaaagacaaatattttgcaattatgtatgtgaaaatgttgggccgggtgtagtggctcttgcctataactctagcactttggtaggctgaggtgggcagatcacttaagcccaggtgttcaaaactaaactgagcaacatggcaaaacttggtctctgcaaaatatataaaaagtagctgagtgtgttgttatgagcrtatagtcccagctacttgggaggctgaggtgggaggatcacccgtgcatgggggagttgaggctgcagtgaggcaagatggtgccactgcactccagcctgggtgatagagtgagactctgtctcaa

SEQ ID NO: 684619 - DNA, 693 bp, Homo sapiens
ttgttttagtacaaagacaaagccacactgtaaaagcatgtattcggcaaatcattggtcagcacagacatcggtatacccaggactccctgcgatacagcaggaggggagagccattctctgtgggtgatttgcctattttctctttaagggataagagagaagttctggcttaagggcccccaatttaaatgtatgtcaccatcawctcactgttaaatcagctgtcagcaaccactctcagactatgtgaagtcacattctttgacaaagcttacatagaaatggtgaccttgtgactctagggagccaacgacatagagaggcgcccacagtggggcctatgagcagctgctgatgaccagattctacctgtggctgagattcaaggaggtcagtgagattggctctgtctccagtgatgggactgtccatgtggtggaggaaggcttaactggcaagttcactgggggtgggagtgacaccgatacaacctctgccggccttgctctttcccccagcaactaggagccactcattttcctctgcaaagaaggaactgagcaggtggctcatttgcctaactcggagtcctctgaattctccagatgcaggccgtctgccattcttctgcacaggggacggccacagggtctggaagcaaattacctttaatgagcctagaaggatccc

SEQ ID NO: 684620 - DNA, 630 bp, Homo sapiens
tggttcctctytttaaaatataaaattgattaggtgtttttaaaacagaaaagaataaagaagacaaaaattggccaaaattttactatttagataactcctaacttttaaaaagtaaaattaaattaattcagatgtggattttaaaatgccacagttaggactgaaaggtaaagatctcccctccccaatgcctgtgaacaaatcagccattctcaacaggtccatgtaattaatttcagaaaaacattgaaaatttacttactcatctgtttttcccgcttaaaaagttctgtaaacacttctgcactttgctttccacattgaaatgtatttattcttccctttttaaatggtgaatagtattccattttctggatgtttatttaactattcccgtatgataaacattttgtttccagtgcatctttgcaattaaacaggattgtcgtgatcacctttgtacatataccttgacaacttttgagactatatctgcattactctcttcatgagtttcgtcagcttaggcacacattggcagacatgagaccgatggttccctcacaccatcaacagcactgggcatcatcagactttttagattttgccatttggataggtgaaaaa

SEQ ID NO: 684621 - DNA, 1074 bp, Homo sapiens
agaggcaggggtcaggcatagagagggctgctctaagcatgcctgtgcggagtcagtccatgtgctgacgcccaccagcagtgccccaaacgttccttcctcattgctggccattagccagaacatggcagggaactcgcaactccacatctcctggcttcagcagctctagcaaaacaaaaccaactttctgctttcaacatttggtgttgaaacacaaacagaaacatctcaaaaaacaccattcaattgggtttcccattattcacacagatttggttgccttcttgctcatgatagcccgagaactagcagtaggccaggcttctatatggagttacttgttgactaaggaaatgagaagatctacagccttcaagaaccctggtaatcccagacataaggtttctacatctgctctccctggttccactttatgwaccatccctcattcccatctctaaaatgcatgagcccttaacttggacacaattgtgaatatcatggtgcccaaaaagacatgtagtctgacttacataataaacccaagaattcaaccaagctttattacttctctcacagcaggtataaatctttaaatttttattgtacttgtctgtctgtgtgttacctcttctactaaatgctttgaaggcagggtcttcggcacggtctgggactctgtaaaacttgctcgggcttgctcattggagggagaggcttaatagacagtttctgatgatgatgtcacaaatctccaatgccactgtcaattgggaagtttaattcagatctgtccttggaggtgagcttaagtggaaaaaattgtaggatctccaaggtatcatccatcccagccaaaacagcatttcctgttcacaactacctaacaaaagtaccagatataaaatcatgaagtcaaggaggtgcagtaaggagtgcaggagcaggctctgtgtcatgcttcctgggcccaaatcccagcactgtctcttactagctttgtgaacttagcaacttacttgatttctttggacctagttttttttgttgttgttttttgtttttttaatc

SEQ ID NO: 684622 - DNA, 809 bp, Homo sapiens
ttaaatattaaacactgcagtcttaaggaattctgaattcccattggggaaggataatacgtaactgtaactgaaattattggggacatcgactcaactatatagaattttgtaaatttaatacttttgctgctttctactgtcaggtgtccaatatttagtttacatgctgtggtacaaagtggtgacacatatgctaatttagtctactgtttgttaggtagcttttgggacactgatctcttgtggcagtacagtatgtacctataccttggaactcagtggcagcaatgcrtacatatcttacagatcaaacaaagagtattatttgtttcttttcacctgaagaaaggtctaaaaaccattctctgtaggagtcggccatttcacttagaaatagcataaagagtactattttattgtactgtttattattcaaataaacctaatgctatgtaatagaggcctgtaagaagtactaatctagtgaataatccccaccaagccacactgtggaggagcatgtaaaagattttgctgttgaagagaaaatctgaaacttctaaaaacataccgcttatttgttaatatgtttatgtttcatattaaaaccagttaggaaagtaagggagaaaaaattgaaaacagctgggaaaaatctagtgaacagtggtagtcttttaaaccatgtaatttcatattaatttaaccacctccagattggtttttcacagatttggttgtgtccataagtaatattcttgccattaatagaatactttaatattttaacatttattttcaaaatg

SEQ ID NO: 684623 - DNA, 643 bp, Homo sapiens
tgtatataaaatatattacatatattacatatatacatacatatataacatatatatatatttaaagcataccatataaacatactawataaaggttgacttttagaatacttatcagtttaaattcattggtttaaaggagctgacccaaaggaacctacatttattcagatattactgttgtagaagtccttcatgttttctgagctgcataatttcataaatttccctaatgacaggaaaaccccagtgagaactacagaattctgcaaagtcaggagtaagcaaaacagaaattaaaaattgtaaggaaaagggcattaaacagactttgttcatttgttttaattagtatagctgaattttaattatcacaattcttcaccagatactagtaaatgtgctgaaatcattttgtaaaattagaaaagctttaacattacaaggccttgtttaattttgtactattcttcatttgcaaaaaagaaaaaatgtgatttaagtgagaaggtagggcatttggggcagataagtaaaatagaagttttgcgtcatttaagtaattcatttaactgtaatgtccatgaaggcagaaatgtgcctatcctgtttgttgttttagatattgtatctagtatagtta

SEQ ID NO: 684624 - DNA, 657 bp, Homo sapiens
aaggatatggtcacattctcttttggggcagggtgcaagagtgagtgtgtgtgtgtgtgtgtgtgtgtgtgtgtgtgtgtgtgtgygcgcgcgcgcgcgccgcgcatgcacgcatgcgcgcatgtgtgtgtacactcacgtgtatttgtgttgggattgggcagaagatatcagagtcagtgcccagggacctgtgaacaataactttctccagccttcaactacctgaaaaactctaagattttgggccaggcgcagtggctcatgcctgtaatcccaacactttgggaggctgaggcgggcagatcacgaggtcaggagatcaagaccatcctggctaacacggtgaaaccccctctctactaaaaatacaaaaaattagccgggcgtggtggcgggcgcctgtagtcccagctactcgggaggctgaggcaggagaatggcgcgaacccgggaggccaagcttgcagtgagctgagatcgcgccactgcactccagcctgggtgacagagcaagactccgtctctaagatttttaactcacagtctaagaaggaaagctgagctgttgagaaaaggtcatccctgagctgcatgtgtaaatagccaccaggaagtagctaggcgaagtatggagtaaggaggagacaagattct

SEQ ID NO: 684625 - DNA, 657 bp, Homo sapiens
aaggatatggtcacattctcttttggggcagggtgcaagagtgagtgtgtgtgtgtgtgtgtgtgtgtgtgtgtgtgtgtgtgtgcgcgygcgcgcgcgccgcgcatgcacgcatgcgcgcatgtgtgtgtacactcacgtgtatttgtgttgggattgggcagaagatatcagagtcagtgcccagggacctgtgaacaataactttctccagccttcaactacctgaaaaactctaagattttgggccaggcgcagtggctcatgcctgtaatcccaacactttgggaggctgaggcgggcagatcacgaggtcaggagatcaagaccatcctggctaacacggtgaaaccccctctctactaaaaatacaaaaaattagccgggcgtggtggcgggcgcctgtagtcccagctactcgggaggctgaggcaggagaatggcgcgaacccgggaggccaagcttgcagtgagctgagatcgcgccactgcactccagcctgggtgacagagcaagactccgtctctaagatttttaactcacagtctaagaaggaaagctgagctgttgagaaaaggtcatccctgagctgcatgtgtaaatagccaccaggaagtagctaggcgaagtatggagtaaggaggagacaagattct

SEQ ID NO: 684626 - DNA, 661 bp, Homo sapiens
tgcaggcagggctaaacttaaattattttggcttattccccttgaagtcactaattagcatttggtttgtttcttttcataacatcattctttaatcaacaaacatttccaagagcttttctgttatcagatctgatttgctggcttgtccaagagtgattccactaaggtgtttgatagagaagggagggggcttcctgcagggcagagaaggcttttctaggagcccaccacagagggtaccttttcacactttgcacaaggactttatgtggatgagctgcagcctgagtaataccatcatgtcactgcagtaaagcctacaccatggyttctcagaggttacaggaaggctttgtagtcggtgcaaagtaaaccctcaatacattttagctagcaattgagagagtactgtatgtgtgaaatgcaaactggtttccttttttggaagagaggaggagaggaagtaattgaagtaattcttgctgtgtttttggcttatcaaaaaaggtggatcactttgtgagagactgaaggagttagaagcaaaagtgatgtttttccctcatctaatgaggactgagacttggggagaaaatgacatgagaggtactgaagaaattgtttttgtaaactgaggtttacaatactaaatgcatat

SEQ ID NO: 684627 - DNA, 823 bp, Homo sapiens
acctatacgagcaattcgataggttagtaatcttgtggcctctggctgaatgattcctgagccataatttctaatcttatgactaatttgttagtttaacaaaaggcaatctggtctccggcaagaagggggtttggttcgggaaagggctgttattatcttttgtttcaagttaaactataaactaagttcctcccaaagttagtttggcctacgcccaggaataacaaggggagcttgcaggttagaagcaagatggagtagttaggtaagctccctttcactgtcyaattgtctcactgttattatttttgcaaaggcggcttcatctgtgtccaaatttcctcttcttaaaaggactccagtcagattggattagggcccaccctaacagcctcattttaacttcatcacctatttaaaagccttgtgtccaaatgcagtcacattctgaggtacaggggttatggggcttcaatatgaatttcgggggacacaattccttttttaacatatttctttattaaaaatagtaattcattaacaataagaaaacaaacactattttttagtgatgactatatgccagtgtggcataagaagaaatatatatttgttctctgcctcagtttctggaacagtagcttctaaaacccttggagtttccagaatggttagggtaagaggagctttttggttattcataataagcctctttcaaccatacctgagtttatgctaatgtagtgactcttggcggatggaggctggttgccagagggaccaacaacatgattggaggattaaaattatcaggctagcg

SEQ ID NO: 684628 - DNA, 823 bp, Homo sapiens
acctatacgagcaattcgataggttagtaatcttgtggcctctggctgaatgattcctgagccataatttctaatcttatgactaatttgttagtttaacaaaaggcaatctggtctccggcaagaagggggtttggttcgggaaagggctgttattatcttttgtttcaagttaaactataaactaagttcctcccaaagttagtttggcctacgcccaggaataacaaggggagcttgcaggttagaagcaagatggagtagttaggtaagctccctttcactgtctaattgtctcactgttattatttttgcaaaggcggcttcatctgtgtccaaatttcctcttyttaaaaggactccagtcagattggattagggcccaccctaacagcctcattttaacttcatcacctatttaaaagccttgtgtccaaatgcagtcacattctgaggtacaggggttatggggcttcaatatgaatttcgggggacacaattccttttttaacatatttctttattaaaaatagtaattcattaacaataagaaaacaaacactattttttagtgatgactatatgccagtgtggcataagaagaaatatatatttgttctctgcctcagtttctggaacagtagcttctaaaacccttggagtttccagaatggttagggtaagaggagctttttggttattcataataagcctctttcaaccatacctgagtttatgctaatgtagtgactcttggcggatggaggctggttgccagagggaccaacaacatgattggaggattaaaattatcaggctagcg

SEQ ID NO: 684629 - DNA, 1534 bp, Homo sapiens
tgagatcccattcttctttcacattttaggtaccggatgttcttattccaatatttacctatttctagttttcctttattctttgaaattcctggaaatgttcagatagatgtattaaaatgaaaatagttaattatacttttcagaatatgcttgattctaaaatgaaaagaaaaccttgtgaaggcatatatctttttatctttagaattaatatagttgtaaacacaatctagaaattgagatccatataggaatttaataatgtaaaaatgctcaaaaattacttcaagatttgtggtcatacggatgtaatcttttactagtttgaaatataataattatttaaacaatattatggttcacatgcagagtattgaaatcagggtacctcagctctgttgttaggctatgcccttatcctttctgaaaattctcaggctttggtacacataaataaaatctgtactctacggaacctttcagtatcaatgagatatcacatatacaggaaaggcaggcatgcatgtccctccatacctgctctgccatgttccccatcagagatggtaccaccgcccattctattgcacaggccagaaacctaatagtcatcccttccacccctatttcctctgctctttgttccacctctattatagactctgagtagttttaccttctaaagagctcgtgatttcaacaacttttcttatcaccataatcaaaggttagcaaagttcctttggcttcatttctggactgttgcagagactccaaagtgggatgtctctatccggttgacccatttctctcttctcttcacattgaaaatatgtcttgctgaaaactcaaacatcaaaactcaaacttctttcctgattaaaatatttcaatggttcctcattacttttcagataaagtcgaatttcctacaagcctctagcctggcctgcttctccgccaagtgttgcactgaactgcgctggctctttgggctggtcttttctccttttttcctatttggcatgctctgcccgaccacaggccttggcacacacttcctcttctacctgaagcttgttgctgccccctttcccaacatataggtgcacatgtgtccacacacatactcctttagaacctcattcattcttcagatttgcagtacaaatcttactccctcaaatatctgtgatttctcatatcaggtaaaatactttctcctagtactctgtacttctcaggagtccttctttcacttcttttaacaaacatttaatgaataattaaatgatgggataagtaggcatgattccaggcactggggagcaatagtcaattagataagatccttgatcttaggggcttctgtcctagtggaacacatgcaaaaaataaaccaaaaagcaactcaacaaacaaataagtgctatgatgaaactataataggatagwgtggtaatgactattgaggggaaggatctcctctagggagagattttgctgatacttgaattatgagtcagttcca

SEQ ID NO: 684630 - DNA, 1156 bp, Homo sapiens
gggaaaagactaattttattccttgctctgaaatctacattgtctgatatgcatatagccactctagctttcttttgagtagtatttgcatagtatttatctttttttctatccttttacttttaatctgcctgtgtcttgatatttaaagtgagtttcttatagacagggtatggttggaacttcctttcttgttcagtgtttcaatatgaattttaagtgttaagatatttacatttaatgtgattattgatgttgggtttaaatctatcatcttggtatttgttttttgtctcggtttttcttcctctttttttctgacttcttttaggctatttttatatgattccatataaatckcctttttgattttgatatagttacatataaatgtcctttttgagtattttcattttcatttatttatttctgagacagggtcttgctctgtcacccaggctggagttcagtggcacgatcttggctcactgcaacctgggttcaagcagttctttctgcctcagcctcctgagtagctgggtttacaggcacatgccaccatgcctggctaatttttgtattttcagtagagacggggtttacccatgttggccaggctgatcttgaacccatgacttcaggtgatccacccactttggcctcccaaagtactgggattacaggcatgagccaccatgcctggccctttttgagtatttttatacgattccatataatctttcctttatttcctttatgacttattaatgataactcattgttttttaattttttgtttgcttcagaatttgcatatgacagctgctatgatcagtgtatttatatatatttaatcctcatctaattaggaggtataagtaaccctattgtacagatgaagaaaaaacatcttgctgaaattacaagttaatgtctcagaaacagaattcaaactcagatttgtctgactccaaaacgtactttgtagtactagggatatactggaaaagcccttcagccttttatatagtcaattgtctgtaaaaaggacacagtccaaacaatgaactgttaacatattttacattattgaatatatacatggagactgtaaagaggtaaaagctctaaaaataatggattcacagaacttgaa

SEQ ID NO: 684631 - DNA, 1156 bp, Homo sapiens
gggaaaagactaattttattccttgctctgaaatctacattgtctgatatgcatatagccactctagctttcttttgagtagtatttgcatagtatttatctttttttctatccttttacttttaatctgcctgtgtcttgatatttaaagtgagtttcttatagacagggtatggttggaacttcctttcttgttcagtgtttcaatatgaattttaagtgttaagatatttacatttaatgtgattattgatgttgggtttaaatctatcatcttggtatttgttttttgtctcggtttttcttcctctttttttctgacttcttttaggctatttttatatgattccatataaatcgcctttttgattttgatatagttacatataaatgtcctttttgagtattttcattttcatttatttatttctgagacagggtcttgctctgtcacccaggctggagttcagtggcacgatcttggctcactgcaacctgggttcaagcagttctttctgcctcagcctcctgagtagctgggtttacaggcacatgccaccatgcctggctaatttttgtattttcagtagagacggggtttacccatgttggccaggctgatcttgaacccatgacttcaggtgatccacccactttggcctcccaaagtactgggattacaggcatgagccaccatgcctggccctttttgagtatttttatacgattccatataatctttcctttatttcctttatgacttattaatgataactcattgttttttaattttttgtttgctkcagaatttgcatatgacagctgctatgatcagtgtatttatatatatttaatcctcatctaattaggaggtataagtaaccctattgtacagatgaagaaaaaacatcttgctgaaattacaagttaatgtctcagaaacagaattcaaactcagatttgtctgactccaaaacgtactttgtagtactagggatatactggaaaagcccttcagccttttatatagtcaattgtctgtaaaaaggacacagtccaaacaatgaactgttaacatattttacattattgaatatatacatggagactgtaaagaggtaaaagctctaaaaataatggattcacagaacttgaa

SEQ ID NO: 684632 - DNA, 909 bp, Homo sapiens
ggtcctggagccgcctccttcctcctaggccaggctctcgtcccttccagccgccgctagcgccgaaagagtgggtgtctccgtctgagtcgcgcgttgggggttccgcggctcctccgagccacaggaagaggcggagccttcgctgttgccggcccgcatgtgcctcggcccctggctggcgcgcctcctccctgtctgtcgctctctggtcttctagcccttaaacttggattcccattggattcaagtgggaaattaaaaaaagtaccgacgcctgggccccaccgccagagggattggtttaattacttctgtgcgrcccggcgtctgatttttttttttcaagctctaatgagccgtgaagtttggagccactaccttattccatcaactcagttaataaccctcgccctttccccctcgctttcttcgtcctcttctgtagttcctttggtcagctgggtccgccgcagcctggcttcctccctagttgtaagtgtttccgcccatcccaagaagtccacccctccctcatcttcacagatgtggattgcttatggcatgtgtgtgtttctgcctttgggcactcaagtacagagatctctcttcgtggtagagaccgaattgtactagtcttatgctagatccagttgctgttgcttcggactctcatcattgctttagagtgaccttaccctatactccgtattccaaaaggagtttgatgtctgtagtaaccaaatcataaatttaagtgtctaaataagtcctgtgactgacaaaccaaaaacaaacctgcttaaatatttccatactcaatctataaactgaggcagaagggaacacactagcaacattaaaaagttagactacttaaatacttgtttcatgagattttgccctgta

SEQ ID NO: 684633 - DNA, 529 bp, Homo sapiens
gaattctctcggctrtctttccatcaaaatccaactttaaacagggaggtagaatagaatagtgattcagagtgtgggctttgaagtgagaactacccaaatttgaatcctagactctccatttattagcttcgtgaccagcacataaaacagtgtaacaattgataagtcagttccttctctggatctcaagtttccccactgatatctagagaccttttgtgctctgaaaatttctttgagtagaatacttccgtcttcactgatcctgataaatgggaacttctgggctaataaatgtggaccctgactctttctgggtatctgagttgagaatagccctgtatggtgggatgttatatattagctcttatgagtgttttagttactagagaatcacagtagggtaactaggaaaatgaaagttaattgcctgttagagatacaaacccactatttaattactatatttaactagagatgataaaaagatttttatggttaaaaaaatatcaggcctatggtgaga

SEQ ID NO: 684634 - DNA, 587 bp, Homo sapiens
gttttccaccayacccctcatctccccaccccacctacctgccattaacacacccattccccaaggtagtcacttgcgaaagctcaaaatcacgtgttttccacccattccacacatgtgcgcatgcattatacttatatatctcttacgtatgttcttcatataaatggcatcatagcatatacattattctgtcacttgctctttttaattactggtagttgacattttttatactgatacatttatgtcatcttttctaatgttattatagttttcagctgtatgttcataccacaactcatttattttgtgctactttaatgagtatttaggcagtttccagagtgctgctactgctatctatgctgtaaccaatacgcttatacatatacacatatacatatatattttgaagaacaatcatacagcccagttcagagcaaattcttcgatgtgacattactgggtcaaatgatgtgtgcatttaaaattttcacagatattgccaaatagaatcaaagaggttttacaacaatttttatttttaccatcagtatataatgattcatttttaccctaagaaa

SEQ ID NO: 684635 - DNA, 587 bp, Homo sapiens
gttttccaccatacccctcatctccccaccccacctacctgccattaacacacccattccccaaggtagtcacttgcgaaagctcaaaatcacgtgttttccacccattccacacatgtgcgcatgcattatacttayatatctcttacgtatgttcttcatataaatggcatcatagcatatacattattctgtcacttgctctttttaattactggtagttgacattttttatactgatacatttatgtcatcttttctaatgttattatagttttcagctgtatgttcataccacaactcatttattttgtgctactttaatgagtatttaggcagtttccagagtgctgctactgctatctatgctgtaaccaatacgcttatacatatacacatatacatatatattttgaagaacaatcatacagcccagttcagagcaaattcttcgatgtgacattactgggtcaaatgatgtgtgcatttaaaattttcacagatattgccaaatagaatcaaagaggttttacaacaatttttatttttaccatcagtatataatgattcatttttaccctaagaaa

SEQ ID NO: 684636 - DNA, 587 bp, Homo sapiens
gttttccaccatacccctcatctccccaccccacctacctgccattaacacacccattccccaaggtagtcacttgcgaaagctcaaaatcacgtgttttccacccattccacacatgtgcgcatgcattatacttatatatctcttamgtatgttcttcatataaatggcatcatagcatatacattattctgtcacttgctctttttaattactggtagttgacattttttatactgatacatttatgtcatcttttctaatgttattatagttttcagctgtatgttcataccacaactcatttattttgtgctactttaatgagtatttaggcagtttccagagtgctgctactgctatctatgctgtaaccaatacgcttatacatatacacatatacatatatattttgaagaacaatcatacagcccagttcagagcaaattcttcgatgtgacattactgggtcaaatgatgtgtgcatttaaaattttcacagatattgccaaatagaatcaaagaggttttacaacaatttttatttttaccatcagtatataatgattcatttttaccctaagaaa

SEQ ID NO: 684637 - DNA, 587 bp, Homo sapiens
gttttccaccatacccctcatctccccaccccacctacctgccattaacacacccattccccaaggtagtcacttgcgaaagctcaaaatcacgtgttttccacccattccacacatgtgcgcatgcattatacttatatatctcttacgtatgttcttcatataaatggcatcatagcatatacattattctgtcacttgctctttttaattactggtagttgacattttttatactgatacatttatgtcatcttttctaatgttattatagttttcagctgtatgttcataccacaactcatttattttgtgctactttaatgagtatttaggcagtttccagagtgytgctactgctatctatgctgtaaccaatacgcttatacatatacacatatacatatatattttgaagaacaatcatacagcccagttcagagcaaattcttcgatgtgacattactgggtcaaatgatgtgtgcatttaaaattttcacagatattgccaaatagaatcaaagaggttttacaacaatttttatttttaccatcagtatataatgattcatttttaccctaagaaa

SEQ ID NO: 684638 - DNA, 672 bp, Homo sapiens
attgaagacagaaaaacaaacatactagaaaagacttttattaaaytgttaagattacatttttgaagtattaacagtagaatcaaatttctaattttgcaggctttattctttctacctataggtattcatttttgccatagatacattataagtgaataatttgtgacactataaaattatataatttggaagagagatggagtaaaaatggaggagggtggaaaatccacaccacaaagatgaaataatggtttgagactttttgttttattttatttcaatagtttttgaggaataggtggtttttggttatgtggataaattctttggtggtgatatctgagattttggtacactcatcactcaagcagtgtacactgtaaccaatatgtagtgttttattcctcacccacctcccaccttgtttaccaagtcctcaaagtccattatatcattcttatgcctttgtgtcctcatagcttagctcctacgtataagtaagaacatacaatatttggtttttcattcctgagctacttcacttagaataatagtctccaacttcatcccggttgctgctaatgcaatgatttcattcctttttatagctcagtagtatactatggtgtgtaaatgccacattttctttatccactcattggttgatag

SEQ ID NO: 684639 - DNA, 672 bp, Homo sapiens
attgaagacagaaaaacaaacatactagaaaagacttttattaaactgttaagattacatttttgaagtattaacagtagaatcaaatttctaattttgcaggctttattctttctacctataggtattcatttttgccatagatacattataagtgaataatttgtgacactataaaattatataatttggaagagagatggagtaaaaatggaggagggtggaaaatccacaccacaaagatgaaataatggtwtgagactttttgttttattttatttcaatagtttttgaggaataggtggtttttggttatgtggataaattctttggtggtgatatctgagattttggtacactcatcactcaagcagtgtacactgtaaccaatatgtagtgttttattcctcacccacctcccaccttgtttaccaagtcctcaaagtccattatatcattcttatgcctttgtgtcctcatagcttagctcctacgtataagtaagaacatacaatatttggtttttcattcctgagctacttcacttagaataatagtctccaacttcatcccggttgctgctaatgcaatgatttcattcctttttatagctcagtagtatactatggtgtgtaaatgccacattttctttatccactcattggttgatag

SEQ ID NO: 684640 - DNA, 672 bp, Homo sapiens
attgaagacagaaaaacaaacatactagaaaagacttttattaaactgttaagattacatttttgaagtattaacagtagaatcaaatttctaattttgcaggctttattctttctacctataggtattcatttttgccatagatacattataagtgaataatttgtgacactataaaattatataatttggaagagagatggagtaaaaatggaggagggtggaaaatccacaccacaaagatgaaataatggtttgagactttttgttttattttatttcaatagtttttgaggaataggtggtttttggttatgtggataaattctttggtggtgatatctgagattttggtacactcatcactcaagcagtgtacactstaaccaatatgtagtgttttattcctcacccacctcccaccttgtttaccaagtcctcaaagtccattatatcattcttatgcctttgtgtcctcatagcttagctcctacgtataagtaagaacatacaatatttggtttttcattcctgagctacttcacttagaataatagtctccaacttcatcccggttgctgctaatgcaatgatttcattcctttttatagctcagtagtatactatggtgtgtaaatgccacattttctttatccactcattggttgatag

SEQ ID NO: 684641 - DNA, 2919 bp, Homo sapiens
ccaaggacacacggaaaatctctacagaaaatcatttaagtttttgtacaaagaagcttttaagatagcacttaaatgaaaaaaaatgtttttaaaactgtgtgagttcaggagctgcattttatatgaaagtgaaaaataacagaagaaaaatagtactctattactttctttaagaaaagaaaacttgcatgtattttgctctttgtatcctatcttyacaatgataaaatacttagatatttaaacgtgtgttttgatattacttaagttgtataacatattcttatatttaaaaatagcactgctgagaaattggtgcagcagttttatttcaactgtgtcacccaaggtaaacttcaaatgttctggcaagatggcagatagaacacaaaggttggaaaagaaaatataggatatacaaaggaataaactaagagaaagagagggatgccatctgtggatgaggtatttcaacatatttctagaggatggaaggagaacataagcttgtggatggactttttcttttttttttttttttaaattgagaagatgatgtcagcccaggacactcaggcagggactacaacaatgcaaaaaactgatctgccagaagcttcagctcagagttgtcaaatacagtgaatccatccagatttaaccttaactaataggtgtactggaaagacaggacagaaagaagaaaatcattaaacagtagaagaaacatttccagagctgaatagaaagatacaagtttttgtttttgaaccacccccacccccccaactccaaggtatcgagctcagcaagtgcaaaagacctacatctagacagcatcatggaacttcagatactgagaataaacagcatgtctgagaagtttctagaaagcaaatataggttacaaacaaaaggatcaaggatcagcctaacattcagcaatctcaaatgtatgagatcttgaaggcaacagagcctgcaatggtctgagaaaaaattacagccaaagtatgaaggaaaagcagactttttcaaatatacaagcacgtggacttggaacatttacttgcaggcactcttgcttagaaaaatacgttatggtggccggacggggtggctcacacctgtaatcccaacactttgggaggccgaggtgggcggatcacctgaggtcaggagtttgagaccagcctggccaacatagcaaaaccgcgtctctactaaaaataaaaaattagccaggcatggtggcgtgtgcaggcatggtggcgggcgcctgtagtcccacctactcgggaggctgaggcaggagaatcgcttgaacccgggaggcagaggttgcagtgagccgagatcgtgtagctgcactccagcctgggcgacagagcgagactccgtctcaaaaaaaaaaaaaaaagaaaaaagaaaaaaaaagaaaaatacgttatggtgtactctggaatgatgaaggtaaaatccctgaaagaaaaaaaaaatggggcataaaagaaactgtggcactaaaccaagagtccaaaggaaagacactgtggcatggcagttgtgctagaagcttctgaagcccccttgaagcatgactcaagtagaagaaaggaactgattctaaagattagatataatggattaaaagctgctgcccattgcagctgccctggcagctcagccagaagcaccaggcaatgtggccatggaagccagctcggatggagaggaggatgcagaaattacagacgaggtaactgagacagtgatgaatggaggcatgaaggaaacgctcagccttactgtagatgccaagacagagactgcggtctttaaaagtgaagaagggaaactgtctacctctcaagacgctgcttgtaaagacttggaagagggccccaagaccgcagaggcgaagtgtgctgggcccggccctcaagcagtagtcccgagcagagtggtgtagagactccagcactccaaggacagtggagtcagcagtaagccctgggacaggtggcaagggtggctcccttgacctttgcacgcctcctcaggaaccgcctttccctggtgagctcctctctgaagagactgtcctcgggccttctcctctggaaccagcatccccagaggacagggctcctgctgtctcagggctgcctgacttgtgtggcgttggacctcggggattgctggtggataacacactgtggtcttgcctggtggcgagttttgacggccatggacagggtttggctccagtggtggtgcacgtggcctccgtggtatggacctagtggcttctccatcccacccaaggtaacagtgtctcacttcgtcccactaactgctagggagagagcatctgagatttttctttggggtggcattttattttattttattttttgtcttttgtagcagggaaagggtatgatgaccgggaggacagttcttttaagggttggagggtgccaaccagaggataggggtgagtgtgccctcattttgtttctactttaatttctgtgtatctgccatattgaactgcgagactaagagctgtctgcaatacaatacctgtattaaaaataacaaaaataaggcccgattctgtttctagaaaaaaaaaaaagctgccgccatgaacgacagggtgaagcaggcatgttttttcctttataagaaaatagaaaagagaattagaaaaggagaaacaaacaactgtataggaaagttacaattcaaatatgatgcaaacgaaaatgtagcatgattttgagcaattactgtagatatagaaaaaataatacatttgacttggatgcttggaatattttccttttaattgccgggggttatgatatctgatcctctatcaattagagtttggctacaagtgacaga

SEQ ID NO: 684642 - DNA, 2919 bp, Homo sapiens
ccaaggacacacggaaaatctctacagaaaatcatttaagtttttgtacaaagaagcttttaagatagcacttaaatgaaaaaaaatgtttttaaaactgtgtgagttcaggagctgcattttatatgaaagtgaaaaataacagaagaaaaatagtactctattactttctttaagaaaagaaaacttgcatgtattttgctctttgtatcctatctttacaatgataaaatacttagatatttaaacgtgtgttttgatattacttaagttgtataacatattcttatatttaaaaatagcactgctgagaaattggtgcagcagttttatttcaactgtgtcacccaaggtaaacttcaaatgttctggcaagatggcagatagaacacaaaggttggaaaagaaaatataggatatacaaaggaataaactaagagaaagagagggatgccatctgtggatgaggtatttcaacatatttctagaggatggaaggagaacataagcttgtggatggactttttcttttttttttttttttaaattgagaagatgatgtcagcccaggacactcaggcagggactacaacaatgcaaaaaactgatctgccagaagcttcagctcagagttgtcaaatacagtgaatccatccagatttaaccttaactaataggtgtactggaaagacaggacagaaagaagaaaatcattaaacagtagaagaaacatttccagagctgaatagaaagatacaagtttttgtttttgaaccacccccacccccccaactccaaggtatcgagctcagcaagtgcaaaagacctacatctagacagcatcatggaacttcagatactgagaataaacagcatgtctgagaagtttctagaaagcaaatataggttacaaacaaaaggatcaaggatcagcctaacattcagcaatctcaaatgtatgagatcttgaaggcaacagagcctgcaatggtctgagaaaaaattacagccaaagtatgaaggaaaagcagactttttcaaatatacaagcacgtggacttggaacatttacttgcaggcactcttgcttagaaaaatacgttatggtggccggacggggtggctcacacctgtaatcccaacactttgggaggccgaggtgggcggatcacctgaggtcaggagtttgagaccagcctggccaacatagcaaaaccgcgtctctactaaaaataaaaaattagccaggcatggtggcgtgtgcaggcatggtggcgggcgcctgtagtcccacctactcgggaggctgaggcaggagaatcgcttgaacccgggaggcagaggttgcagtgagccgagatcgtgtagctgcactccagcctgggcgacagagcgagactccgtctcaaaaaaaaaaaaaaaagaaaaaagaaaaaaaaagaaaaatacgttatggtgtactctggaatgatgaaggtaaaatccctgaamgaaaaaaaaaatggggcataaaagaaactgtggcactaaaccaagagtccaaaggaaagacactgtggcatggcagttgtgctagaagcttctgaagcccccttgaagcatgactcaagtagaagaaaggaactgattctaaagattagatataatggattaaaagctgctgcccattgcagctgccctggcagctcagccagaagcaccaggcaatgtggccatggaagccagctcggatggagaggaggatgcagaaattacagacgaggtaactgagacagtgatgaatggaggcatgaaggaaacgctcagccttactgtagatgccaagacagagactgcggtctttaaaagtgaagaagggaaactgtctacctctcaagacgctgcttgtaaagacttggaagagggccccaagaccgcagaggcgaagtgtgctgggcccggccctcaagcagtagtcccgagcagagtggtgtagagactccagcactccaaggacagtggagtcagcagtaagccctgggacaggtggcaagggtggctcccttgacctttgcacgcctcctcaggaaccgcctttccctggtgagctcctctctgaagagactgtcctcgggccttctcctctggaaccagcatccccagaggacagggctcctgctgtctcagggctgcctgacttgtgtggcgttggacctcggggattgctggtggataacacactgtggtcttgcctggtggcgagttttgacggccatggacagggtttggctccagtggtggtgcacgtggcctccgtggtatggacctagtggcttctccatcccacccaaggtaacagtgtctcacttcgtcccactaactgctagggagagagcatctgagatttttctttggggtggcattttattttattttattttttgtcttttgtagcagggaaagggtatgatgaccgggaggacagttcttttaagggttggagggtgccaaccagaggataggggtgagtgtgccctcattttgtttctactttaatttctgtgtatctgccatattgaactgcgagactaagagctgtctgcaatacaatacctgtattaaaaataacaaaaataaggcccgattctgtttctagaaaaaaaaaaaagctgccgccatgaacgacagggtgaagcaggcatgttttttcctttataagaaaatagaaaagagaattagaaaaggagaaacaaacaactgtataggaaagttacaattcaaatatgatgcaaacgaaaatgtagcatgattttgagcaattactgtagatatagaaaaaataatacatttgacttggatgcttggaatattttccttttaattgccgggggttatgatatctgatcctctatcaattagagtttggctacaagtgacaga

SEQ ID NO: 684643 - DNA, 1021 bp, Homo sapiens
ccacatacaggactcaacaactggttgactcacttgagccagtggtaccacccttctgggcttttatatcaaaccttatgcataaaaaaaaaaccagtttgattcttcagttagagttcatcctagactgactttgaatcaactccctgaattcttggggtttgcaaggaaatttctcaatctgaccaacacttataaattgaaccatttgaaatatccatattttcttggccaaaattggtagactatcagcaatttagtatggttcaacctaatgaaggtagagttcaagaaccatcttagttaaattggtacctgggacaaactaatctcacatactgatcagtttttgctggtatccattctggtagtgtgcttaacaagttaagcaatacagaaagggtaggacatgttttggtgaaaaatggtagtcaattttccatgtttagtgaaaaaagaagacaattatttaatgatgagtagggagaaagtgggagcctaatggtgaagccaactaacagatccttgtaccgacaaatattgtcacttttgactatcgtgctgaatattccacattaggtaacttaacggaagaactttaaagaaaaactttccaaggcctagcttatagttctctgggttaaaaaggattttaaaatctgatttgatttatgagttacattcacttgaatgtctagaggatggcagaaatattgttatgtgaattcctccaaattcacctgggttgctgatgtgtctgtacatggtcttgacaccaggttacatgaaatatgaatgtgctgtcacattatttcagataaaactcaagtagaaatgcatccaaaaacaktaatatttttggtaagccttttctaagttttggtcatagacatgaatgtttcaagaaaactgtaaaaagttttattatataccctgttgactccatgaagtattatataccttttgactacatgaagacttgcatgcagttccacagaataaatctggttttggggggatg

SEQ ID NO: 684644 - DNA, 657 bp, Homo sapiens
tttaagaccccaagctagacacgttatgttaataaaggcttgattaaagctgagagtaattagaggattaagtataattcttacattctattatcttatttatagaacttgatggcaggctctaaattttaacagcaagtgctgaatttaggacttaaaccgatgagttccttctgactttaacacactttaacattttttatttaaatggaatattgcaattattcaccagaaagttgtagagactatagcaaacacccacctggtctctcttgtaccaactcttaatgtgttaccatactttctatagatttaaaaatagtgagaaattgtatattaattggctagccctcttcaatattgtgtcctctcccagaaaaatctactgtcctaaatttgttgtttattattcccatgaaagttttatactgttatgacacacacacacacacacacacacacacacacacacacatactttataaactttatataaagggaattcttacacatctttctgtaccttattattatcattatttggagctatccatttgagctcctttatggtattttattgtgtgactrtgaccataattaatcaaatctgttgatagatatttaaataatttctagatgttttgctgttacaaatca

SEQ ID NO: 684645 - DNA, 610 bp, Homo sapiens
aattttcttatacagcaaggattctagagtagctatcttaaggatttagtcaactcagtggtttccgtaatcatccaggatctgggttatttccacctttcagctcagtcagccttaatgtttctcttttgtcctttggcttgttcccttctttccaactgggtggctgccacatgggcatcacatacagacatggaaagaactagttgaaaagctgctggtgtaacattttaaaagcaatacatctttctgatgaacaccgttacatttctcagtctcactggctacccaaaaaccaatcctgtgtgaaaagaatggtaaaagtcaatgattaacttagtcttctataggattttctgctgagctgagaatggtgtcctctgctttgagagataggaatctgaacaccacaagagttctgttagcaaggaagatggaaaagwtgtctactttgtagatgggtgcttttcaaagcaactgcattggttacacggccatgaagctggctgtaaatgatcttgggcaagacgctggggatgtgactagggattttcatttgtgcacctggatgaaaggatttgttattaataaagatcatctgaggaatgct

SEQ ID NO: 684646 - DNA, 687 bp, Homo sapiens
cctcagcctcccaagtagctaggattacaggcacctgccaccatgcccagctacttttgtatttttagtagagacaggatttcatcatgttgggccaggctggtcttgaactcctgaattcgggtgatccacccgccccagcctcccaaagtgctgggattacaggcatgagccatcacgcctggctcaaagctttgtatttttaaagatattagacatgtttcttgtttgtttgttttttttaaaaaaactaaacgctaatgtaggagaataagagaaagtttttccaaaaaagagaaaacattgtgattatcttattggaatgttggataataaagtctgctttatcaatcatcaagcacactataaaatttccattttaataggacttgtacctcaattgaggtaataaagttttaaagtttttaaagtgaaagccagccccgcccctctcctggagtgggcggggacagcggttgcataggcagctttccttgtgacaacacaggtccttsatgacacgctgctgtctggccacacctccttttcctttcatctttctcattgaccaatgggcttcaagcatgaaggccacacccctattctgcattctagtgcagccctggttacgcctcctctggctcagtcacacagcgacgtagaggtgactggaggtatatacttgtc

SEQ ID NO: 684647 - DNA, 1869 bp, Homo sapiens
gttgaaggagtcacttaaagaagtccagctagagagggatgaatatgctgaacatctaaaaggagagagggcccggtggcagcagaggatgagaaaaatgtcgcaggaggtgagatctgacccttcagcccccccacattagataggtcactggatctttctgggcacctgtaaaatgggaatagtacagccagaggtggtcatgggtctgggctttgtggaggtgggggcagagagagagatggtagcatgtccagcctccagcccctctctccagggccctttccccctgtgctttgggcaggtttgctcgttgaagaaggagaagaagcatgataaatatcgggtagagaagctggagaggagcttgtccaaactcaaaaaccagatgggtaagatggggctggcgtgacctggcagcaggactggcatcagagggctgtgagggtggcttggagtgccccagcgaggtgggtggatggaagggctttgaggcagagggaaagaggtctgtgccaggagacggcaagtcttgtcatctcaatgagcctcagtgtccccatcagcaaagagggcccgttgtcagccacccgcagtgctctttctctgaaagtgctttggaagactggctacccatctgggtgcgaggaatcattagcagtgaggctaagtttgaggagccggagaggagctgtgcgccaagaggagggttttttcttttcttttcttttcttttttttttggaatccagaggctcttattatctgcttcctttctcagctgaacctctgcccccggagcccccagcagtgccctctgaggtggagctgcagcacctgaggaaggaactagagagagtggcaggagcgctccaggcccaggtggagtacaatcagcgcataagtctcctgaatgaggggcaaaaggagaggcttcgggagcaggaggagaggcttcaggagcagcaggagaggcttcsagagcaggaggagaggcttcagcagctggccgagccacagaacagcttcaaggagctggtgcgttgccccagctggggagcctgccctcctccctagccctccaggcctttgtttccccacctataaaatggggcagtgtagccctcaagtgaaatgttactcctaaaggcacctgtgagccaggagccctgctctggtggctgtgggagacaggggatgatttttctaacctgcctccacccttcccggtgccatgggaggcagtcaccaagttctggggtctccagctgcagtgggtggctgctgattgcttctctctgtccagaacaatgagaacaagagcgtactacagttggagcagcaagtaaaggagctgcaggagaagctaggcaaggtgaaggagacggtaacctccaccccatccaagaaggtctgggaggtgggcaccagcctctggggaggggaggtgccaggccagaggcagctccagcccaggggcaggtgaccccagcaccctccagggcagtcctgtggctgtttcttgcttcctgccctctgattttagaggtgggtagccctgggctcctcccaggtctggacatcatcattccagctagagacatggagcacccccaatcacaggggaagagacagagtggtataacagtcttcttatgccagacgcggtggcttacgcctatagtgccaacactttgggaggctgaggcaggagaatcacttgaggtttggagtttgagatcagcctggccaacatggtaaaacctcatctctactaaaattacaaaaacaaaaaacaaaaaaagaaagaaaaattagtggggcatggtggtggcgcatgcctgtaatcccacctactcaggaggctgag

SEQ ID NO: 684648 - DNA, 1869 bp, Homo sapiens
gttgaaggagtcacttaaagaagtccagctagagagggatgaatatgctgaacatctaaaaggagagagggcccggtggcagcagaggatgagaaaaatgtcgcaggaggtgagatctgacccttcagcccccccacattagataggtcactggatctttctgggcacctgtaaaatgggaatagtacagccagaggtggtcatgggtctgggctttgtggaggtgggggcagagagagagatggtagcatgtccagcctccagcccctctctccagggccctttccccctgtgctttgggcaggtttgctcgttgaagaaggagaagaagcatgataaatatcgggtagagaagctggagaggagcttgtccaaactcaaaaaccagatgggtaagatggggctggcgtgacctggcagcaggactggcatcagagggctgtgagggtggcttggagtgccccagcgaggtgggtggatggaagggctttgaggcagagggaaagaggtctgtgccaggagacggcaagtcttgtcatctcaatgagcctcagtgtccccatcagcaaagagggcccgttgtcagccacccgcagtgctctttctctgaaagtgctttggaagactggctacccatctgggtgcgaggaatcattagcagtgaggctaagtttgaggagccggagaggagctgtgcgccaagaggagggttttttcttttcttttcttttcttttttttttggaatccagaggctcttattatctgcttcctttctcagctgaacctctgcccccggagcccccagcagtgccctctgaggtggagctgcagcacctgaggaaggaactagagagagtggcaggagcgctccaggcccaggtggagtacaatcagcgcataagtctcctgaatgaggggcaaaaggagaggcttcgggagcaggaggagaggcttcaggagcagcaggagaggcttccrgagcaggaggagaggcttcagcagctggccgagccacagaacagcttcaaggagctggtgcgttgccccagctggggagcctgccctcctccctagccctccaggcctttgtttccccacctataaaatggggcagtgtagccctcaagtgaaatgttactcctaaaggcacctgtgagccaggagccctgctctggtggctgtgggagacaggggatgatttttctaacctgcctccacccttcccggtgccatgggaggcagtcaccaagttctggggtctccagctgcagtgggtggctgctgattgcttctctctgtccagaacaatgagaacaagagcgtactacagttggagcagcaagtaaaggagctgcaggagaagctaggcaaggtgaaggagacggtaacctccaccccatccaagaaggtctgggaggtgggcaccagcctctggggaggggaggtgccaggccagaggcagctccagcccaggggcaggtgaccccagcaccctccagggcagtcctgtggctgtttcttgcttcctgccctctgattttagaggtgggtagccctgggctcctcccaggtctggacatcatcattccagctagagacatggagcacccccaatcacaggggaagagacagagtggtataacagtcttcttatgccagacgcggtggcttacgcctatagtgccaacactttgggaggctgaggcaggagaatcacttgaggtttggagtttgagatcagcctggccaacatggtaaaacctcatctctactaaaattacaaaaacaaaaaacaaaaaaagaaagaaaaattagtggggcatggtggtggcgcatgcctgtaatcccacctactcaggaggctgag

SEQ ID NO: 684649 - DNA, 1869 bp, Homo sapiens
gttgaaggagtcacttaaagaagtccagctagagagggatgaatatgctgaacatctaaaaggagagagggcccggtggcagcagaggatgagaaaaatgtcgcaggaggtgagatctgacccttcagcccccccacattagataggtcactggatctttctgggcacctgtaaaatgggaatagtacagccagaggtggtcatgggtctgggctttgtggaggtgggggcagagagagagatggtagcatgtccagcctccagcccctctctccagggccctttccccctgtgctttgggcaggtttgctcgttgaagaaggagaagaagcatgataaatatcgggtagagaagctggagaggagcttgtccaaactcaaaaaccagatgggtaagatggggctggcgtgacctggcagcaggactggcatcagagggctgtgagggtggcttggagtgccccagcgaggtgggtggatggaagggctttgaggcagagggaaagaggtctgtgccaggagacggcaagtcttgtcatctcaatgagcctcagtgtccccatcagcaaagagggcccgttgtcagccacccgcagtgctctttctctgaaagtgctttggaagactggctacccatctgggtgcgaggaatcattagcagtgaggctaagtttgaggagccggagaggagctgtgcgccaagaggagggttttttcttttcttttcttttcttttttttttggaatccagaggctcttattatctgcttcctttctcagctgaacctctgcccccggagcccccagcagtgccctctgaggtggagctgcagcacctgaggaaggaactagagagagtggcaggagcgctccaggcccaggtggagtacaatcagcgcataagtctcctgaatgaggggcaaaaggagaggcttcgggagcaggaggagaggcttcaggagcagcaggagaggcttccagagcaggaggagaggcttcagcagctggccgagccacagaacagcttcaaggagctggtgcgttgccccagctggggagcctgccctcctccctagccctccaggcctttgtttccccacctataaaatgkggcagtgtagccctcaagtgaaatgttactcctaaaggcacctgtgagccaggagccctgctctggtggctgtgggagacaggggatgatttttctaacctgcctccacccttcccggtgccatgggaggcagtcaccaagttctggggtctccagctgcagtgggtggctgctgattgcttctctctgtccagaacaatgagaacaagagcgtactacagttggagcagcaagtaaaggagctgcaggagaagctaggcaaggtgaaggagacggtaacctccaccccatccaagaaggtctgggaggtgggcaccagcctctggggaggggaggtgccaggccagaggcagctccagcccaggggcaggtgaccccagcaccctccagggcagtcctgtggctgtttcttgcttcctgccctctgattttagaggtgggtagccctgggctcctcccaggtctggacatcatcattccagctagagacatggagcacccccaatcacaggggaagagacagagtggtataacagtcttcttatgccagacgcggtggcttacgcctatagtgccaacactttgggaggctgaggcaggagaatcacttgaggtttggagtttgagatcagcctggccaacatggtaaaacctcatctctactaaaattacaaaaacaaaaaacaaaaaaagaaagaaaaattagtggggcatggtggtggcgcatgcctgtaatcccacctactcaggaggctgag

SEQ ID NO: 684650 - DNA, 2256 bp, Homo sapiens
gattcttccagtactacagagagggatgccatcagtgagtgggaggccagggcatggcagggggagctgcagggctgttggaggggccccagcgtctgagccctgtcctcccgcaggaaagtttatcaccctataacaaagccagggggcagtgccaaagatgcagcaccgggaggaggacaccatcaggctggccctggacagggaggagatgaaggtagagtgtgcaacatctctgcgggggtgggggtggctgtgacggtgagcgctggcagcagcgtgacagctgagcacccctccctccaggtgaagctgctggagctgcaggagatggtgttgcagctggtggcgactacaagggacacagcaaattcttggtgactgcccagaaccctgctcatgagcccagtccaggagccccagccccccaggagcttggggctgcccacaagcatggtggtgagtagagccctcaggcggggtgggcaggcaggagcaggggggctctcactgagctcagatccccgcctccctctctccaaagatctttgtgaggtgagcctcactgacagcgtggagcctgtgcaagtagaggccagggagggttctccccacgacaaccctactgcacagccgatcgtgcaggaccaccaggagcacccaggcttgggcagcaactgctgtgtgccattcttttgctgggcttggctgccaagaagaaggagataaacatcaccatcgtcaaagasctgctcaagaaatttttaaaaaagaaacaaagttatggggttaatctcctacacaattcatttacttcgtttgaatgttatagccacttatgattatttgtgtttctaatttatagtttaagtttatttgtaaatagttaaaagagagtgggtctctgtggctttcactgatgttcactctggcatactttcgcaattttctttttcaatttcatgattgtaggtcattagcgtgcatattgagtttgcccttacgtggtggggttcaaacacacaaagacccactatttgcacaaaactattcttgctggtttggaataggctgccatgtgtttttaatgttattgcagcatgtatattcattacagaattcagataaaatttgcctatgttctgctattgtttgatctaatcttaatcacagtgagctcttcattagcacaatatgtggtttgccccaagtgtgcactatttaatactttgtaatatgccaccaagagtactgacatttagagttgtttaaaggccgagaactggaaacagcctttccctcattttctgtgtattggtgatgggagtaataacattttgggggagctttttaaatttcacagaagaggaaagttgcctgctctggcaggtatgtgcaagatagagtgtgtttcatttgttctgttgccaagaattagtgctgtactattgtagttcctttaggatttgtatgtgctctgggctcatgaagatattgcatcatgagctgcagcagttgtactcttttttgatgacctaaaaagggcttatttctgaggaatgaaaggttcccatcattgactatggatgtggaaaacctttcctagcttagagcatttgtatctatattttaaagtcagagttcatgttacctgttttaatcacatgactgcatgtcccagtacacaaaagggcactggttggcattcttcttaatgtatttagtaaagatcagaagaaatcctttaagagtttaaatgtccctggaacacgcatacaggctctagtcaagaatgaattagagtgaaggaaagctgtgtgacacctggcattcctctgttcatggagcttctttgaggcttgaagattgattttaccatctagaccactctgcctattcttcaaccaccttggttactttgacataggaattgacttcttttccttgaatggaaaacactttgaaataataataaacattgttataaactaatatatgtgagagtgcttagttgaaacaaaaaggagttttagtagacagtattatactatctttgaaaatcaaggagaagtttatgcaacttaaaatgtgtacaaactgcagtgcaatctactgttggtgaatgtcagtgtattatcaggaaacatgtctatacaatcacagagttatatttcctcacaaacttctttgtgaagagtgaaatgtgtttctgtacctctgggtttcacttacgggcatattttgtgcagtatttat

SEQ ID NO: 684651 - DNA, 2920 bp, Homo sapiens
taggagttgaaggctgcagtgagctatgatactaccgctgcactccagcctgggcagcagagtgagaccctgtctcaaaacaaacaaataatattaaaaataaatacaaattttcttatctttgaaacgaggataacacaactcagggttgaaatgagaaatatgatgatggctgtgaaagcactttgtaaaccatgatgtgctttgcacatttatcctcagaatgcttactactcattagttcaaatttatatataagctctacgtccagggccgggtgcagtggctcactcctgtaatcccagccttttgggaggccgaggcaggtggatcgcttgaggtcaggagttcgagatcagccaggccaacatggcgaaaccccatccctactaaaaatataaaaattagctgggtgtggtggcggctgcctgtaatcccagctactggggaggttgaggcaggagaattgcttgaacccagtaggcagaggttgcagtgagtcaagatcatgccactgccctccagcctgggtgacagagcgagactccatctgaaaaaaawaaaaaataaataataagatatgtatccaaatgcatttacttgtgcattcggattgattatgttgttaatgagtaaggtgcagaggcaacagtgttgagctgaggactggaattagtggggaccgccactaagggagtgcacaggggaatgttgcctgtgtaggtctcactggagtgagctggttcttggggaatggaaccacaccagcaaaaatcgaggacagtgcctgccacctaggagccacggagtaattgttcactaccttcaactgatggttgaaaacacagtcctgggagtagcctccagtatttaataaaccttttctcccttcccccacccacttctttagccaactacaccataaaacagacccttctatcgctaccaaaaataaaaatcttgtctttggggttgggagagataagacttacttggttattaactgtataggtatttgtatataggtattttcagctgggtctacctcttcaacttttgtttttcagtttaatttctctattcctctttcccagccaaatttttaagtcaaccatacacctcaacagggggcctaattaattagcattttaaaagcagtgtactccctcagaagggtggagggggagggtagcttggagtcagtttgtattcagaagaacaaggtattattgtgtgtgctggattttttttttttgagacggagtctagctctgtcaccaggctggagtgcagtggcgcaatctcagctcactacaacctctgcctcccgggttcaagtgattctcctgcctcagcctcctgagtagctgggattacaggcacccgccacgacgcccgggtactttttgtatttttagtagagacacagtttcaccatgttggtcagtcaggctggtctcgaactcctgacctcatgtgatctgcccgcctcagcctcccaaagtgctgagattacagcgtgagccaccgcaccctgccgtgtgtgctgaagtttacccaaatgcttaatgctggaaaatgcttgaagaaaaccatccttcctctggcaggaggtgcagtctgacatggaagcataaagcaatatatagagacacgttttcatttttactctacttactgttttcattcctgaaagtatatgcatgtgtgtgttacaagaagtcattttaaaaaacaaacatgatgttcatctattcagattggttttattttggaactgtcttcctctcatgtaaatgtatcctttttaaaaaaggccattaatgctatttacctagtaacacttcagtgtgtcaataatattacttttgtcaatagagcacttaagtaattattgccttttctggtattaagtatcttcgctgcatttaaagaaaagcacccatacatctaaagaaaaaggtccaaaaacataaggcaagtttttactttcaacaataagtgttacatttctccaaagatccaaatttccttttagccttgggccaagaagacagactgagagaatccaagaatttacagatggaagttacctcattcaacctcctaatctactgctggaataccctctagggcagccctggcagatggccatccatctgcttgtatacttccagggctggggagctcattatctcctgaggcaactcataaattctttcttatttgagctaaaagtggcctctctgtaacttctttttttttgagacagagtctcgctctatcggccaggctggagtgcagggcacgatcttggctcactgcaacctctgcctcccgggctcaagcaattctcctgcctcagcctcccgagtagctgggattacaggtgcgtgctaccatgcccggctaatttttgtatttttagtaaagatggggtttcaccatattggccaggctggtctcgaactcttgatctcaggtaatctacccgcctcggtctcccaaagtgctgggattacaggcatgagccaccgtgcccggccgcctctctgtaacttctatccactggtcctggttgtggagcaacgtaagaaagatcttaagtatttgaagatagctactacatttcccttttgtcttttccgaattaagataactgaattgttttaaaatgaagatttttgcctggaatctggaagaacaagatggaaatgagtgtatgttaactgttgttataaaggaaacctttgttataattgcagctcactggtaaggtatctcttctagtatttcacacttgggcatagcctcctatataatacccctcttgaaagtaacctatcccttactgagctacgaagagtaagaagtccctcctgggtgaatagaatcttataccttttgctattctgaattc

SEQ ID NO: 684652 - DNA, 611 bp, Homo sapiens
caggcatggtacagtgtttctcacattcttggcactcagtgaatgttgactgagatctatattgtgcaatgctacacaaggtttgaggagagggaagactgaaaagaccccttgtctttatgatcaggagatctttggatattgcttctgtatagtgattttccaccctttctgttttaagaaatataaagaacaaagatattattcatatcaaagattaaggtatatgcaacattgcctctaggccatgtgwtctgttggaccatgaatgtaaaagtgtctggttttgtaatagtacatatcgtccctcagcactctgctggtttgtatgaacatcagtatgtttgagaatgagtgcaggaaggtggaggtaaccaagctgtccatctctagaaaagtccagtgtggtgggtgggtgggtgcacacaatgaaatagtaagccacaccaaaggccccgtactagatggaatacagtaacacagttgtatcttgtaaacatcatgtccagtaaaaaggagtaacaaatagaaatgagtagaaaaaataggaaataagtgagaattataagagaaataagaagcaaaaacagaaatagaagctatagcataat

SEQ ID NO: 684653 - DNA, 1383 bp, Homo sapiens
acacacaggatgattgagaagctctatgcggttattttgtaccattgcctgagaaataaaaaaaagtgtaataaaaacacaatcataatcaactactgagtataaactaatctatttattgtctggttttataactgtgtttggtattgtaaaagtaacayctattttagaacattgaaaaaaataaaaattagatcaaggttttaaaaaacacaaattagagataaccattttgtacaggtaaaattgtttgattcagtctgtttctttagatttctgactacttaacctagcataagctttttaatcttatacaggattacaacaggaaaggacattaaagataaattagcaagagttataccctcattgtgtccttgaagaaattcaggcttatctttccagaaggattttatgcagtagaatatacatacatagttgttcaattaatctagatcataagttttcattagagttatttgtgactactagtatttatttaaaaattagtttttaattattcaagacatacataaatagagggactgatgccaacaagggagcaaaataggaagtcccaggccctccttcctccatagagatatggaattgaaaacaatacacagaacattttctttgtgagcaatcccaaacttagttaacgtgtttctgtacccaaggtgagcatgtagccaaaatcaaccatatcaaagacagtaggaaaatgcatggcctttacatgccacagatcctccgtctggcaaagcacagtgccattgggagaaaactcccaactcatgccttctccgtggaaagagaaagaaaagagtggaacatatccactaacttctgacttctaaggggctgcccaagggaatgatttttatcttgcctgaatctaagctctgacatgaatgggtctcaggaggggaccactgataacaaagtagatcactgggtcttagtctagcaccagagaagatagagtgtcaacagacagatcctaggcagtgtcccagtatcatgacttgctacagcatcaaagacacagggaaaaagagacaaaaagtctaccacatactgaaagcaattaacaaaatggcaatagtaagtcctttcctgtcaataattattttaaaggcaaactggttaatctctcctattaaaatacaacggttgattgaatggataaaacccaggattcaactacatgctctttacaagagactcactttagatataagaacacaggctgaaattgaacggatggaaaaagatattccatgcaaatgagaacctgaagtgaaaagaaacagccatatttacatcagacaaaatagactttaagacaaaaactgtgagaagaaacaaaggacaatatat

SEQ ID NO: 684654 - DNA, 1383 bp, Homo sapiens
acacacaggatgattgagaagctctatgcggttattttgtaccattgcctgagaaataaaaaaaagtgtaataaaaacacaatcataatcaactactgagtataaactaatctatttattgtctggttttataactgtgtttggtattgtaaaagtaacacctattttagaacattgaaaaaaataaaaattagatcaagrttttaaaaaacacaaattagagataaccattttgtacaggtaaaattgtttgattcagtctgtttctttagatttctgactacttaacctagcataagctttttaatcttatacaggattacaacaggaaaggacattaaagataaattagcaagagttataccctcattgtgtccttgaagaaattcaggcttatctttccagaaggattttatgcagtagaatatacatacatagttgttcaattaatctagatcataagttttcattagagttatttgtgactactagtatttatttaaaaattagtttttaattattcaagacatacataaatagagggactgatgccaacaagggagcaaaataggaagtcccaggccctccttcctccatagagatatggaattgaaaacaatacacagaacattttctttgtgagcaatcccaaacttagttaacgtgtttctgtacccaaggtgagcatgtagccaaaatcaaccatatcaaagacagtaggaaaatgcatggcctttacatgccacagatcctccgtctggcaaagcacagtgccattgggagaaaactcccaactcatgccttctccgtggaaagagaaagaaaagagtggaacatatccactaacttctgacttctaaggggctgcccaagggaatgatttttatcttgcctgaatctaagctctgacatgaatgggtctcaggaggggaccactgataacaaagtagatcactgggtcttagtctagcaccagagaagatagagtgtcaacagacagatcctaggcagtgtcccagtatcatgacttgctacagcatcaaagacacagggaaaaagagacaaaaagtctaccacatactgaaagcaattaacaaaatggcaatagtaagtcctttcctgtcaataattattttaaaggcaaactggttaatctctcctattaaaatacaacggttgattgaatggataaaacccaggattcaactacatgctctttacaagagactcactttagatataagaacacaggctgaaattgaacggatggaaaaagatattccatgcaaatgagaacctgaagtgaaaagaaacagccatatttacatcagacaaaatagactttaagacaaaaactgtgagaagaaacaaaggacaatatat

SEQ ID NO: 684655 - DNA, 1383 bp, Homo sapiens
acacacaggatgattgagaagctctatgcggttattttgtaccattgcctgagaaataaaaaaaagtgtaataaaaacacaatcataatcaactactgagtataaactaatctatttattgtctggttttataactgtgtttggtattgtaaaagtaacacctattttagaacattgaaaaaaataaaaattagatcaaggttttaaaaaacacaaattagagataaccattttgtacaggtaaaattgtttgattcagtctgtttctttagatttctgactacttaacctagcataagctttttaatcttatacaggattacaacaggaaaggacattaaagataaattagcaagagttataccctcattgtgtccttgaagaaattcaggcttatctttccagaaggattttatgcagtagaatatacatacatagttgttcaattaatctagatcataagttttcattagagttatttgtgactactagtatttatttaaaaattagttkttaattattcaagacatacataaatagagggactgatgccaacaagggagcaaaataggaagtcccaggccctccttcctccatagagatatggaattgaaaacaatacacagaacattttctttgtgagcaatcccaaacttagttaacgtgtttctgtacccaaggtgagcatgtagccaaaatcaaccatatcaaagacagtaggaaaatgcatggcctttacatgccacagatcctccgtctggcaaagcacagtgccattgggagaaaactcccaactcatgccttctccgtggaaagagaaagaaaagagtggaacatatccactaacttctgacttctaaggggctgcccaagggaatgatttttatcttgcctgaatctaagctctgacatgaatgggtctcaggaggggaccactgataacaaagtagatcactgggtcttagtctagcaccagagaagatagagtgtcaacagacagatcctaggcagtgtcccagtatcatgacttgctacagcatcaaagacacagggaaaaagagacaaaaagtctaccacatactgaaagcaattaacaaaatggcaatagtaagtcctttcctgtcaataattattttaaaggcaaactggttaatctctcctattaaaatacaacggttgattgaatggataaaacccaggattcaactacatgctctttacaagagactcactttagatataagaacacaggctgaaattgaacggatggaaaaagatattccatgcaaatgagaacctgaagtgaaaagaaacagccatatttacatcagacaaaatagactttaagacaaaaactgtgagaagaaacaaaggacaatatat

SEQ ID NO: 684656 - DNA, 591 bp, Homo sapiens
  misc_feature 510: n = A,T,C or G
agagttatttttggccaacaggggtcgccttgtctgggaggttactcacccccagcagcctgcaaacagcgctgtgtgactctgttgtataaaggctggtcctcttgccccagggtgagaccaacactgtggtgctattcatacttctgagctctctgtgggatcatgctaaggctagattctagatgaaaaccacatctttgctcagcttcttcctctgtcacatgtggcttccctcacttccttctcatgggagcactccccraagacatcacgtgcagctgaatccccgcctcaggctctgcttctagggagcctgacttacaacattgttacctttttttttgacacagggtcttgctgtgtcacccaggctagactgcagtggcattatcaatgaaaaaaatggaggaaatgtttatcaaattgtaaatgactctaagcttgaaggaacaatcagtatgtgagataataatggctaggcatggtggctcacacctgtaatcctancactttgagaggccaaggcaggaggattgtttaagaccagcctgggcaacatagtgagacactgtctctaaaaaaaaaaaa

SEQ ID NO: 684657 - DNA, 591 bp, Homo sapiens
  misc_feature 510: n = A,T,C or G
agagttatttttggccaacaggggtcgccttgtctgggaggttactcacccccagcagcctgcaaacagcgctgtgtgactctgttgtataaaggctggtcctcttgccccagggtgagaccaacactgtggtgctattcatacttctgagctctctgtgggatcatgctaaggctagattctagatgaaaaccacatctttgctcagcttcttcctctgtcacatgtggcttccctcacttccttctcatgggagcactccccaaagacatcacgtgcagctgaatccccgcctcaggctctgcttctagggagcctgacttacaacattgttayctttttttttgacacagggtcttgctgtgtcacccaggctagactgcagtggcattatcaatgaaaaaaatggaggaaatgtttatcaaattgtaaatgactctaagcttgaaggaacaatcagtatgtgagataataatggctaggcatggtggctcacacctgtaatcctancactttgagaggccaaggcaggaggattgtttaagaccagcctgggcaacatagtgagacactgtctctaaaaaaaaaaaa

SEQ ID NO: 684658 - DNA, 591 bp, Homo sapiens
  misc_feature 510: n = A,T,C or G
agagttatttttggccaacaggggtcgccttgtctgggaggttactcacccccagcagcctgcaaacagcgctgtgtgactctgttgtataaaggctggtcctcttgccccagggtgagaccaacactgtggtgctattcatacttctgagctctctgtgggatcatgctaaggctagattctagatgaaaaccacatctttgctcagcttcttcctctgtcacatgtggcttccctcacttccttctcatgggagcactccccaaagacatcacgtgcagctgaatccccgcctcaggctctgcttctagggagcctgacttacaacattgttaccttttttkttgacacagggtcttgctgtgtcacccaggctagactgcagtggcattatcaatgaaaaaaatggaggaaatgtttatcaaattgtaaatgactctaagcttgaaggaacaatcagtatgtgagataataatggctaggcatggtggctcacacctgtaatcctancactttgagaggccaaggcaggaggattgtttaagaccagcctgggcaacatagtgagacactgtctctaaaaaaaaaaaa

SEQ ID NO: 684659 - DNA, 592 bp, Homo sapiens
aaaataacatgtgctggggataattgatgcaagaggaaacatgatttatctttacaaacattatagttaaagctacatatactgcttgggactcagtttcctaatttataaaatgaaataggtttaatattttctcagagtattttcatgattaaatgacagggcatctgagatgaaacatagacaagtagctacttacaatggccaatattgtgaatcttctttaattatctataacatrgtgaacaccaatatatgaaaccatgaaaaatagtcgttttgtttgggcatagcattacatttccatttcgttttgtgaccctagcatattgagaaataaataggcattgatttcctctatcactgacttattaatgtaaacaattattttttttttaccaaataaaaacccaaagtcctgtttgtttgtttgtttgtttttggctttactaatcacttgtttatttatttactttacaaaagggaatggcaagaaacaaagccaaccaaaacaaacaaacgaacactttagacagattagctttaaaagagcttaactgagcaaagaatgattcataagtcagccagcgtc

SEQ ID NO: 684660 - DNA, 638 bp, Homo sapiens
cattcagtattaattgccttttcaatttattctagtaatattatgaatgtgtgcttgaattcctacttctaggacacatcacaaaatttttctatgggcaataaaactatttcttgtaaaacaatattcttttatggtattgcacaaagtgcatgaaaaattcatgagttgatcattgaagatatgtatctataagttaaaaaatagttgaagtactcttgaagatcattgctcattctgccaagaaaaggccattattacgaacattttaggctacatgataggaaccatttctattagcctcagctaaaggctttttcaggtgtctgtttttctagattgctgaatgtaatgcaagagtggtatttttattgcctcaagacctaagtatagtcagttaataatttatcactattatcttaggttaataatggggataatatctcctgcaaagttttacagtattacatttgaaagcagaagactttctgtggaaagcattttcctcatatagaagcagcacaaatgttactgggtatacatcatttatatattttaaaaggtactagtaytatgtagacatggaactctataagatcacttagtaggttagagacttttatataatttttgagaga

SEQ ID NO: 684661 - DNA, 649 bp, Homo sapiens
tattgtyatacctatttaaattaatacatagcttagtaaacttagactttctaatgagtttatatcaaattgcattgatactaaaactgtaagtgtcctttcacccatacatacaaacaaaacctttgctctgaaattcctgagattgacctttcaatgcaaatacatttcacaggctaattccaagaggatccccacacttttaaatgtacaaaagaaatagagcacaacttgacctgagattcaggttattttctctgccaaaagtaatttggaacaagtcattttatcttctcaaagctgtaatggtcatatgtgtcaaatgaggattggtattgtcagtgatttcaatctattttttggctcaacacaccaaagacactactcactttcatcattcacagaggctcactaccctagtaatgccacagtgagaggttaaggtgtaaaggtgggtgtgtgtgtgtgtatttgaaaaagctgcctggtgtatctggcaaaatagagtggtatatgtgcgtatggggaacaaggaagatgtcattcctagccactctttacacccactcccaatgctatcgacttagttcaaacttccttttcagtatccagtttctgtgactctaggattcttttaacaataacatat

SEQ ID NO: 684662 - DNA, 649 bp, Homo sapiens
tattgttatacctatttaaattaatacatagcttagtaaacttagactttctaatgagtttatatcaaattgcattgatactaaaactgtaagtgtcctttcacccatacatacaaacaaaacctttgctctgaaattcctgagattgacctttcaatgcaaatacatttcacaggctaattccaagaggatccccacacttttaaatgtacaraagaaatagagcacaacttgacctgagattcaggttattttctctgccaaaagtaatttggaacaagtcattttatcttctcaaagctgtaatggtcatatgtgtcaaatgaggattggtattgtcagtgatttcaatctattttttggctcaacacaccaaagacactactcactttcatcattcacagaggctcactaccctagtaatgccacagtgagaggttaaggtgtaaaggtgggtgtgtgtgtgtgtatttgaaaaagctgcctggtgtatctggcaaaatagagtggtatatgtgcgtatggggaacaaggaagatgtcattcctagccactctttacacccactcccaatgctatcgacttagttcaaacttccttttcagtatccagtttctgtgactctaggattcttttaacaataacatat

SEQ ID NO: 684663 - DNA, 2505 bp, Homo sapiens
gccctctagctgcactcggctgagtcagtctgtcggagtctgtcctcagagcaggcagagtaaagggacttgaacgagccagttgccagattattctatttcccctccctctctcccgccccctatctcttttcacccttctcccaccctcgctcacgtagccatggcggagccatcggcggccactcagtccccttccatctcctcgtcgtcctccggagccgagacgtccgcatccggcggcagcggaagcccaggagcctgccctgccctggggacgaagagctgcagctcctcctgtgcggttcacgatctgcttttctggagagatgtaaagaagactgggtttgtctttgccaccacgctgatcatgctgctttccctggcagctttcagtgtcatcagtgtggtttcttacctcatcctggctcttctctctgtcaccatcagcttcaggatctacaagtccgtcatccaagctgtacagaagtcagaagaaggccatccaatcaaagcctacctggacgtagacattactctgtcctcggaagctttccataattacatgaatgctgccgtggtgcacatcaacagggccctgaaactcattattcttctctttctagtagaagatctggttgactccttgaagcaggctgtcttcatgtggctgatgacctatgttggtgctttttttaacggaatcacccttctaattcttgctgaactgctcattttcagtgtcccgattgtctatgagaagtacaagacccagattgatcactatgttggcatcrcccgacatcagaccaagtcaattgttgaaaagatccaagcaaaactccctggaatcgccaaaaaaaaggcagaataagtacatggaaccagaaatgcaacagttactaaaacaccatttaatagttataacgtcgttgcttgtactgtgaacgaacatactcagtgtcagcttgagcctgcattccaagctttttttttaatttggtgttttctcccatcctttccctttaaccctcagtatcaagcacaaaaactgatggactgataaaagaactatcttagaactcagaagaagaaagaatcaaattcataggataagtcaacaccttaatggtggtagagcctttacctgtagcttgaaaggggaaagattggaggtaaaagagaaaatgaaagatagaacacctctgggtccttctatccagttttcagcactagtcttactcagctatccattatagttttgcccttaagaagtaatgattaacttatgaaaaaattatttggggacaggagtgtgatgccttccttgtttttgtttttttttttgcagccctcaaatcctatcttcctgccccacaatgtgagcagctactcctgatactccttttctttaatgatttaactttcaacttgatgaataacttataagtgatagtgataattcctgattccaagaatgccatctgataagaaagaatagaaatggaaagtgggactgagagggagtcagcaggaatgctgcagtggccgtcactccctctgccactatccccagggaaggaaaggctccgccatttgggcaagtggtttctacatcactggacaccagttctgagcgttagtttgagaactcgttcccgaatgtgctttcctccctctcccctgcccgcctcaagtttaataaatatggttgtacttttcttattataaaataaatgtctgtaactgctgtgcactgctgtaaacttgttagagaaaaaataacctgcatgtgggctcctcagttattgagttattgtgatcctatctcagtctgggggggaacattctcaagaggtgaaatacagaaagcctttttttcttgatcttttcccagttgttcttttcttgatcttttcccgagattcaaatgtccgattcccatttgggggcaagtttttttcttcaccttcaatatgaaaattcagcgaaattgaaagaaaaatcatctgtgagttccttcaggttctcactcatagtcatgatccttcagagggaatatgcactggcgagtttaaagtaagggctatgatatttgatggtcccaaagtacggcagctgcaaaaagtagtggaaggaaattgtctttctacgtgttttgggaaaattaattaggaatttggatgggtaaaaggtacccttgccttacttcatcttattttcttagccccctttgagtgttttaactggtttcatgtcctagtaggaagtgcattctccatcctcatcctctgccctcccaggaagtcagtgattgtctttttgggcttcccctccaaaggaccttctgcagtggaagagcctcatccagttattttcttttgttgctgctgtgtttagataattgaagagatctttgtgccacacaggatttttttttttaagaaaaacctgcagatgaaaaattactaatgaaactgtgtgtacgtgtctgtgcatgcaaca

SEQ ID NO: 684664 - DNA, 2505 bp, Homo sapiens
gccctctagctgcactcggctgagtcagtctgtcggagtctgtcctcagagcaggcagagtaaagggacttgaacgagccagttgccagattattctatttcccctccctctctcccgccccctatctcttttcacccttctcccaccctcgctcacgtagccatggcggagccatcggcggccactcagtccccttccatctcctcgtcgtcctccggagccgagacgtccgcatccggcggcagcggaagcccaggagcctgccctgccctggggacgaagagctgcagctcctcctgtgcggttcacgatctgcttttctggagagatgtaaagaagactgggtttgtctttgccaccacgctgatcatgctgctttccctggcagctttcagtgtcatcagtgtggtttcttacctcatcctggctcttctctctgtcaccatcagcttcaggatctacaagtccgtcatccaagctgtacagaagtcagaagaaggccatccaatcaaagcctacctggacgtagacattactctgtcctcggaagctttccataattacatgaatgctgccgtggtgcacatcaacagggccctgaaactcattattcttctctttctagtagaagatctggttgactccttgaagcaggctgtcttcatgtggctgatgacctatgttggtgctttttttaacggaatcacccttctaattcttgctgaactgctcattttcagtgtcccgattgtctatgagaagtacaagacccagattgatcactatgttggcatcgcccgacatcagaccaagtcaattgttgaaaagatccaagcaaaactccctggaatcgccaaaaaaaaggcagaataagtacatggaaccagaaatscaacagttactaaaacaccatttaatagttataacgtcgttgcttgtactgtgaacgaacatactcagtgtcagcttgagcctgcattccaagctttttttttaatttggtgttttctcccatcctttccctttaaccctcagtatcaagcacaaaaactgatggactgataaaagaactatcttagaactcagaagaagaaagaatcaaattcataggataagtcaacaccttaatggtggtagagcctttacctgtagcttgaaaggggaaagattggaggtaaaagagaaaatgaaagatagaacacctctgggtccttctatccagttttcagcactagtcttactcagctatccattatagttttgcccttaagaagtaatgattaacttatgaaaaaattatttggggacaggagtgtgatgccttccttgtttttgtttttttttttgcagccctcaaatcctatcttcctgccccacaatgtgagcagctactcctgatactccttttctttaatgatttaactttcaacttgatgaataacttataagtgatagtgataattcctgattccaagaatgccatctgataagaaagaatagaaatggaaagtgggactgagagggagtcagcaggaatgctgcagtggccgtcactccctctgccactatccccagggaaggaaaggctccgccatttgggcaagtggtttctacatcactggacaccagttctgagcgttagtttgagaactcgttcccgaatgtgctttcctccctctcccctgcccgcctcaagtttaataaatatggttgtacttttcttattataaaataaatgtctgtaactgctgtgcactgctgtaaacttgttagagaaaaaataacctgcatgtgggctcctcagttattgagttattgtgatcctatctcagtctgggggggaacattctcaagaggtgaaatacagaaagcctttttttcttgatcttttcccagttgttcttttcttgatcttttcccgagattcaaatgtccgattcccatttgggggcaagtttttttcttcaccttcaatatgaaaattcagcgaaattgaaagaaaaatcatctgtgagttccttcaggttctcactcatagtcatgatccttcagagggaatatgcactggcgagtttaaagtaagggctatgatatttgatggtcccaaagtacggcagctgcaaaaagtagtggaaggaaattgtctttctacgtgttttgggaaaattaattaggaatttggatgggtaaaaggtacccttgccttacttcatcttattttcttagccccctttgagtgttttaactggtttcatgtcctagtaggaagtgcattctccatcctcatcctctgccctcccaggaagtcagtgattgtctttttgggcttcccctccaaaggaccttctgcagtggaagagcctcatccagttattttcttttgttgctgctgtgtttagataattgaagagatctttgtgccacacaggatttttttttttaagaaaaacctgcagatgaaaaattactaatgaaactgtgtgtacgtgtctgtgcatgcaaca

SEQ ID NO: 684665 - DNA, 673 bp, Homo sapiens
ttttcagttcaaattctgggaaggaaacaagaggtgttgatggtgtggataagggtcctcaattatttttcttcttttgtcagtctgtaactttaaatgtcttcctggagcaaagcaggaatggctgctttggatttcaaatgagcactcaaacaattttatctggcccagaaatggacatgtttttgataagtgaatgaggagagctgatatctccatttcaaaggagctggcagaaggccaagagtcagctcttaggaacctggagggaaacactcataaagcttgctgatagccctccatggttgccttgagcctggactttgaactcttcactgctgttctaacaggtaaagccccagatgcaaatatttggtttgactctttgttactgtaaacactgcagccctcaggatgatgtgatctgtagaatttgcagctgtttgcacagatgttatcaaaacaatttcaaattctacttccttgttatttttcaagaattactagcttagctggtatttkggggaagagttttggtaaggataggtgagcaaggaggttagggaaggaaaaatgacaacaatacatggggagcccaggactctgtatacacattcagaaacaaggtcaaagagagcgtggagcaatcatccaatgaatccaaattccacat

SEQ ID NO: 684666 - DNA, 610 bp, Homo sapiens
ggagacttactcaaaagcctgctacaggaaagcaagcaagaggatggtggtcagaccagggaagtggtgagcagtggcgcctgctggattaatacatcctgtaaggcctgtagggtttcttacacatgaaatgttggggggagaataggcagatcattattacttttttttaatctctgaaagtcactttgtcagattttaaagtttatatatatatatatatatatatatatatatatatctccaattttcaagaaattaatgacctccatgcaacacatcctatttgaaggtgcggagaaagtgatacttcacagttcattttatgaagagtataaccttgaaaataaatgkgaagatgatagagtagttttagaaaataaccaactaactggatgcagattaaaacaatgtaatgaagtgttagcaaatttaccctggaggtataatcttgcatcttagctaagtagtttttatttcagaatgaagaatttggtaaaatattagaaaatgaatgactgaaattcttcctcttacattatcaaaaggttttttttttttttttacttttttaaaaaaataaaatataataactggtctttattctgta

SEQ ID NO: 684667 - DNA, 1325 bp, Homo sapiens
gattttccagctattactttctttcttcagtttagcactatgaatgggattataaatacagtgctatggtaaaataatgaataaaacatgaaacatcaaagaatagtttttgtagcccatttgacagttatacacaattccattttagctgggcaatgctgctgggaaatactttaggatatttccacaaatcagatgtttaagctaaaaggaacaaaataaaaatatgaaataaagatggtgatgataacaatgttaatcatcatcattatttcccagtaagcatttgaaataattttaaatctaatatgtcccctccctcatgtttgtatgcatcatacacagaagcctgcatgcaatgaagatagaaaacacatactgtgcaaggaagtccattctagcttaatgtttctaaaatttggctatgagtgcaaatcttgtagggaagttttctttgttacatattttaatattggctccagagccctctttcagatattttgagtcagtgagcttaagaaggagctgggaaataaatatctataaaaactgctgagaagactcaaagttggatagtcagttttggaaaccactaacttaggaccacctcttctgtagtcttcaactaaatctcctgtaagtgttttattctgaacataaataaaagcatgatcaatcacgcagaattatttgaatataaacaacatgtaatgtgagtccatgacctcaactctaggacttaaagtcactaacttgtacaagaactacttttattgtkatacaatactaccacatatgacatacaataccgctactacaaaaatactacattatttgattagttgtattgatggttactgcttgctgactcaagaactgtccaaattacttcagatcctacaaatcacctgccatcccatacatctttccctgattgctgctgatctaaatcatacagtaagatgtcaagggagtcaacatgtgccctatttagaatttctcatcggtgtagaatattttctcagtggcagttgatagtcacaactccagataactgttttgtgttttatgctgatacgtaaatcagcattttaatagtggcataaaatttatattattttgaagcattcagtattttgacaatatctaggtgattctggaaatggaaacatgtatttattttaatcatatcagaaaaaaggcagtcaaatatcttctgcatcatactgaaaacaaagaaattattaaaggtttcttctttaaatacattttaccattttgaaaacttaattaatcttcttctctatgtgttttacctcaaaatt

SEQ ID NO: 684668 - DNA, 646 bp, Homo sapiens
cgtttctaaaaggcacctatgtgttataaattattttcaaggaatatatacatgatttaaataatttattcacacaaaaaattactcacgaatttatttaattgacagatgccattgtttgtctactcagtaggcattactccattgagcacctttcttctttgcttacagttatcagagtccaagcaacttgggagtgaaagttaaatagcctaagccaattttaatgatctacttttcttgacagtgattggttgataagtgggaatatgttaaagcaagacacacttttcaatgcaaaaaaggaaatatgatcttccaggagtggagggatctctaaaaataatttctcttgaatatgtgcaatatataagcacactttattcarctcttaatgttgctatttgagtgaccaaagataaaatattgaggctgacaaagggaaaagaaaagcttctgatgacatgatagaatcattgaattaatcaatccaggaacaatatacttgagaattttttttaagtacataaaacatgtatattgcctaaataatttttgaggtgatttttctgttattgtgtctgtggctatggaaactgacaccatgttttaaggaaaaatgtgattgatcacaaattttcactta

SEQ ID NO: 684669 - DNA, 582 bp, Homo sapiens
caacctagtctaggattatctcagctcaaggtatttgctttaattagatctatagacattcttgtctgaaataatgtcaccctcacatattctgggtggtaaaatttgaaagaggtcagtattcaactctatacattattatgaactacttgtatgatagtttggaaattaaatgaactattatagtatttgacctgcaatatacctcaataaatagaatctagaatttgtgtctattactagtttagatgagtgctgccatgtttttacaactaccaaaggaatgtaacaaaatattatgaaaccactttataatataattcacttgtgctaagaagtaacaaaatacatggtataaaacataaatgctaaaagaatttaggtaaataaacattagtaatagatgattgctttttggtaggtagagatccctatagaaataaaaagtaggtacagtaaattttagagaatgaggaaggatgttgtgattgacatgaagagttctaagttttaaatctcagttgatatttatagatgtgcctgtaaatttctaattatggctgtgctatttcrtacatgttt

SEQ ID NO: 684670 - DNA, 1307 bp, Homo sapiens
cagccataaaaaacgatgagttcatgtcctttgtagggacatggatgaaactggaaaccatcattctcagcaaactatcgcaaggaaaaaaaaccaaacaccgcatgttctcactcataggtgggaattgaacaatgagaacacatggacacaggaaggggaacaccacacaccggggactgttgtgggttgtggggaggggggaggagatatacctaatgctaaatgaggagttaatgggtgcagcacaccacatggcacatgtatacatatgtaactaacctgcacattgtgcacatgtaccctaaaacttcaagtataataataattttaaaaaacataaataaataaaaataaaaataactaaaaaaaaaagcggggggtgttggctaggygtggtggctcacgcctgtaatctcagcactttgggaggccgaggcaggcagatcgcttgaggccagcagtttgagaccagcctggccaacatggtgaaacgccacctctactaaaaatacaaaaaagtagccaggcatagtggtgcaggcctgtagtcccagttactgaggaggctgaggcaggagaatcacttgaaccctggaggtggaggttgcagtgagccgagatcactccattgctctccagcctgggtgacaagagcaaaactctgtctcaaagataaatagataaataaataaataaaacgagtttaaagaaaaacaacaaaagaggatttgtagttgcattttccatctcccatccctttgggttttgttgacataggctaagttccttgttcagagtgaccccgagtgacccttcctccgtgaccacagctctcacaggatcctggtaacaagcacagggctggtaatggcttccgcccttagcaggttcttggtgccttaatatgtcttattgtttctcttaaccctgcccacacctttgtaagaaggctcttattagagtctcctcattgaattatgtttcttgatggaactctcattgctgtaatctccaacatgttggaaaatctataaattgtaacagttaaaagaacctctgttcttggacaagataccacacttataaaaagatagccctggtgtagtgctttgtagttgtttcatgtgctgtttgttaaatctcaattccgtcttacaggaaaggcaattggagtcactgggagtttaggaatttctacagggtctgtgactaattaaggttagggtggtcaagaactcagctgtccagcactctgctccagcccacattgttctgacccagcagcagccaaaggaaggtgaacc

SEQ ID NO: 684671 - DNA, 1307 bp, Homo sapiens
cagccataaaaaacgatgagttcatgtcctttgtagggacatggatgaaactggaaaccatcattctcagcaaactatcgcaaggaaaaaaaaccaaacaccgcatgttctcactcataggtgggaattgaacaatgagaacacatggacacaggaaggggaacaccacacaccggggactgttgtgggttgtggggaggggggaggagatatacctaatgctaaatgaggagttaatgggtgcagcacaccacatggcacatgtatacatatgtaactaacctgcacattgtgcacatgtaccctaaaacttcaagtataataataattttaaaaaacataaataaataaaaataaaaataactaaaaaaaaaagcggggggtgttggctaggcgtggtggctcacgcctgtaatctcagcactttgggaggccgaggcaggcagatcgcttgaggccagcagtttgagaccagcctggccaacatggtgaaacgccacctytactaaaaatacaaaaaagtagccaggcatagtggtgcaggcctgtagtcccagttactgaggaggctgaggcaggagaatcacttgaaccctggaggtggaggttgcagtgagccgagatcactccattgctctccagcctgggtgacaagagcaaaactctgtctcaaagataaatagataaataaataaataaaacgagtttaaagaaaaacaacaaaagaggatttgtagttgcattttccatctcccatccctttgggttttgttgacataggctaagttccttgttcagagtgaccccgagtgacccttcctccgtgaccacagctctcacaggatcctggtaacaagcacagggctggtaatggcttccgcccttagcaggttcttggtgccttaatatgtcttattgtttctcttaaccctgcccacacctttgtaagaaggctcttattagagtctcctcattgaattatgtttcttgatggaactctcattgctgtaatctccaacatgttggaaaatctataaattgtaacagttaaaagaacctctgttcttggacaagataccacacttataaaaagatagccctggtgtagtgctttgtagttgtttcatgtgctgtttgttaaatctcaattccgtcttacaggaaaggcaattggagtcactgggagtttaggaatttctacagggtctgtgactaattaaggttagggtggtcaagaactcagctgtccagcactctgctccagcccacattgttctgacccagcagcagccaaaggaaggtgaacc

SEQ ID NO: 684672 - DNA, 1665 bp, Homo sapiens
aatgaacaaaagattggagctgaagaccttaaatgcttgcattttgcccgttgaccagataaatagatctgcattatctatgcagcatggggtttttattatttttacctaaagacgtctctttttggtaataacaaacgtgttttttaaaaaagcctggtttttctgaatacgcctttaaaggtttttaaattgtttcatatctggtcaagttgagatttttaagaacttcctttttaatttgtaataaaagtttacaacttgattttttcaaaaaagtcaacaaactgcaagcacctgttaataaaggtcttaaaaacaaaacaaaacaaaacaaaaaaaaaactttaagcattcagaacccagatacaaacttctgcaattgcctcagcaatagtctaggtcatgtggtacccaatccagtgtttttaaaaatgctactaaactacaataaagaagcatctttaaagccttcttacttggaagaagcaaaaggccacacatcttttttctagttcttccttctattgtgaaaataactgaaatcagatgtggaaaagaatatggctgcacacagaaatgaattactttgtcagccaaygatattaaaagatgcatagaaaacattgttgaaggttagaagaaatgcgtctagaacaagagtgggaggtttgtaagacttggggatgaaaagatgttatctaaatgaatggtattgctaggttctgtttccataatgactgtagaagaactgacttcgtgagtcaataaaaaaaaaaaagaggcatgaaagaagacatattttccacagaaaatgacatcttgaaaactgaatattacctccagtggagcaggtggtttgattggagaaaaaaaaggattccaaagtcaggctgcagagttatcccatgtgtgaaattcatttagttcatttttccttaacaagctactgtggcaaagaagtagaaggcagaatttcataggacagtactcgcaaacctgaaagtgcatatgtttcacctggggatcttgttaaaatgcagattgtcattcaggagggctggcctgtcctgggattctgcatttctaacaagttcccaggcaatgccgacaccgctggtccatgaactgcacttggaatagtgagaacataaagaaatacaaaatgttagggttggtattcactttataagaataagatcattgacaatataataaaatcttcaggttatttggtatggatcatgcaaagcattttcacagagagctttgctggtcatcttgtgtccacgtcctaaagagctgtcatataagaagatgtgctgctaattttgctttcacaaaaatacaatattttccaatttctgaccttttaaataatgacaaatagttgttggtagaattctatctagcaggaaataaataaatacatctcatctatttctttatgtaaaagaggcaatttaacaatgaatgggaaagtaactgctcttccaaaagctttgtgctattgagagcattgtgaaaacagatgttttcattatgatgagtttttgttgaaatgacaaagcaccacccacaaaaactttcatattttcacactaaaaatcttggagactgaatttcctaatatttaagtcatttacatagtgaactttgaacaca

SEQ ID NO: 684673 - DNA, 577 bp, Homo sapiens
gtggctcaagtcaggctactatatcgacagcaagtcatcaaatcatgagcatgtaaaataaaaattggaggcagagagacaaccagatagaggcttcaaaagcagggagaactagtgtggatcagaacaagtgagacaacagtggttgctgtctaggagtcatcctagagctatggccaacattccaagcttacattttacatgtttatagcatgtgattttgtagacagcccagattcatgagagtgacctaggcgatagaccctgactaataaactgggattaagactactctaatccactcctgcttacactcggtcccctgtaaatgatatcaacatctaaccttgccttttcctcgttaacttggcccagtttttctgaagtgctgccagataccacartaaatcatgagagtaccaggtatttcctaggtctattctgtaatgattacctgcagaggtaggtggatgcgtgcccaaaatttggtttggatattgaaactgatgatgccacacaaaacaagggggtttgaaaaggtttggacaacataactgagtctctgaggagagcaggg

SEQ ID NO: 684674 - DNA, 589 bp, Homo sapiens
tgatggcagtatgcctcaattataggagcagatttattatggtaaatagtgagacyagaaagcatgtgtaactgtgtcatagaatgattacatccaggcattattgccagccaagattgatagtgagggggtaggcaactggtgacctttcccaaacagataggtgaatgttcaaatcctaaagaaatattcctaacagttccttcctcatgtgggtgagacgggcctctattatctgtaggaccgagcatccaagagctatcattagtgtatacctccactggggggtccagccaagttacaggccatagaagtggtggaaaaggtaaatatacccaataagtataattgttctctgtgtcagcccttgctaaaggaatactcatggcaatggtgatcactgctatcatagctatcattaaattactcattgtgattggttgttccgctttcctcaggttttcttccgccgtctgtgacagcttcttgatctgtccccaggtaggtggctgcattcgacaggtgttgctcgtgacagttggggtcctcctcagtgtcagtctcaacatggctgcaactggtgtgtgtt

SEQ ID NO: 684675 - DNA, 1254 bp, Homo sapiens
tatagtcaagttaaataattttttttcttttatggttaaagtttgatctctcttccttgtgacatccttctctactccatgttgtgtgaaatagtgaagcctactggtggtaaagaagcctttcactgatgtaagttatttaaggacacggtgctataccatggctgtgcaattattacaatatatagtaagaatgcagagtgccagctcagagtaaatttgttaaacttcatgaaaaacatgaactaaatggtcattaacattacacacttcataactggttaaacttccggctctgaggagaggtatttcacctggaaaatgtctgcatgagaatgcttaggggagacaagtaaaactgctgataaaaggtgcaagtaagttaaatatttctaactatatagtttgcctatcatagaacccgttcagtgaagttgaattcattgctgagaataaaaagccacccaaactaattggggatccctaccaacaccagaactcctctctttagccaatttgaattatttgctgtcacataagccacaactcacagatctttgagatggtaatactgtcctgtaacacatgctgcaaaagatgaaattacattttctcaagttttaattatattttctcaagtcatttataatttaagtccttaatccatctagaatttattttagcacatagaaagaggaaaggamctattttcatttttccctcagatgcataattgcttggctgtatcctcactgttaacttcattttgaaataataaaattatctaatctgtacttttaatgttttatgatgatgtaaatcccactgaatataatgttgtccatcctttacctttaactttttttttttttgagatggagtttcactcttgttgcccaggctggggtgcaatggcatgatctcagctcatcgcaacctctgcctcccaggttcaagtgattctcctgcctcagcctcacgaacagctgggattataggcgtgtggcaccaggcctggctaattttgtatttttaatagagatggggttcctcagtgttggtcaggctggtctcaaactcccaacctcaggtgatgtgcccacctcggcctcccaaagtgctgggattacagatgtgagccaccacacccggcctacttttaacatttttgtatcaatttatgtttcctgtaatacataaatattttcacctaatgaatttgtctttcaacagaatttaatccatttagttata

SEQ ID NO: 684676 - DNA, 1254 bp, Homo sapiens
tatagtcaagttaaataattttttttcttttatggttaaagtttgatctctcttccttgtgacatccttctctactccatgttgtgtgaaatagtgaagcctactggtggtaaagaagcctttcactgatgtaagttatttaaggacacggtgctataccatggctgtgcaattattacaatatatagtaagaatgcagagtgccagctcagagtaaatttgttaaacttcatgaaaaacatgaactaaatggtcattaacattacacacttcataactggttaaacttccggctctgaggagaggtatttcacctggaaaatgtctgcatgagaatgcttaggggagacaagtaaaactgctgataaaaggtgcaagtaagttaaatatttctaactatatagtttgcctatcatagaacccgttcagtgaagttgaattcattgctgagaataaaaagccacccaaactaattggggatccctaccaacaccagaactcctctctttagccaatttgaattatttgctgtcacataagccacaactcacagatctttgagatggtaatactgtcctgtaacacatgctgcaaaagatgaaattacattttctcaagttttaattatattttctcaagtcatttataatttaagtccttaatccatctagaatttattttagcacatagaaagaggaaaggacctattttcatttttccctcagatgcataattgcttggctgtatcctcactgttaacttcattttgaaataataaaattatctaatctgtacttttaatgttttatgatgatgtaaatcccactgaatatawtgttgtccatcctttacctttaactttttttttttttgagatggagtttcactcttgttgcccaggctggggtgcaatggcatgatctcagctcatcgcaacctctgcctcccaggttcaagtgattctcctgcctcagcctcacgaacagctgggattataggcgtgtggcaccaggcctggctaattttgtatttttaatagagatggggttcctcagtgttggtcaggctggtctcaaactcccaacctcaggtgatgtgcccacctcggcctcccaaagtgctgggattacagatgtgagccaccacacccggcctacttttaacatttttgtatcaatttatgtttcctgtaatacataaatattttcacctaatgaatttgtctttcaacagaatttaatccatttagttata

SEQ ID NO: 684677 - DNA, 1254 bp, Homo sapiens
tatagtcaagttaaataattttttttcttttatggttaaagtttgatctctcttccttgtgacatccttctctactccatgttgtgtgaaatagtgaagcctactggtggtaaagaagcctttcactgatgtaagttatttaaggacacggtgctataccatggctgtgcaattattacaatatatagtaagaatgcagagtgccagctcagagtaaatttgttaaacttcatgaaaaacatgaactaaatggtcattaacattacacacttcataactggttaaacttccggctctgaggagaggtatttcacctggaaaatgtctgcatgagaatgcttaggggagacaagtaaaactgctgataaaaggtgcaagtaagttaaatatttctaactatatagtttgcctatcatagaacccgttcagtgaagttgaattcattgctgagaataaaaagccacccaaactaattggggatccctaccaacaccagaactcctctctttagccaatttgaattatttgctgtcacataagccacaactcacagatctttgagatggtaatactgtcctgtaacacatgctgcaaaagatgaaattacattttctcaagttttaattatattttctcaagtcatttataatttaagtccttaatccatctagaatttattttagcacatagaaagaggaaaggacctattttcatttttccctcagatgcataattgcttggctgtatcctcactgttaacttcattttgaaataataaaattatctaatctgtacttttaatgttttatgatgatgtaaatcccactgaatataawgttgtccatcctttacctttaactttttttttttttgagatggagtttcactcttgttgcccaggctggggtgcaatggcatgatctcagctcatcgcaacctctgcctcccaggttcaagtgattctcctgcctcagcctcacgaacagctgggattataggcgtgtggcaccaggcctggctaattttgtatttttaatagagatggggttcctcagtgttggtcaggctggtctcaaactcccaacctcaggtgatgtgcccacctcggcctcccaaagtgctgggattacagatgtgagccaccacacccggcctacttttaacatttttgtatcaatttatgtttcctgtaatacataaatattttcacctaatgaatttgtctttcaacagaatttaatccatttagttata

SEQ ID NO: 684678 - DNA, 1254 bp, Homo sapiens
tatagtcaagttaaataattttttttcttttatggttaaagtttgatctctcttccttgtgacatccttctctactccatgttgtgtgaaatagtgaagcctactggtggtaaagaagcctttcactgatgtaagttatttaaggacacggtgctataccatggctgtgcaattattacaatatatagtaagaatgcagagtgccagctcagagtaaatttgttaaacttcatgaaaaacatgaactaaatggtcattaacattacacacttcataactggttaaacttccggctctgaggagaggtatttcacctggaaaatgtctgcatgagaatgcttaggggagacaagtaaaactgctgataaaaggtgcaagtaagttaaatatttctaactatatagtttgcctatcatagaacccgttcagtgaagttgaattcattgctgagaataaaaagccacccaaactaattggggatccctaccaacaccagaactcctctctttagccaatttgaattatttgctgtcacataagccacaactcacagatctttgagatggtaatactgtcctgtaacacatgctgcaaaagatgaaattacattttctcaagttttaattatattttctcaagtcatttataatttaagtccttaatccatctagaatttattttagcacatagaaagaggaaaggacctattttcatttttccctcagatgcataattgcttggctgtatcctcactgttaacttcattttgaaataataaaattatctaatctgtacttttaatgttttatgatgatgtaaatcccactgaatataatrttgtccatcctttacctttaactttttttttttttgagatggagtttcactcttgttgcccaggctggggtgcaatggcatgatctcagctcatcgcaacctctgcctcccaggttcaagtgattctcctgcctcagcctcacgaacagctgggattataggcgtgtggcaccaggcctggctaattttgtatttttaatagagatggggttcctcagtgttggtcaggctggtctcaaactcccaacctcaggtgatgtgcccacctcggcctcccaaagtgctgggattacagatgtgagccaccacacccggcctacttttaacatttttgtatcaatttatgtttcctgtaatacataaatattttcacctaatgaatttgtctttcaacagaatttaatccatttagttata

SEQ ID NO: 684679 - DNA, 1254 bp, Homo sapiens
tatagtcaagttaaataattttttttcttttatggttaaagtttgatctctcttccttgtgacatccttctctactccatgttgtgtgaaatagtgaagcctactggtggtaaagaagcctttcactgatgtaagttatttaaggacacggtgctataccatggctgtgcaattattacaatatatagtaagaatgcagagtgccagctcagagtaaatttgttaaacttcatgaaaaacatgaactaaatggtcattaacattacacacttcataactggttaaacttccggctctgaggagaggtatttcacctggaaaatgtctgcatgagaatgcttaggggagacaagtaaaactgctgataaaaggtgcaagtaagttaaatatttctaactatatagtttgcctatcatagaacccgttcagtgaagttgaattcattgctgagaataaaaagccacccaaactaattggggatccctaccaacaccagaactcctctctttagccaatttgaattatttgctgtcacataagccacaactcacagatctttgagatggtaatactgtcctgtaacacatgctgcaaaagatgaaattacattttctcaagttttaattatattttctcaagtcatttataatttaagtccttaatccatctagaatttattttagcacatagaaagaggaaaggacctattttcatttttccctcagatgcataattgcttggctgtatcctcactgttaacttcattttgaaataataaaattatctaatctgtacttttaatgttttatgatgatgtaaatcccactgaatataatgttgtccatcctttacctttaactttttttttttttgagatggagtttcactcttgttgcccaggctggggtgcaatggcatgatctcagctcatcgcaacctctgcctcccaggttcaagtgattctcctgcctcagcctcacgaacagctgggattataggcgtgtggcaccaggcctggctaattttgtatttttaatagagatggggttcctcagtgttggtcaggctggtctcaaactcccaacctcaggtgatktgcccacctcggcctcccaaagtgctgggattacagatgtgagccaccacacccggcctacttttaacatttttgtatcaatttatgtttcctgtaatacataaatattttcacctaatgaatttgtctttcaacagaatttaatccatttagttata

SEQ ID NO: 684680 - DNA, 583 bp, Homo sapiens
ctggacatcatcctcgtacacaaggaagctcttaccaaagtcacggacaacaggcaacatgtggcagaagggaagacagaggtacagaggctgatggtgtcattatcacaggaacaggatttctttggccactttggctgaaattcaccacttccatccaattcactcaagtgagagacttgaaatcacagatggagcatttcttgcaacaagagatactattttttcaaaaagtcacctaaaatttgatagtgttgaataactagttattcgattgtgaactttttccagttcacaggtactttctacagcagaatgataacagtatcaaagagctagtgccagctatcggtrgtagtacaaggatgattttgtgctcaagtgaaacccagctgaatatagaattgtgtaggatagtgttaatatggtgatagaatagaaacagcagcaaatgaactaagtcatactatgaatgcctacactaccatggtaactttttgaagaatgataataccacttactttattgccttttgaagtaggaatattttagtggatatgctatagacctcaagtcctataaa

SEQ ID NO: 684681 - DNA, 641 bp, Homo sapiens
cttagaaggctagctagaagcagaagcaaatctagcctggagtaggcaaccttctctaagatgtgctttgcgggcaacaaggcaaatctcctggctcctaaatcgttctcattatttgctggaactactgaaattccactttcagtcttccttttctttgggtctggaaaggttttcagcctcagaggcccctttggaagagaagtgccayaaaccatcactgatggggattaggagacattcggcaaagggaacagggttgaagcgagatctcctgaaagtagaaggaggagggcaggccacttcagggaggagggaaagaagggtcataggcagcaaccacaggacacaaacccactgcacaaatccgcttacagcaggcctcagggaactatgagccacagtcttgccaagaattataagaaaaattccacaaaagtttccccttttgctacagtttttttgttttgttttgttttgttttgtttttgagtggagagtttcttactttctgaattagtctgtgcttttctctttaatttacttggaaactgtggcatctgccttcagcaaatatacttaaacttctcccacattcacacacttctccaatatcaaatacatgctcagacttaatgaaa

SEQ ID NO: 684682 - DNA, 647 bp, Homo sapiens
attgtgcttattacrtaatttaccaggtatccttgaaaaagttacttaacatccttaggcttagattttatcatctataaaatggttccttctttcagattatggtgaagacctaaatgaaacaaatatgtgagagtgcttgttggtcagaagatgttccataaatgatagtcttccctttccagataaaatgagaagaattcagcttttctcaacactttaaaattctcagttaaaaacctaaaactgggagaaagaaaatctagaactgaaacaaatgaagctaattgtatttcaaatgaatatcatagccattagtcagtgggagaaggacgcaggaaaaagaaaaaagaacaaactaatacaagtaatctgtgaataatgtatttgactatatacattccatcttaggcagggttgcagagtagggatttgcaaacaatccagaactcttttatcaagttttttttttattatagtgatatgaaaaaagcattctaaaactcttataggtgtattaaaggactggatataaataatgtattggtggtcttaggaaccagggttctcactataaaagaagagacaaatatgaaatcaggaaagaaagaacaaaccctgtgagaatggattagaattagaggtat

SEQ ID NO: 684683 - DNA, 1151 bp, Homo sapiens
ccatgttcatgaatcataagagttaacattgttaaaaaatggccgtaatatccaaagcagtctacagattcaatgcaatccctaataaaataccaatgaccttcttcacaggaataggaaaaaaaatcctaaaatctgtatggaaccacaagactccaaaaagcaaaagcaatcctgaacaaaaataaagctggcggaatcacactactaaatttcaaaatatactacacagctatagtaaccaaaacagcatggtactggcataaaaacagaaacacagaccaatggaacagaacagataacccagaaattaattaacatatctatagccaatcaatttttggaaaaaaaaaaatgccaagaacattcattggggaaatgccaagaacattcattgatactactactgagaaaaaaaatcagtatttacattccaatagtaagaatatagtttgtcacaaatttctttgtaaatggagggggaggaagaccagaattcattagtttcttgacaaactttacttcccaaaattaataaagcaccatctgcatcacaataccttattcatctctcttgcaaaatcaatctttcttcccaaaactaaaactgatttctgcctacaaaatgtcattttaagaaaacaagaacaggaaagtcctggaggctcacacctgtaatcccagcactttgggaggcagaggcgggaggatccttgaacacaggagtttgagaccagcctrggcaacaaggcaagacctcctctctacaaaaataattagccaggcatagtgacacgagcctttggtcccagctacttgggaggctgaggaccacctgaccctgggaggttgaggctgcagtgagccataatctcaccactgcacttcagcctgggcgacacagcaagaacctgtctcgaaaaaagaaaagaagaacatatgagataataaatgatctgaggaaattagtattttattatttaatagtttaaatgtttaaatgcatatacattaataagacccagaatttttttaaaaacacacttaaatatttcataattagagatggcataaaacttttaagtcatctgagaagagagcttcccttatgttttatcagaccactgctgtattttggtacatttgacttc

SEQ ID NO: 684684 - DNA, 1151 bp, Homo sapiens
ccatgttcatgaatcataagagttaacattgttaaaaaatggccgtaatatccaaagcagtctacagattcaatgcaatccctaataaaataccaatgaccttcttcacaggaataggaaaaaaaatcctaaaatctgtatggaaccacaagactccaaaaagcaaaagcaatcctgaacaaaaataaagctggcggaatcacactactaaatttcaaaatatactacacagctatagtaaccaaaacagcatggtactggcataaaaacagaaacacagaccaatggaacagaacagataacccagaaattaattaacatatctatagccaatcaatttttggaaaaaaaaaaatgccaagaacattcattggggaaatgccaagaacattcattgatactactactgagaaaaaaaatcagtatttacattccaatagtaagaatatagtttgtcacaaatttctttgtaaatggagggggaggaagaccagaattcattagtttcttgacaaactttacttcccaaaattaataaagcaccatctgcatcacaataccttattcatctctcttgcaaaatcaatctttcttcccaaaactaaaactgatttctgcctacaaaatgtcattttaagaaaacaagaacaggaaagtcctggaggctcacacctgtaatcccagcactttgggaggcagaggcgggaggatccttgaacacaggagtttgagaccagcctaggcaacaaggcaagacctcctctctacaaaaataattagccaggcatagtgacacgagcctttggtcccagctacttgggaggctgaggaccacctgaccctgggaggttgaggctgcagtgagccataatctcaccactgcacttcagcctgggcgacacagcaagaacctgtctcgaaaaaagaaaagaagaacatatgagataataaatgatctgaggaaattagtattttattatttaatagtttaaatgtttaaatgcatatacattaataagacccagaatttttttaaaaacacacttaaatatttcataattagagatggcataaaacttttaagtcatctgagaagagagcttcccttatgttttatcagaccactgctgtattttggtacatktgacttc

SEQ ID NO: 684685 - DNA, 580 bp, Homo sapiens
cctttgcgcttttgcacrtactctttcaactgcctgaaatccacccctaccacacatcccctgtcacctggcaaactcctatgaatccttcaaggtcccgtagaaggatgatgcttttccaggcctccaggacccaagcacatatgtttaataactctgttgtgatattgagcacatcaaattaccatctaactacacttctctattggctgcaacctcttcaaagttgggcatcacatctttgtgtcctcattgcccaggacgatgcctgacatataaagctcaataaatttttgctgaatttaaatcacaaagcaagttcttcctgcactgattccacactcaccaagcaacagttggataatttgacttccccggcagctcctgccgatggagtgaatgcgtgttcggtcagacagatgtgagtgtctgggccacatgacagtgcatttatttccagcttaaattaataaataggagtcctggtttacatacaatttgttgaataaatggcttgcctatggtcatagctcaattatccaaatacagatgatcctcccagcctattatttgcagactg

SEQ ID NO: 684686 - DNA, 635 bp, Homo sapiens
tctaaccaaaaccaaccactcttttcgatggatgcagacatggtcagaggaaatttagtgatgcttccagtaacaacagtgtttctagctaaacaaaggcaaggctgtgctgcaaccataaaatgactcacatccccttttctgagtgatctctgcttccttgcaatgacaatgtgattttagttttcattgtccctgcttctgggggacatcattgagatacccattatcgaattgcctctcttctctgatagcacccaacttactttcataatctgttctcagagccctccaacacttgtccagagtccataagaagccccttctagtttcactttactaagatgctcctaatggttccctgggtatgttctccgttgccatagcaagctaaataaaaaaactgtgtatgttgtgtgattataggtgtttttttgatatcaattgattggtgagttttggcggatgtcaacaatacaagactaagccaggtgtggtggttcaaatctgtaatcccagcactttgggaggttaaagcaggaggattgtgtaaggctaggagtccaagaccagcctgggtaacatagccakgccccatgtctacaaaaattaaaaaaaaaaaaaagtccagtgca

SEQ ID NO: 684687 - DNA, 656 bp, Homo sapiens
caaaactgttaaatgctctgctggtttctcttatctccgcagtgtctctttgcctgggcgtaacctagattctaaggctctttctctatacgcagaaccattaaatttccccagggaattaatggctgaaacatgttttctgacttctctaccattgtttcttccagtctgggttactttagcagttctctgatgttttaaacatttaaaaaaaaaaaaaaaaaaagagagagagagtgatccaaatgttttgatttttctcagcaagagcaatggtcggctccaaactaccctaacttgaaattaaagttttcttcagctttttaacctatggtcatctctttctctctctcggcattttttgtttgttaaaaattgaccatttttctatagaatttctcccattctcagttttctgaccacttctctatggttttgtttaacataatttactgtttctcttattatcttgtgaaagtttrtaagacctattggcttgaggagatttaggtttgacatttggcaaggatattttgtaggtgatgctaaatactcctactgcattataacaagagacccacaatgtcagattgcttattttaataatgctcaggttgatcagtggatttaggtgttttcactatggtctatccatt

SEQ ID NO: 684688 - DNA, 648 bp, Homo sapiens
atggagttgaaatatctaaattaaattcccagcttggacctgtactagctctctaaacttcagtatgcccctcaactttctgaacctcatccgaatgtgtgaataatgatgtctgagtctsagaactgatatgaggccaaggtggaataagaaatgttcccccaaaattcatgtactgaagcccaaacccccaatgtgactatatttggagaagggacttctatggaggtaattaaggttaattgagatcataaatgtggggctctatcaacgggattagtgaccttataagaagagatgtcagaaaattcacatgttctttttccattcttctctctccctccatctcctttttcctctccctctcttacccctctcttctctccctctttccttccctctctttctctctctttctccctccctctctctacctttccccctgacacacgtgaggatgtaccaagagagcccttgctagaaaccaatgctgccaggccttcatcagggatttttcagcctccaaaactgtaaaatatataatacacaggtaactactaagcacaagacctggcatatattagataccatgtcaatatatgtgccagccctccttccttgcttaaccctccatatgttaagcatttt

SEQ ID NO: 684689 - DNA, 648 bp, Homo sapiens
atggagttgaaatatctaaattaaattcccagcttggacctgtactagctctctaaacttcagtatgcccctcaactttctgaacctcatccgaatgtgtgaataatgatgtctgagtctcagaactgatatgaggccaaggtggaataagaaatgttcccccaaaattcatgtactgaagcccaaacccccaatgtgactatatttggagaagggacttctatggaggtaattaaggttaattgagatcataartgtggggctctatcaacgggattagtgaccttataagaagagatgtcagaaaattcacatgttctttttccattcttctctctccctccatctcctttttcctctccctctcttacccctctcttctctccctctttccttccctctctttctctctctttctccctccctctctctacctttccccctgacacacgtgaggatgtaccaagagagcccttgctagaaaccaatgctgccaggccttcatcagggatttttcagcctccaaaactgtaaaatatataatacacaggtaactactaagcacaagacctggcatatattagataccatgtcaatatatgtgccagccctccttccttgcttaaccctccatatgttaagcatttt

SEQ ID NO: 684690 - DNA, 648 bp, Homo sapiens
atggagttgaaatatctaaattaaattcccagcttggacctgtactagctctctaaacttcagtatgcccctcaactttctgaacctcatccgaatgtgtgaataatgatgtctgagtctcagaactgatatgaggccaaggtggaataagaaatgttcccccaaaattcatgtactgaagcccaaacccccaatgtgactatatttggagaagggacttctatggaggtaattaaggttaattgagatcataaatgtggggctctatcaacgggattagtgaccttataagargagatgtcagaaaattcacatgttctttttccattcttctctctccctccatctcctttttcctctccctctcttacccctctcttctctccctctttccttccctctctttctctctctttctccctccctctctctacctttccccctgacacacgtgaggatgtaccaagagagcccttgctagaaaccaatgctgccaggccttcatcagggatttttcagcctccaaaactgtaaaatatataatacacaggtaactactaagcacaagacctggcatatattagataccatgtcaatatatgtgccagccctccttccttgcttaaccctccatatgttaagcatttt

SEQ ID NO: 684691 - DNA, 621 bp, Homo sapiens
ggtaccaacagagttttaaatactgacagtgatgagcccggaacgaataccgaatatgcatgttattttcaggagtgtgttgaggcattccaagtggcataaaaaataatgtgtacatagcttgtaaacgtggaagtttattatatgaggataagttaattcaattcaataagtaatttaattcaatgcactttggatacattggagggaaaaacagtcaaaaaattttactcatggatcttatatcctagcaagggagaccaccaataaataatagatatgataaacaattgtgtggtgtgttagaaggttacaaatgttttggaacaaaagaaaaagtagagggmaaagggtaatcttgaatagtagtggtgtgggctgttgccaagttgcagtttttaaaatgatcaaagtctgcctcattgacaaggtgagatttaaacaaaggcttcaggagttgagagagttggccaagcaggtgctggggaaagagctttccaggcagaggcaacacctagagcaaaagtccaaaggtgagagcgtgcctgatgtgttcaaggaagaccagggacataagtgtagctctccagggtagtgcaagcagggaagagctgtagaaaa

SEQ ID NO: 684692 - DNA, 637 bp, Homo sapiens
gataccgtaaggactccatttaaataacaccaccygctacctttctttttttttaatagtaagtaagtattgttctacttgagcttcactgaaaccctgtaagataaaacagtttgctaactcaaaagcattttataaatgttacatcatagtataaaatttcacaatccagtaagcagcatcctacctgtccagtgtctaccagaaggaatatggcaatataagtaagaaacaaataactacttgtctaatattaatttgttccttacttataaatgttcatccaatatctattgctcaaccaaaaggcaacagtccttgtgctgcactgtacagacagcaaaggagattaaggatgttgtgggttggcaacaaaatttaggcacttgcaccttaaccgtagttagtaagttccatgaagagatgacctttggctgttatatattcccatgcatatcattcccatgcagtgtttcacacatagtgggctttaataatatatatttttcagttttaaatgaatgcataataaggagagagatatatataaaatcatccttaagatcttattataaggataggataaaacaaggaaacatattataagcaatcacaacacaaaataaccaagaaatgg

SEQ ID NO: 684693 - DNA, 637 bp, Homo sapiens
gataccgtaaggactccatttaaataacaccacctgctacctttctttttttttaatagtaagtaagtattgttctacttgagcttcactgaaaccctgtaagataaaacagtytgctaactcaaaagcattttataaatgttacatcatagtataaaatttcacaatccagtaagcagcatcctacctgtccagtgtctaccagaaggaatatggcaatataagtaagaaacaaataactacttgtctaatattaatttgttccttacttataaatgttcatccaatatctattgctcaaccaaaaggcaacagtccttgtgctgcactgtacagacagcaaaggagattaaggatgttgtgggttggcaacaaaatttaggcacttgcaccttaaccgtagttagtaagttccatgaagagatgacctttggctgttatatattcccatgcatatcattcccatgcagtgtttcacacatagtgggctttaataatatatatttttcagttttaaatgaatgcataataaggagagagatatatataaaatcatccttaagatcttattataaggataggataaaacaaggaaacatattataagcaatcacaacacaaaataaccaagaaatgg

SEQ ID NO: 684694 - DNA, 637 bp, Homo sapiens
gataccgtaaggactccatttaaataacaccacctgctacctttctttttttttaatagtaagtaagtattgttctacttgagcttcactgaaaccctgtaagataaaacagtttgctaactcaaaagcattttataaatgttacatcatagtataaaatttcacaatycagtaagcagcatcctacctgtccagtgtctaccagaaggaatatggcaatataagtaagaaacaaataactacttgtctaatattaatttgttccttacttataaatgttcatccaatatctattgctcaaccaaaaggcaacagtccttgtgctgcactgtacagacagcaaaggagattaaggatgttgtgggttggcaacaaaatttaggcacttgcaccttaaccgtagttagtaagttccatgaagagatgacctttggctgttatatattcccatgcatatcattcccatgcagtgtttcacacatagtgggctttaataatatatatttttcagttttaaatgaatgcataataaggagagagatatatataaaatcatccttaagatcttattataaggataggataaaacaaggaaacatattataagcaatcacaacacaaaataaccaagaaatgg

SEQ ID NO: 684695 - DNA, 576 bp, Homo sapiens
gcgcccaccaccacgcccagcatttttgtattttagtagagatggggtttcaccatgttggccaggctggtcttgaactccggacctcaagtgatccacccactttggcctcaaagtgctaggattacaggtgtaagccactgcacctgctttaagatctttaaagttctgtccatgttagaactcagaattattttaaacacattcagattgaacacagtctcctttctcatcaaaatagcatggaagccaatgaatggctattgccggsttatggtgactttaactttactctagaattaagatcctgaccgctatgctcctttttgtaattgagtgagagaactttccaagagttgatttgttaatttttcctactattaaaaggctgaaagaagaggccataaagttcacaatataaacatgccaacaattcttgtaagttatcctgataagcacttttttatcctgacctttggaaaccagcctgagaacaaatagtacacaaagcagcaagatggggaagaactgtggataatgtccaagtcacccttcctcctgttactgaaggtaaca

SEQ ID NO: 684696 - DNA, 473 bp, Homo sapiens
ttttctttatttactctgcctagagggaggtgacacaaattatatcttgaatgagtttgatggagaaacaaagaaacaaacaaacatttgtggcccagtctttcctcttcttttctcttagagtgaatccaagagaaaatcctctgcacttcttctgctttgctcacccacctcttaaatattaaaggggataattcccacctggagtgacctgtcctgtttttgtactgctgcaattatgtgggtccatctcttaagatttgagggttggtgtcaggaagacaactttcttgcatatataaacaatatcttacatcagccccatcagtgaatatttgctacccatcgactgtctctcttgtccaattcctyagttgtttagaatttgggtggacaagaggcatggtactcattaaccccagatctaagagtaaggtcttaaaactcaatttatatacaaacattttataact

SEQ ID NO: 684697 - DNA, 3471 bp, Homo sapiens
tcccgtatcagcctcttgagtagctgggactacaggtacatgccatcatgcccagttaatttttcaaaaaatttatgtagagacaaggtgtcactattttgcccagcctggtctcaaactcctgggctcaaacaatccacctgcctcagactcccaacatgctgggattacaagtattaaccactgcttttggcctcctattgccatagtcttgaataaactcttccttgctatttttacctagtgtctattatgatttttcttttaaagctgtcaacatttctttgaatttaagaattaaagtcatgttattcaactatattttttaaacatctcatcatgggtaaattcaaaacaatattttgctgcctttattagaaagttagaaatgataatgacacagacatagctgattaaaacttaatgagctttgagggaaatcataaatgttcccttttgattataagaacatctttcctaatgatgtaagatgcttttttaaaagaaatactgtgagttcaaaaatagcacaaaggtggtaaaattgttctctatatttgagaaaatctttcatgatcgcattttccctaatctttttcaagtcattaatgttaaaatagcatctcccagaaaaaaagtcaatcaacatgggaaaagtgagggaattagcttggtgactttccagttaacctgcctttaatacatgatattgagattttcttggatggttggatattacacattcttagtgtgatcaaagaaagatataatttataatcatacctttttgacattctgtatactctgcctgtataggaaagactttgtatttcaagggatatatctttagttcaattaattaaagctttgtcctttgttggaggggtatgtattgaggtatattttataatatttctggagaaaaacttgtttgttcaaaataatgtgtccttttgcaccaactaactacaacaaaactccttaaaatttatttttttctttaattcttaatgcccatgaaataaaatagagatataacttaaagaacctaacagattaaagtagctcttaattttaaattgagctaatttttagcttccaggctaataaactaagaacaacaaacaggatactaaacgccgaatgaaacactacttttgataataagaaaaatcctatgccattacttacattttttcctcagagctttgttgcagaagtcaaactttttggtttgtttgtttccctcatgatctcttccctgcagagaaaagctgcaggagtttgcctaaaagatttgtgatcttcaggctcaactacaagccctgcttgaatagctttctccttgttttttctctgcttagcaaatatgaagctatcaccatctttaagaatctgaagagactccctcccacttcttaatacttatgttaatttatttgttgattcattaccctcaaatatatgtactgattgctaattgtgtgcagagtgctctgttatgcaccacagaagttgaaaagatgaaaacacatgcaccatctgccctcaagttgtagtttggaaactaaatcttgtataaaaattaagatctataaataactaaagtacatgacagaaagtgataaattccatagaagaaaaatcaataaagtgataccagagttctagttttggaaaggttgtaaaaaacatgaaatcagggatggtttcagaattctatctgcggcctaaaggacataaaggatttaactgagagagagcgagagtaagtatgttttataaatttccagatggtgaacatcatataaaaagagtcgagaagatcagaaagtaaaaagtgaaggatatatttctgaaagtaagacagacttggtgaagggaaatggtagaagctagatgggtaagaggttaaaattataacaagtcttgatcgcatagtagccaatgaatggagaagcttttaaatatcaagcagaagaacagcatcagagtggcattataaagacattctttgtcataagtttaaaagcatattggaagaagggaatgtccattggcaagacaagcccctaagcacacaaatataatgatctgggtatgaagcaatttcatctataagcatgatagcatcagaatatgttgaggaggtgaaatatgtaaaatatgatcactgattggacattaggagtaagccagagaacagagaatattagatgaccctaatttagcctggtgcytagggtgccttgtaacatagatggctggctctagtgttagggtcaacactatgatggttcttcaagaaacaaaaaactaaataaacttattacacaatctagcaataccacttctgagtataatacatatccaaaagaattaaaagcagaatctcatggacatagttgtaaattagtgttatagcaacattattgtcaatagacaaaaggtgaaaacaatcgaaaaggtcatcagtcaataattggataaactcttaataaatatggtatattttataatgaaatattatttagccacaacagggaaggaaattctgacacaaaccagatgaataaaccttaaggacgttatgccagatgaaataagacacaaaaagacaaataccaagtgatttcatttatgtgaaatccagagtaatccaacttacaaacttacaaaaacagaaagtagaatgatgattgccagtggtggcgggttggggggtgaataaatgggaaattgtcgtttaatgggtgtagagtttcaattttgcaagctgaaaatattctggagattagttgttcaaaaatgtaaatatatttaacactactgaactatatacacttaaaattgttaaggtggtaaattttatgttacatatgctttattgcaactaaattttttaattaaaaaagaaaaggaaagaaaaaatgaaagatgaagaaagaaccacagatacactcgtatatttaatcagaattatttcttcaatacagtgaatagtggagagagaatgtcaaacagaaatgacctttaaaaatgaccaggatctattaaacagcaacacaaataaggaagagaaaatttgatctatataagagtaggtagtaatattttaacaaatggataaaattaattgttggatcctgtcaaacaaaggttttcatagttcccactccgtgggtatgagcacagtgttatagaaggccagacttccagtcttggcttctgataccttctatttataagaccttgtaaaagtcacttaatgattcaaaacaatttatcagtaatacctgcttatatcataggattattcagaatttcaaaaatacatttattagtgttttgcgtacaagaaaggcaaatattattatcatctgccgacctccttgatgggttttgtgtaaacaatgataattgctaggttaattgctgcaggggattgccagagactgtcaaaggtgggca

SEQ ID NO: 684698 - DNA, 1044 bp, Homo sapiens
cacagtggacatatttaatgtcccttaatgataagggagtcatatatcctattttgcctttctcaaaatggatttctacttaaaagaaaccagatatagacacagtgcttgtcaaagacacaacaatttatagtctcacttaattcctgttttaaataatgaataattttatctacaactcttccagacattgttgctatcattccctccaccatatcatgggttacagtttattaaagagtgagcagtttcctaagccatctaatgaagccctttgcacctttakgatttccttggaatgccttccttgatttgtgatatccacagtctgatttatccttccagtcttaagtcagacctcacttctactgcagcttgtactaatttttaagcaataaaacatttccttctttgggctcttctaatgttttttccacactctataatagcatttaaaaatattattgaactagtttctacatcacttttttgtttcatagactcagagtttgacttatagacccttagcattatggcctgcatattatggaaattttcacaatgtttttatgaatgaatgtatacattttttatagtttgacattggaaagtagcttacaagtaaagctagagtgcttgaacataattttcagcttatatgtgtgctgcttacaaacatacatatattttaagtccataggattaaaaaaaatgtgatgaccattccaagtactataattccatttccttagctttactcatacttgtatctgttcaacaagcattgatcatccattatgtgccaaacactgcattctactaatgatgcagcagtgaacacaacagggatatccttcactttaatgtaccatattttagaggcagaatataagcaaatgaatacgtgatatgtaatattagcccaagaaatgcacagctcttttgattaagtttaatggacaattcatttgaacttactttctaaagactgaaatttaccgaaagtaagaacaaaaattacctgaaaagtatttttttcctaca

SEQ ID NO: 684699 - DNA, 894 bp, Homo sapiens
tggacttcttaagtttgaagttcaaaagagtagtacatgctcaaaattttttttttttttttgagatggagtcttgctcagtcgcccaggctggagtgcaatggtgcgatctcagctcactgcaacctccacctcccaggttcacgccattctcctgcctcagcctcccaagtagctaggactacagcacccgtcacgatgcccggctaattttttttgtatttttagtagagacagggtttcaccatgttagccaggatggtctcgatctcctgacctcgtgatccacccaccccggcatcccaaagtgctgggattacaggcatgagccactgcgcctggccagtatatgctcaatttcaaaccagagacttggaggagcaaaggtcaagaaattatctttttctatgcggtaggtgtcttatccctttgtgtatcatgaacatcaggtgggaagtcacctgaagactatarggacatggactacaggccatgggtaatttaattgtcaacaaatactcatgggaatagacttcttggcatattctggaagaagcagcatttctgttggtgttttaggaactgccaacaaatcatatctctacaagaagcctagtttctaccagttaactttaactggaggagtcatcaacacctgagaaatttatcaaatgacttggccttgcagaattctgcaagctccttaacaggcaagggtatttcaaagggcaaggcaagttccatttttggaaattgcccttggattggagagaggtaattggagtttaaatgcctacagcaatcttccaagacacaggtgctatttttgatagcactatggaactgtacaaaactatacaaacaacattatgactctgcactttaggcaccaat

SEQ ID NO: 684700 - DNA, 1843 bp, Homo sapiens
tgtaatcagcattgcttaaatattgttagatctaatgtgatcttctgctcttaaaactcaagtacatctaagggcattgagaatggaaagtctgagttctggtactagacaagagcagccctttaggccaggcgcaatggctcacacctgtaatcccagcactttgggaggccaaggtgggtgggtcacttgaggccaggagtttgagactagcctgggcaacatagtgagtacccttctctacaaaaaacaaaaaaattagctgagcatagtggtgtgcacctgtggtcccagctacttgggaggctaaggagggaggttcactggagcccaggaggtagaggctgcagtgagctgtgatcttaccactgcattctagcctgtgtgacagagtgagaccctgtctcaaaaaagaaaaaaaaaaagtagccctttagttaggattctagctcataacgctgcatactaccagtttctaagagaaatactagcttgctggattctattttccacttgttgttcagcctcattgagcaatgaaacagaataacaagattccaatataattttcagccaaatccaaaggcaaggcagaaatattcatttaagtatatagtccatagtactctgtggtccctgcaaagggcttcatgatcaattgcatagtgttaatttttgcgcagtgtaataatcctcgaacatccttgaagtctctggtgcttttcccttggaacaaaaggcaatgacaaatagatcatggctttcactaaaggatatttccttcttcatgtaagtcctaacccagtaactgcgtgggctctcagccaggtaatcagtcaaaaagtctttttttgaggactctctgtagaatacagaattaagcagcaaatcagacctgtgtttgcctaaatttttccttgcttataaaaaatttaccagctaagtattatgtaatgtcaagtaccgtaaatcactccatgaattaggaagctttgggaaaagtggaaaattttgtggaaaacaggtccactaacatcctaaacagctactgcagaagtatagttaagatgtgatatataatatattgtgatcttcaagacattttatttatctaacatgacatggaaacacattattatgccattaaaaattgaaggcattgtaggaattcatctgatatatctgatgcacttgatctgataaatccacttgaggctgctaggagtgttgaagatttcctatttacatgtggcttcagaaggctgatcccatagcgaggaacagtgtcaccagtaccctcctgagagtggaaaggcaagaatatttctcatgstctttcttattttgggtcatcactcttccagaagcattcttctttttataaaaaaaatgtgggtgatatatgataaagatgcgctacttatgtaatggagacagggcaaactctttagcagataatattgaaacattggctcactctatggagaaaaataaatgcctacattgcaccatataaaaagttgggctccagagggatgaaaacgatggattaaaaagaaaactttaaagctcatagaagaaaatgtaggagaattatgtttgagatacaggtgaggaactgtacttcttcaacatgacccaaaaatatctttttaaatagttgggttaagaaaggatggctatgactgtattaaaatgaaagagttctagtcagtgaatgacaccttaaagttaataggctggggacagactgaaatagcttttagtaatgcataaaattaatgacattaatagagagacattccaaggaattgtaaatcaacaagtaaaagacaggaaactc

SEQ ID NO: 684701 - DNA, 608 bp, Homo sapiens
aagtcagatgtcggggaaaattaagggaattaacagagtggtagatggcaacttaggtgtccatttaatgtcctatactacttctggtgcattctccttgggattccccgaggctggtcagatcatgagcactttcgtacctctactctagtgatgtcacacagttttgtattkcttggttgattcatatgtcttcccctccagaagaaaaatgtgtctttcttagttttgtatctgtggcacttcttacacagtaaatgttagtttaatcaaaaactgccgtgtgacttcttatagttctcaaatctgattcagtaataacctgtataggcaaaactgctgagaagttctaagaccattcctctccaccacccccttttgctgcttttttgtacatgatgctccctgtagctgtcatttaattttatcaaccttagaggggctctttggacaaactaatatccagttgtcttttccagcccaactgaagattatgcacgtagtaacttcccacccagaaataatttgagctgttggaaaagaatccctgataaaaagaaatgtagcatgatggaataagtatctcagtaaataaacgtgtaccatca

SEQ ID NO: 684702 - DNA, 666 bp, Homo sapiens
tgaagaacaaagaaaggtattatgatagaaaaatttaagttggccttacttagcctggcagaggattcacatgctgcaaatttaaggatttcttaagtgtctgaacaatgcctgaggttgggggtggtatctaggaataatcttctagagcaagggggtggactaagtggggaggggtctcttttcttcctgccaacatccctccccgcaggtagcctgagaagaagcttggaatgggtttcctgagagatgctagactttttcccatgtctgaaattaagttatttatatactcacttacttgtttgttttctttgttttccattttatccccggtgtttagcacacagcgtacactcaataaatatttattgaatgaacagatatgcatttcagtattttatcttatgagtatattttaatctaaattgaatatcagatcagttcagtaattctacctctttttttttttttttttttttttttgagacagagtstcgctctgtcggccaggctggagtgcagtggcatgatctctgctcactgcaacctccgtctcccgggctcaagcaattctcctgcctcagcctcctgagtagctgggattacaggcatgtgccactacgcccggctaatttttgtatttttagtagagactgggtttca

SEQ ID NO: 684703 - DNA, 666 bp, Homo sapiens
tgaagaacaaagaaaggtattatgatagaaaaatttaagttggccttacttagcctggcagaggattcacatgctgcaaatttaaggatttcttaagtgtctgaacaatgcctgaggttgggggtggtatctaggaataatcttctagagcaagggggtggactaagtggggaggggtctcttttcttcctgccaacatccctccccgcaggtagcctgagaagaagcttggaatgggtttcctgagagatgctagactttttcccatgtctgaaattaagttatttatatactcacttacttgtttgttttctttgttttccattttatccccggtgtttagcacacagcgtacactcaataaatatttattgaatgaacagatatgcatttcagtattttatcttatgagtatattttaatctaaattgaatatcagatcagttcagtaattctacctctttttttttttttttttttttttttgagacagagtctcgctctgtcggccaggctggagtgcagtggcatgatctctgctcactgcaacctccgtctcccgggctcaagcaattctcctgcctcagcctccygagtagctgggattacaggcatgtgccactacgcccggctaatttttgtatttttagtagagactgggtttca

SEQ ID NO: 684704 - DNA, 1369 bp, Homo sapiens
ggggacaaacttaatttaaagtcagcatagtcttttgcctgcctgtctgagactccctttgatttcccacttgcatttattaggggtatctgacaccttatctcactcgtttttttgtgtgtgagttaatattttaatatacttcaatttattttatttagttttagaaaaatagccttcaaaatgaaaaaaattagttttaatttcttgcctttggtgatgtaggcccyctgagtttattttttctggaagtgcttcagccatgttcccagggaaactgcctcttcactcttctccaaatcctgccaggacttcttgaatggtccctacacgtggattcctcagcttctggagaagcttctgtcttaatggatgaaaaagactctgaacaacccttgcgtttttttaatgtgatactttataaaaccttttcagtttagatcttgttatggtttattatttgtggagtatcagtatttagtacagagatttcaagaaactcagtcaaaagacagtatgttttagcccaaaggcattattctcatatcagtggaatactttcttcaggaacttgtccataggattttgatatcctgagtacgtatcacagagaaagtcgtatttcccaagtgaattcctttggtcccccagaatgctgcagaactcctggttgcagcaatttagcaattcactattggtaccctcttctatacctcctaaccagttaccttgaaatctttaaaaacaaaacagataaacaaaaactcatctgtgtgctaaatccatttcaacagaaaaataatagaattattgtaattaccagctttaatcgcttgaagaacttaaaccttctggatgaatgatttctaagaatcacttcagagatgaaaggagatcatcgtttttaaacagtctgtagaacatgactttatttgtaaatggtcattcttcaaaagatattttttgagcacctgctttgtgctgggcattttgctgcatgttgagatataactgactcctagagattctttcgacttagccaccccagtaggtctgaggggactcagcctaacagtcactctctccttctgtagctgttaaaacaagcatcaagggacaaagtattgcattaaattccatgtactgaatgccattgtatagttgcatcctgaaataaccaagaaatcaactgagacctggaaatccctcatcagaaaaatgtccatgccagtcctggttgctgtaagaagacttgttctagaccagttgacatttggggagtgcgcattgtaagcaccatggtaagggatgcaaagtaccgtaagagatgtccagtgaggagaaagtagctactgtgcacaatatgaca

SEQ ID NO: 684705 - DNA, 957 bp, Homo sapiens
tagagcacagcagtccccaacaacaataaatcacacattctttccaagagtacatgaaacatgtaccaagatagaccgtattttgagccatgaaacaaatcttgataaatttaaaaggattcaagtcatagaaaatatgttctctgaccacaatggaattaaattattaaccaataacaaatatctgggaaaacctcaaaaacttggacaccagcgcttttaaaagactaaataatttctaaattatctgtgttggggggaaaagagaaatggattagagagcaaaaagggtatcagagtgctgtggtacgatttttatgaagagtggaacagaatctgcctttggcgtttccccactacagcccattcttcacattgataacagcatgatccttctaaaattaaatctaacgatcacttctgcttaatgrctctccaacacttacagaattaggtccaaaattctagcacagtttctgttcatctttctaacctttcttcccacaggtctagctagtacgtatttcttttattgcatttattacactattcctttgcttatctatctccccacctaggctaaagaacaagattcttgtctttttcatttttgtgtctcagtgcctagcatggtgccaggcacacagcatgcttccagtaaatgttagctggatggatgtaatgagtatattaaatattaatttatttgtttttccccaaaaagaattatttcctgcaaatcaaggaaattgctttctttatataatcaaaaacttattttcccagaagattcttcattaaaaattaagcctatgcacaacctagctctaaagtttcaaagattttaggcagcaatttttcaatctttttgaagtaatacatttgaatcttttcaaatttctgtttctgcatttgtgccacaccatctcatctcttgctgaaatgtttttgttaaat

SEQ ID NO: 684706 - DNA, 957 bp, Homo sapiens
tagagcacagcagtccccaacaacaataaatcacacattctttccaagagtacatgaaacatgtaccaagatagaccgtattttgagccatgaaacaaatcttgataaatttaaaaggattcaagtcatagaaaatatgttctctgaccacaatggaattaaattattaaccaataacaaatatctgggaaaacctcaaaaacttggacaccagcgcttttaaaagactaaataatttctaaattatctgtgttggggggaaaagagaaatggattagagagcaaaaagggtatcagagtgctgtggtacgatttttatgaagagtggaacagaatctgcctttggcgtttccccactacagcccattcttcacattgataacagcatgatccttctaaaattaaatctaacgatcacttctgcttaatggctctccaacacttacagaattaggtccaaaattctagcacagtttctgttcatctttctaacctttcttcccacaggtctagctagtacgtatttcttttrttgcatttattacactattcctttgcttatctatctccccacctaggctaaagaacaagattcttgtctttttcatttttgtgtctcagtgcctagcatggtgccaggcacacagcatgcttccagtaaatgttagctggatggatgtaatgagtatattaaatattaatttatttgtttttccccaaaaagaattatttcctgcaaatcaaggaaattgctttctttatataatcaaaaacttattttcccagaagattcttcattaaaaattaagcctatgcacaacctagctctaaagtttcaaagattttaggcagcaatttttcaatctttttgaagtaatacatttgaatcttttcaaatttctgtttctgcatttgtgccacaccatctcatctcttgctgaaatgtttttgttaaat

SEQ ID NO: 684707 - DNA, 957 bp, Homo sapiens
tagagcacagcagtccccaacaacaataaatcacacattctttccaagagtacatgaaacatgtaccaagatagaccgtattttgagccatgaaacaaatcttgataaatttaaaaggattcaagtcatagaaaatatgttctctgaccacaatggaattaaattattaaccaataacaaatatctgggaaaacctcaaaaacttggacaccagcgcttttaaaagactaaataatttctaaattatctgtgttggggggaaaagagaaatggattagagagcaaaaagggtatcagagtgctgtggtacgatttttatgaagagtggaacagaatctgcctttggcgtttccccactacagcccattcttcacattgataacagcatgatccttctaaaattaaatctaacgatcacttctgcttaatggctctccaacacttacagaattaggtccaaaattctagcacagtttctgttcatctttctaacctttcttcccacaggtctagctagtacgtatttcttttattgcatttattacactattcctttgcttatctatctccccacctaggctaaagaacaagattcttgtctttttcatttttgtgtctcagtgcctagcatggtgccaggcacacagcatgcttccagtaaatgttagctggatggatgtaatgagtatattaaatattaatttatttgtttttccccaaaaagaattatttcctgcaaatcaaggaaattgctttctttatataatcaaamacttattttcccagaagattcttcattaaaaattaagcctatgcacaacctagctctaaagtttcaaagattttaggcagcaatttttcaatctttttgaagtaatacatttgaatcttttcaaatttctgtttctgcatttgtgccacaccatctcatctcttgctgaaatgtttttgttaaat

SEQ ID NO: 684708 - DNA, 631 bp, Homo sapiens
cacgtagaaaacagaagggctaaatagggcccgttcaagcctttgaatttaatgagaaaacagacatgaggagaagaacataaacgctcacatccaagacagaacccagggctcttggtccccttgctcaacttgtacatcttaatccacataaacataccactctaaaaaggtacatcctatgtgatattaatgtaaaacaaatcattcttgcaaatacagttatgtgccatgtaacgtttcagtcaatggtagactgcatatatgatggtagtcccattagattacaatggacctgaaaatatgctattgccttagtgacactgtaaccatcataaggtcttagtactattttgcaagttatttaaagtatagcacatacaattattacagtgtacaacacttgataataaactactacrttgctggtttatgtattcactatactatgccttttattgttattttagagtgcactccttctactttttttttttttaagttaaatgtaaaacagcctcaggcaagtccttcaggaggtattcaacagaaagcactgttatcataggtgacagctacatgtgtgttattgcccctaaaaaccttccagtgggacaagatgtggaggtgg

SEQ ID NO: 684709 - DNA, 631 bp, Homo sapiens
cacgtagaaaacagaagggctaaatagggcccgttcaagcctttgaatttaatgagaaaacagacatgaggagaagaacataaacgctcacatccaagacagaacccagggctcttggtccccttgctcaacttgtacatcttaatccacataaacataccactctaaaaaggtacatcctatgtgatattaatgtaaaacaaatcattcttgcaaatacagttatgtgccatgtaacgtttcagtcaatggtagactgcatatatgatggtagtcccattagattacaatggacctgaaaatatgctattgccttagtgacactgtaaccatcataaggtcttagtactattttgcaagttatttaaagtatagcacatacaattattacagtgtacaacacttgataataaactactacattgctggtttatgtattcactatactatgccttttattgttattttrgagtgcactccttctactttttttttttttaagttaaatgtaaaacagcctcaggcaagtccttcaggaggtattcaacagaaagcactgttatcataggtgacagctacatgtgtgttattgcccctaaaaaccttccagtgggacaagatgtggaggtgg

SEQ ID NO: 684710 - DNA, 1131 bp, Homo sapiens
tgaagaaaaattaagtctatgctatcttaagccattgagggtcagggttgtctattacaagattacttagtctattctgccccacytacttggaataatttcagatcatggggtggaattttatgtcacaggataaagaatccccctaagagatgtcaaatatgctttcatagcatttagatcacaaattcccgtaatgcctttttttcactgctcaactgaacacctgattctccctataaagttctatcttccttctttatccttcatcaactttatccagtaaggagctggatctgcaatgatctataacaaagcctgtaaggaacattcttagggacaaacagaagtctaacttcgtctcaatgtgtgagcagtcctatgcccaaatatgcagatgggcatcttagaaggcatactgattagcccatgatagccaagaactcagcagaaacaccatttacttatttaattctaagattttcttaaaactgtggaactcatttgtcctaaaaaggtattgcaattttctgcttaccaagactcaaggtagactactcctagttcacattgtcatttttttttagaagtccaggccaatgtccattgttctttctaatcaccccatggttgttaagatttctgagcaaatacttgcaggtcttttgggtgattatgctataaccaataaacaggtggcagagagacagtgagcaaattactaaacaccaaaatcaatcctttccagactttgcttaaatgctactttctcaatataacctcttctgaccaccctacttaaaactgtgaccctatatgtcagcctcccttactgctctacttttcctgtttccatagcacttgtcatcttctattacataagttatatatttattttgtctattgtttattatctgccttctataattagaattaagctccccaagagtagagatctctgttttgttcattgacacatctcacatattcagaatactattggcacatagtagatgctcagttaatttggactctagactcatgtctgttaccaactgctaatgtcacatttcttagaaaagaaacttgccttagcttcctcactgaggtgttccaaggaccaagtatata

SEQ ID NO: 684711 - DNA, 656 bp, Homo sapiens
tattttatttcttaaaataactagataggaaaaggtcatgagaacaatattctgagttcttgcatttttatcagattttgtatgtcttatacccttgaaagtcagttttgctggttataaaattctcagtttacattctctttccttgagtatcttaaagacaatattttcctttggcataaatctttactattaaaaagtctggtgataatctattttttcctgtataaatcatatgctatatttgctgaaatgcagttttttccccctcgtttttctttagaattcagtcattttactggaaaataccttggttgataattacgggtcagtcttctcaggtacatgatacattatttcagattgtaggttatttrtttaattttaaatttttaatttttcattaacatatatatgtttgtggagtacaatatgatattttaatatatgtatatattatgaatgattaaattaagataacatattaatcatcttatatactttttttttggtgagaatattaaaaacccaccttatcagcaatttaaaaatatacagtattagaatatagttttaatacatacatatattctggaaagttttcattgattacaatttttggtattcattctgttttcttgttttgattttcttta

SEQ ID NO: 684712 - DNA, 618 bp, Homo sapiens
ttggccttgataattttaagttgctcatttttgtgcacattatcttcctgaaggcttagaaagaggcttgatgcagacagcttttcaagcttcccagagctctcacttctgttatttttgtgtggtattaacaaatatgtttgtctaattgttgagataacctgaatcttcttatctcccctactttatctcaaccttctcttccttttgtctctgttgtccctgtcaagttcaattttgattccactctaaatatcttttcctccattgtgggcctgttctggaagagagccacggcaggtcaatttcaagtgttcactgtaggatctccttcagaccttcttaccctaggcgctgccatttgttaacttatgactgcagacaaattatttaactttttaaagtcccagcttcttcatttgaagaactagtataagaatcattcctatctaatagtgtgtaataggaatgaaatgatgtaatatgcaaagattttagctcagtaaatgacacattatacatgagctcacyaataaccaacattatcccaggcagtaatttaatacactttgtcaaatgagtatgtgggagatgtcaactttacatagactttattac

SEQ ID NO: 684713 - DNA, 653 bp, Homo sapiens
ggaaggaagggattctgggcagagggaacagcatgggcaaagcaatagaggtgaatttggtacaagaatgggtgactgggggaagtcatgagatgttccgctctggacagctttaagaaaatatcgtatctgacctacctgggacatgtgtgtggaatgtgtgatgcccaaagccggagtaagtctcacataatttctcaggrtcactgtaaaacctgaagattatgctcagcattttttccctgacacctaagttttctaaactccttgagcttctcagaaagttagatgacaaatccaacacatcagccacttggccgcgggtagtgacttcagcatttttgatgagcactgaatttcccacaatgaaagcaaaactccacctgctttctgctgcttctctcctaaaagggtggaccctgtaaacaaatgttctggttgcatccttcatttctgtggatgcatgaaacacattgtatttcttatctgccatttcttagtaagaagacacccttcctccttcccagctctgtgttggagcccattaattagaataagctttatttagcaaggttagaattccttcttttctgctcctcttctcctgctacacctctcttggtttctgaaagcaaggacaggtcactcgcttt

SEQ ID NO: 684714 - DNA, 621 bp, Homo sapiens
atgcaaatatgtaggattggkggggaggatataatgaataatctgaaaattcacatgttgaggaaatgaaagctcttaaacaaaaagctttaaaacaaaactgacctcaaaaccaataaagagtactaattgcaataagttttggaagagacatatcataaaatgattaaaagatttccagctctttcacatataagaatacagccttatcaaatgtggaaaatttcagttgtctgagataaatctttgtgtatatagtaattttcctcaaaagagtaaagttaaaagtagccaaatatcaagcatattttattaccttcaaattcacacagcccatatttctgtgaagccgtaaggtaattgtcaagttgagattgcaagctctttgaggacaagaactctagcttactttatattttcagcaaaataggcacctataataaatgcttgttaactgaatgaaaagaacttggtgagtgagtggaggccagaattcctgtgacttgtacatattgtttggttttgtgttctatattattttagctataaagtagaatcccaagcacagctcatgttgttcactgaaaaagcaggatacagtgcaaaagtatgcatacagta

SEQ ID NO: 684715 - DNA, 1103 bp, Homo sapiens
tttcatataaaaatggggaagtgggwatcacagccaggcaccaccatttccatataccactcagatgggtttctaataaatgacgctgttgaatttttttaaatgatgaggtcaggtgatctatacaagaattcacacattgacagagaaggcattctggtgatcaacgaattgtttctatctgcatccataatattctaagtaggtaaaacagacacaattaagaaaatgctggccaaatctttttttttttctctcccaacaaattccaaagctgatatgctgattcactcagtcaatcattcaatttaagcttaacgaatatctactggattctggaatttacaaaagcaaggaaaaattgacaacaactctgttatgactaagcagaggagacaaacgttcatttaaaaattgcacaaaggtgaaattactctgaaaggctcatggtcaacattataagagtctatactaaaataatctgacctagtcaggaagatcagagaaaacttccctgagccaacatctgcagaagaagaatgagttaagctggtaagcaaatgagtcaggagaagcatatgtgcaaaactctatggtacaaaagagtgtattgagtccacagcaatagctaggatgaagagaataaagaagatgcaagataaacttcagagaaaagacgtgtccagaatgtgcctagctatatgtctatcttaagtgtttgttctttaagtgcaatggaaagatattgatgggctttaggaaagaaggttctaatttagagcatgaattggaaagacactaagaatggaaaccaattataaagatgttgccatagtccaatggagagatagtagcagcttggaccaggtggtagtgatggagataaagagaggctcagggactctagagatactgaagaggcaaaatcaacaggacaggataggaaaggagagatgcaacaaatgcctctttcataatttctccatgaatctttctaggcattgtactgctttctctattatggctgccagttgagtacatctctgtatgttaaaagggagctgctctcttgcaactgcttggacacccagtcagaattttcc

SEQ ID NO: 684716 - DNA, 1103 bp, Homo sapiens
tttcatataaaaatggggaagtgggaatcacagccaggcaccaccatttccatataccactcagatgggtttctaataaatgacgctgttgaatttttttaaatgatgaggtcaggtgatctatacaagaattcacacattgacagagaaggcattctggtgatcaacgaattgtttctatctgcatccataatattctaagtaggtaaaacagacacaattaagaaaatgctggccaaatctttttttttttctctcccaacaaattccaaagctgatatgctgattcactcagtcaatcattcaatttaagcttaacgaatatctactggattctggaatttacaaaagcaaggaaaaattgacaacaacyctgttatgactaagcagaggagacaaacgttcatttaaaaattgcacaaaggtgaaattactctgaaaggctcatggtcaacattataagagtctatactaaaataatctgacctagtcaggaagatcagagaaaacttccctgagccaacatctgcagaagaagaatgagttaagctggtaagcaaatgagtcaggagaagcatatgtgcaaaactctatggtacaaaagagtgtattgagtccacagcaatagctaggatgaagagaataaagaagatgcaagataaacttcagagaaaagacgtgtccagaatgtgcctagctatatgtctatcttaagtgtttgttctttaagtgcaatggaaagatattgatgggctttaggaaagaaggttctaatttagagcatgaattggaaagacactaagaatggaaaccaattataaagatgttgccatagtccaatggagagatagtagcagcttggaccaggtggtagtgatggagataaagagaggctcagggactctagagatactgaagaggcaaaatcaacaggacaggataggaaaggagagatgcaacaaatgcctctttcataatttctccatgaatctttctaggcattgtactgctttctctattatggctgccagttgagtacatctctgtatgttaaaagggagctgctctcttgcaactgcttggacacccagtcagaattttcc

SEQ ID NO: 684717 - DNA, 1002 bp, Homo sapiens
tcataaacatagtaaacacaatgatctatggagagatccatttaaatgaacaaaaataggcaagttataaacaaatattctacaagttcatagataaaaaattaaacattatctcctctatgaagtcttacataatctgttccctcacccacagccaagttacgatgtcttgggatagtgctctatcagatatatctatacatgattccccttattgtctcagttttgtcttttgtaaaaacagctaatgataaggattaagtggaattaacccctaaaagtccttagcacacacattaaacatagtaggcactcaagaaataatcattataattatactgtaatttgttacttagatctgtctccctcattacaatctccttcaagaatttatcacagctaatccatagctactgttaattatgaagttattgtacactaggtattggtctatgtgatttacatgcagatagtattattatcctcattttatagacaaggcactgacaggataacaaacttgcccatggttacatatctcagaagtagcagaggtaagacttttaacccgcatactctggtgatatggtttggctgtgatctcacccaaatctcatattgaattgtagctcccataattcccatgtgtggtgagaaggacctgatgggaggtgattgaatcatgagggtaggtctttcttgtgctgttgtcatgatagtaagtttcrtgagatctgatggttttataaagaggagtttccctgcataaactctttttgccagccaccatgtaagatgtttctttgctcttccttcaccttctgccatgattgtgaggcctccccagtcatgtgaaactgtgagtcaattaaacctctttcctttataacaaatcttattatgatgtgtttttgttttttgttttgttttgttttgttttttgagacagaatctcactctgttccccaggctgcccaagctggagtgcagtggcatgatctc

SEQ ID NO: 684718 - DNA, 2130 bp, Homo sapiens
gtatctctttatacaggattatagatttgggttcaattttattactttcacataactagtacccaaatatataaatacatatatatttttcattcacaaagatctaaatattagattagattaagaacctgagctttagttttagtaaaatttaaatgatgaatatagaaatttatcatacactgtatttagtgtatgatatttaaatgtttaatcgtttattattgagagtctgaatttctctttcaatgtttcctgtctaggcctgtatagaacaacaatttgattctctcaatggaggagtatctgtgtcaaaaaatagtacttttgctgaggaatttgcacatagtattcggtcaatttttgcaaatgtagaagccaaacttggtaatgtaaatcgcattttttggtttttgtttataaaatttgcatttccttaaaagcataattgaagtatatttgttctgctttctcttatgttattgatttgtaaggagaaccttctgaaattgaccagagagacaagtatgttggaatttgtggactctttgtattgcactttcagatttttcgaactattgataaaaagttttataagtctttattggacatttgtaagaaggtaagaacttgaaacttatttttcaatttgagcagattaaaaagattgcagataaaactaaatattttaaaatgcattttattcctgtttacaaaaataatttaaaagtattcacttgtaaaattcaagtattccagaaataagtaacttagtgaatgaaaatacgtcrtatttctacatcatattactacatattggtagatggtgttcagatttgttcctgtacaacttctcttagtgctactaatactacttttttcttttccttttctttgccactgattttcattactgaagatgaagaaatttaaaatatatttctttctatgtctttgctattttcataatgtggtatctgatttcaaaattgaaagattagtttgtgtgtaacatcaagtgatagtaactatgataacccagccaattttttaaaaaacttatgtacttaaatagaatgaaactaaaagacatgaagattcaagtttctattgttgcatttttttatctgacagtccatgaaagggtgttttgtgtgtgtgttatttaatattcaggtgaataaaattgtcatgctcaacaccagatgtagaaatgccttaactctgccacagtgaaagatatttgtctcataatatattaataagtattttttgtggttattttttcttgaaatcagttgtcttccatgtgtattatagaacttttaaacagcttgttgtttagcctgcatttaatgaattttccccttttcccttttctgtttcaggtaccagccatcactctaactgctaatattatttggtttcctgataattttctgatccagaaaataccagcagctgccaaactgctagacagaaaaagtcttcaagccattaaaatacacagggatacttttctacaacagaaagctcaatcacttaccaagtaggttttataaacaagtataatgaaaatatttagatatcctttattttcaaagattatactaacacttaatgtatagtaccatttgaattataagattaaatgtacttgataagtaagggtcaggcaatctccaggagatttgttttctagaagttttttgtaaagaatattttacacttaaagtcaatttaagatgtagacagattatactttatggatacaaatgcgtacatacatagtttttatcatctgtgttaaatattttttgtccaaatgaagtctcagattttgttgcagtagatatcatttgatgacattaaaaacattctgtgtccatggtgattttgggagaggttgagtttttcttgatgtgcttcctttttcccccttctttttatttttatgaaaatagtatatgcatgtatataaaacatcaaaaagtgctaaagcttaaagggaaagataattcttcccagttccttcctgtatttcagtcttgctctccaaaggcacacttttaactctttgtttcttcttttttttacatccttattttttgtatacgtccttatttttta

SEQ ID NO: 684719 - DNA, 2130 bp, Homo sapiens
gtatctctttatacaggattatagatttgggttcaattttattactttcacataactagtacccaaatatataaatacatatatatttttcattcacaaagatctaaatattagattagattaagaacctgagctttagttttagtaaaatttaaatgatgaatatagaaatttatcatacactgtatttagtgtatgatatttaaatgtttaatcgtttattattgagagtctgaatttctctttcaatgtttcctgtctaggcctgtatagaacaacaatttgattctctcaatggaggagtatctgtgtcaaaaaatagtacttttgctgaggaatttgcacatagtattcggtcaatttttgcaaatgtagaagccaaacttggtaatgtaaatcgcattttttggtttttgtttataaaatttgcatttccttaaaagcataattgaagtatatttgttctgctttctcttatgttattgatttgtaaggagaaccttctgaaattgaccagagagacaagtatgttggaatttgtggactctttgtattgcactttcagatttttcgaactattgataaaaagttttataagtctttattggacatttgtaagaaggtaagaacttgaaacttatttttcaatttgagcagattaaaaagattgcagataaaactaaatattttaaaatgcattttattcctgtttacaaaaataatttaaaagtattcacttgtaaaattcaagtattccagaaataagtaacttagtgaatgaaaatacgtcgtatttctacatcatattactacatattggtagatggtgttcagatttgttcctgtacaacttctcttagtgctactaatactacttttttcttttccttttctttgccactgattttcattactgaagatgaagaaatttaaaatatatttctttctatgtctttgctattttcataatgtggtatctgatttcaaaattgaaagattagtttgtgtgtaacatcaagtgatagtaactatgataacccagccaattttttaaaaaacttatrtacttaaatagaatgaaactaaaagacatgaagattcaagtttctattgttgcatttttttatctgacagtccatgaaagggtgttttgtgtgtgtgttatttaatattcaggtgaataaaattgtcatgctcaacaccagatgtagaaatgccttaactctgccacagtgaaagatatttgtctcataatatattaataagtattttttgtggttattttttcttgaaatcagttgtcttccatgtgtattatagaacttttaaacagcttgttgtttagcctgcatttaatgaattttccccttttcccttttctgtttcaggtaccagccatcactctaactgctaatattatttggtttcctgataattttctgatccagaaaataccagcagctgccaaactgctagacagaaaaagtcttcaagccattaaaatacacagggatacttttctacaacagaaagctcaatcacttaccaagtaggttttataaacaagtataatgaaaatatttagatatcctttattttcaaagattatactaacacttaatgtatagtaccatttgaattataagattaaatgtacttgataagtaagggtcaggcaatctccaggagatttgttttctagaagttttttgtaaagaatattttacacttaaagtcaatttaagatgtagacagattatactttatggatacaaatgcgtacatacatagtttttatcatctgtgttaaatattttttgtccaaatgaagtctcagattttgttgcagtagatatcatttgatgacattaaaaacattctgtgtccatggtgattttgggagaggttgagtttttcttgatgtgcttcctttttcccccttctttttatttttatgaaaatagtatatgcatgtatataaaacatcaaaaagtgctaaagcttaaagggaaagataattcttcccagttccttcctgtatttcagtcttgctctccaaaggcacacttttaactctttgtttcttcttttttttacatccttattttttgtatacgtccttatttttta

SEQ ID NO: 684720 - DNA, 2130 bp, Homo sapiens
gtatctctttatacaggattatagatttgggttcaattttattactttcacataactagtacccaaatatataaatacatatatatttttcattcacaaagatctaaatattagattagattaagaacctgagctttagttttagtaaaatttaaatgatgaatatagaaatttatcatacactgtatttagtgtatgatatttaaatgtttaatcgtttattattgagagtctgaatttctctttcaatgtttcctgtctaggcctgtatagaacaacaatttgattctctcaatggaggagtatctgtgtcaaaaaatagtacttttgctgaggaatttgcacatagtattcggtcaatttttgcaaatgtagaagccaaacttggtaatgtaaatcgcattttttggtttttgtttataaaatttgcatttccttaaaagcataattgaagtatatttgttctgctttctcttatgttattgatttgtaaggagaaccttctgaaattgaccagagagacaagtatgttggaatttgtggactctttgtattgcactttcagatttttcgaactattgataaaaagttttataagtctttattggacatttgtaagaaggtaagaacttgaaacttatttttcaatttgagcagattaaaaagattgcagataaaactaaatattttaaaatgcattttattcctgtttacaaaaataatttaaaagtattcacttgtaaaattcaagtattccagaaataagtaacttagtgaatgaaaatacgtcgtatttctacatcatattactacatattggtagatggtgttcagatttgttcctgtacaacttctcttagtgctactaatactacttttttcttttccttttctttgccactgattttcattactgaagatgaagaaatttaaaatatatttctttctatgtctttgctattttcataatgtggtatctgatttcaaaattgaaagattagtttgtgtgtaacatcaagtgatagtaactatgataacccagccaattttttaaaaaacttatgtacttawatagaatgaaactaaaagacatgaagattcaagtttctattgttgcatttttttatctgacagtccatgaaagggtgttttgtgtgtgtgttatttaatattcaggtgaataaaattgtcatgctcaacaccagatgtagaaatgccttaactctgccacagtgaaagatatttgtctcataatatattaataagtattttttgtggttattttttcttgaaatcagttgtcttccatgtgtattatagaacttttaaacagcttgttgtttagcctgcatttaatgaattttccccttttcccttttctgtttcaggtaccagccatcactctaactgctaatattatttggtttcctgataattttctgatccagaaaataccagcagctgccaaactgctagacagaaaaagtcttcaagccattaaaatacacagggatacttttctacaacagaaagctcaatcacttaccaagtaggttttataaacaagtataatgaaaatatttagatatcctttattttcaaagattatactaacacttaatgtatagtaccatttgaattataagattaaatgtacttgataagtaagggtcaggcaatctccaggagatttgttttctagaagttttttgtaaagaatattttacacttaaagtcaatttaagatgtagacagattatactttatggatacaaatgcgtacatacatagtttttatcatctgtgttaaatattttttgtccaaatgaagtctcagattttgttgcagtagatatcatttgatgacattaaaaacattctgtgtccatggtgattttgggagaggttgagtttttcttgatgtgcttcctttttcccccttctttttatttttatgaaaatagtatatgcatgtatataaaacatcaaaaagtgctaaagcttaaagggaaagataattcttcccagttccttcctgtatttcagtcttgctctccaaaggcacacttttaactctttgtttcttcttttttttacatccttattttttgtatacgtccttatttttta

SEQ ID NO: 684721 - DNA, 2673 bp, Homo sapiens
cttctgtgctgttgttgtgtactttgagttcctctgtattttaaacctcacaaggcattattatcgctattgttgtttttatagtcagcgtttatttagatttactcatatttacctgttctgttgctttttattcttcctacatctcttaattttcatctttctacttggggaatacctgctagtatttcattaatacaagtctctgttgatgaattgtaatagtttttggtctgaatatgtcttcatttcaatcattttgctgtgttagaattctaggttggtggggtttttttttttcttctagcttttaaaggtgtcattttatggtcttctggcttcctttgtttttgttaagaagtcaactgtaggtttgttgcttctaaaatatgtatctttctttactttttggcttttagcagtgttcctacaatgcccctaggtgtggttttctttgtgtgtttgtgctactttggggtcagtagagcttcttgaattcatgcaatattctttaccattaactcttcgagcattatttcttttctgtttcctctgttctaattctctcttcatctgtctctaatcaattcatctactgagttttaaattttaataattttactttttagctggcttttttatagtttacagttctcttctgagatacttgattttgtgttttattttcttcaacacattcagcttattttgaagcacatgtctaataatttcattatttgggtatttgtcttatctgttgtttctcttgtttttgtacatctcttaccttttatatacccagttattttttatagagtgccacacattatatatgaaaagctgtagacgtaatttgaggatctggatattttcttcctccagaagggatttgtatttgtatttgtatttgcttttgtacacagctagtctaggacggttagcaacccaggttatatcaatctagtaggttgatcaagatgatttgaagcaggattttgatcctgtgatggttgtttaattcacccttacttttttggggggttatccttcaggatgccaactcagaacttaggtggtttatgaaaaccagctccgatgagccccaagctcctgtttttatttcccttccctgtgagatgttgttgaaaggtatgtttggcttttgtctttaaggcagatgatttaagagaaagcaaccctgaatgccaggatcacttctctgagtttctgtcttccagatcttggccttatatttccttatttatttgaatcctctttgatgccttatgaggcatttttaaaccgttttgcccatatattctagttgttctcagtgggaaggctgatctaaattatttattctatcattaactaatacagactccagactaccctctccctcacaatttagatttcaaaatacatcccttcacaaattaatggttatctgggaatgagctaatatgggccctggagttctgwacttcaagtacccctaaaaaagggaagcctcctttttctgcctgacttagagttagatctttgctgttccttgtttgtgctttttaatttttcccagggctgcactagagtagggtctgatgtaatagtcttgcagctgacaaggtaagactgtggctctttctgcatgtatgtgccaagctttggtcttacggtcacctttcttaggatgctatcctctctttgattttttcattttcttaatttagcatgtctcttcgccacagagaaactttgtgtgtggttcagaggaactcctactttgcgctgagtatcattcctttagtgagccactgtttccgatgggagaatactttctttcacatgtggtgggacaggagcaaaagtttgaggaacattggcatatatcttctgccccacctccataatgtatctacaataacatagttaaggttccttgctaaactgtacatgtgtctcttttgggaactttatagacccaaagaatctccatcattatctttgtgtttttctgtgtgtcccttttgggtttaaatgaaaaagtgtttgagaagcaatatcccttttttcctttattccactgtttcactgagtttaatagcattaaaagaattttaacacctcacaagacctggcttccttcatgaatagaaggggagggagaatctgttctcattgggctggaaggagagaaagcctaatgcagcaccaaactaggcaaggatgagatagcagatggactgtggggattggtctaggtgaataggaaagggggacttggcttggaactcaaaaatttctttgcctatctgtattgactgaagaacagccctctttctccttatttttcaatttgtaactcctcagagtcctcagctcttgccttaagtggcaacagataggagtctttattctcttccctggcaggtaagataaggatgaatagatacctttctaacattcaaattgtttcactcaaagcttttttaagggaaagattcttaagctgtaattatacactattattttgacagtacaaaacttctggtatgtgacaggataaataaacggttagggctgctttgaaacttaaccaccatgtataacattgtctctgtgaggaagagtatttccaaatcttaagagctggctttaagatgaactttagaa

SEQ ID NO: 684722 - DNA, 2673 bp, Homo sapiens
cttctgtgctgttgttgtgtactttgagttcctctgtattttaaacctcacaaggcattattatcgctattgttgtttttatagtcagcgtttatttagatttactcatatttacctgttctgttgctttttattcttcctacatctcttaattttcatctttctacttggggaatacctgctagtatttcattaatacaagtctctgttgatgaattgtaatagtttttggtctgaatatgtcttcatttcaatcattttgctgtgttagaattctaggttggtggggtttttttttttcttctagcttttaaaggtgtcattttatggtcttctggcttcctttgtttttgttaagaagtcaactgtaggtttgttgcttctaaaatatgtatctttctttactttttggcttttagcagtgttcctacaatgcccctaggtgtggttttctttgtgtgtttgtgctactttggggtcagtagagcttcttgaattcatgcaatattctttaccattaactcttcgagcattatttcttttctgtttcctctgttctaattctctcttcatctgtctctaatcaattcatctactgagttttaaattttaataattttactttttagctggcttttttatagtttacagttctcttctgagatacttgattttgtgttttattttcttcaacacattcagcttattttgaagcacatgtctaataatttcattatttgggtatttgtcttatctgttgtttctcttgtttttgtacatctcttaccttttatatacccagttattttttatagagtgccacacattatatatgaaaagctgtagacgtaatttgaggatctggatattttcttcctccagaagggatttgtatttgtatttgtatttgcttttgtacacagctagtctaggacggttagcaacccaggttatatcaatctagtaggttgatcaagatgatttgaagcaggattttgatcctgtgatggttgtttaattcacccttacttttttggggggttatccttcaggatgccaactcagaacttaggtggtttatgaaaaccagctccgatgagccccaagctcctgtttttatttcccttccctgtgagatgttgttgaaaggtatgtttggcttttgtctttaaggcagatgatttaagagaaagcaaccctgaatgccaggatcacttctctgagtttctgtcttccagatcttggccttatatttccttatttatttgaatcctctttgatgccttatgaggcatttttaaaccgttttgcccatatattctagttgttctcagtgggaaggctgatctaaattatttattctatcattaactaatacagactccagactaccctctccctcacaatttagatttcaaaatacatcccttcacaaattaatggttatctgggaatgagctaatatgggccctggagttctgaacttcaagtacccctaaaaaagggaagcctcctttttctgcctgacttagagttagatctttgctgttccttgtttgtgctttttaatttttcccagggctgcactagagtagggtctgatgtaatagtcttgcagctgacaaggtaagactgtggctctttctgcatgtatgtgccaagctttggtcttacggtcacctttcttaggatgctatcctctctttgattttttcattttcttaatttagcatgtctcttcgccacagagaaactttgtgtgtggttcagaggaactcctactttgcgctgagtatcattcctttagtgagccactgtttccgatgggagaatactttctttcacatgtggtgggacaggagcaaaagtttgaggaacattggcatatatcttctgccccacctccataatgtatctacaataacatagttaaggttccttgctaaactgtacatgtgtctcttttgggaactttatagacccaaagaatctccatcattatctttgtgtttttctgtgtgtcccttttgggtttaaatgaaaaagtgtttgagaagcaatatcccttttttcctttattccactgtttcactgagtttaatagcattaaaagaattttaacacctcacaagacctggcttccttcatgaatagaaggggagggagaatctgttctcattgggctggaaggagagaaagcctaatgcagcaccaaactaggcaaggatgagatagcagatggactgtggggattggtctaggtgaataggaaagggggacttkgcttggaactcaaaaatttctttgcctatctgtattgactgaagaacagccctctttctccttatttttcaatttgtaactcctcagagtcctcagctcttgccttaagtggcaacagataggagtctttattctcttccctggcaggtaagataaggatgaatagatacctttctaacattcaaattgtttcactcaaagcttttttaagggaaagattcttaagctgtaattatacactattattttgacagtacaaaacttctggtatgtgacaggataaataaacggttagggctgctttgaaacttaaccaccatgtataacattgtctctgtgaggaagagtatttccaaatcttaagagctggctttaagatgaactttagaa

SEQ ID NO: 684723 - DNA, 617 bp, Homo sapiens
tatccctatcagtgcatttttgagtactttttgcatgccagctttatacgctcaatactaagtagttctcacccattctgtgagttaggtattatttatcatcaccactttacagacatgcaaatagctctccaaatccagagggcaaataaacagcatagctgggcttttaatctggggctggtgagatctaagattcgtttactttccactacatagcctgggatacagaatttgtcctttatgctcacgtttgggaatctagacgttggcaatgaatacagtggaagggatcttcccactagaccacagacttccagatattttgggattcctgctgggtgactaaggggaaatcacccagcaatcacttttggattcaacatgtggcaaagtttcttttagcagtgctggcagtcacgcatattcatcaaccttctgcacacgcatctcccaacagatctggtccttcgaggctgtggcttcagaggccactcttacaagcttaaagacttgcctaaggtcaaccatttgccaggcaaggaagcaccggggcaaaytgctaacactttccctatcgctcaaccaagtcaaagcatggcagctgtatttgaggg

SEQ ID NO: 684724 - DNA, 631 bp, Homo sapiens
ggaccttgatcaagggacctcgatcaatagacaagatagcaaaagggaaacgcagtctgagctgctgtctataacgaacagttgttttattaaaactaactttggtcagactccttgcaacgtagtcttttttaaagaagccgcccgtgatgctcaaaaagtcacagatgggctaaacttgcacccaccccaaaatcgggttcaaaaacttattcctttgctaggggcaggtgcttgcatcttagctgcagctgcaagaagtatcctctctcagcaggacaggttgggcagcatgcctggcaagggcaggcggagtgtaccatgaagggtagatccagttcctatagagtttggggagggcttaagccagaacaggaagctcagcactgattagagcatgccacccatactattgcaaatccagaagtgttttaacaagtcagcagrtagtacttattggaatatgtatgtaaatgagaaagtccctaaagttataagttgtgttttacagggtaatacccacattcctgtgcaaagtttccttactgggatggctggggactctttgatcgctcagttttatagagtcctggtaaacagaaaatatttcagttgtcatggtctcaaaata

SEQ ID NO: 684725 - DNA, 609 bp, Homo sapiens
tatctaaaatgtgtatacttataaattcggcagtgttttcacaccttccgtgagatgagaggtttaggagaaaccttatctcacaaataaaacaatcctaaatactttccaattcaagaacaaaaactggcttgcctattaaccacattgagctacataattactgccttgctaatataaatgtaaacacatttaattcaaaattgatgacttcaaacacaaactaaatttgttattatcatawaaagtggttctttctaataatataccaagcattgtgatcaaatgatattttcagagagtaatgctccagctcagctcctcactgatatgtatacttagagctcacttaaacttttggggtttgttttgccactttgaaatatggggaaagtaattcaagccttccatacaccaggggactgggagaatgtgaaatgccatgttttcatgtacccaataaccatttcctgaacacttgttcagatccagaaaccgcctagacgtttgggataaaacaatgaacaggagctagatgatccctgtaccacatgaagcatgcactcaagaagaaataggcaatgattttataaactgtgagaaatagca

SEQ ID NO: 684726 - DNA, 504 bp, Homo sapiens
aaaaaaaaaawatatatatatatatatatatatatatatatatatatatatatatatataggtttcaattttgcagggttggtgagaagatgaaataagctaatgaacacaaagctcttagcatagtttatgttatgttacatggcagtcactcaataaatggtagctattgaaatgaacctattgcattttgatgaaataagcaattctgtttttgttgttgttgttagggtgctatggtttggatttgtgtccccatccaaatctcatgtgtgaattataatccccagtgatggaggaggggcctgatgggaggtgattggatcatgggggcagacttcccccttgccattctccttactgtgagtgagttctcacagagctggctgtttaaaaatttgtagcacctcccccttcattctctttctcctgctccggccgtgtaagacgtgcctgcttcctctttgcttcccgccatgattgtaagttttctgaggccttccc

SEQ ID NO: 684727 - DNA, 504 bp, Homo sapiens
aaaaaaaaaatawatatatatatatatatatatatatatatatatatatatatatatataggtttcaattttgcagggttggtgagaagatgaaataagctaatgaacacaaagctcttagcatagtttatgttatgttacatggcagtcactcaataaatggtagctattgaaatgaacctattgcattttgatgaaataagcaattctgtttttgttgttgttgttagggtgctatggtttggatttgtgtccccatccaaatctcatgtgtgaattataatccccagtgatggaggaggggcctgatgggaggtgattggatcatgggggcagacttcccccttgccattctccttactgtgagtgagttctcacagagctggctgtttaaaaatttgtagcacctcccccttcattctctttctcctgctccggccgtgtaagacgtgcctgcttcctctttgcttcccgccatgattgtaagttttctgaggccttccc

SEQ ID NO: 684728 - DNA, 504 bp, Homo sapiens
aaaaaaaaaatatawatatatatatatatatatatatatatatatatatatatatatataggtttcaattttgcagggttggtgagaagatgaaataagctaatgaacacaaagctcttagcatagtttatgttatgttacatggcagtcactcaataaatggtagctattgaaatgaacctattgcattttgatgaaataagcaattctgtttttgttgttgttgttagggtgctatggtttggatttgtgtccccatccaaatctcatgtgtgaattataatccccagtgatggaggaggggcctgatgggaggtgattggatcatgggggcagacttcccccttgccattctccttactgtgagtgagttctcacagagctggctgtttaaaaatttgtagcacctcccccttcattctctttctcctgctccggccgtgtaagacgtgcctgcttcctctttgcttcccgccatgattgtaagttttctgaggccttccc

SEQ ID NO: 684729 - DNA, 594 bp, Homo sapiens
tcccaagcctccttctcccagccctgctctggcctagacagcargtctgagtcggcctgccctgaagggtggggaagccggcctctggttcacagggaggatgccactgggcttttcctcctctatcagacagtgccctcccccatcggcctcggcaccagcccatcgggcttccctggggcagtgggctctgctgtctgtggacctcagcgagggcactgtagggagtggggcggtgagcgattggctgggcagggttgtggggggctctagcatccctgtctccgctctagatgcccccggtcaccgtcacagggggagatgcctgacacacttgcagcaggccaggtactccgcacctcgcccgcccggcctgcctgcggcaggcgtctgcctgactgttccaaccgggctgatttccgccatgatttcctcatttactctgtgtgtgtgtgtgtgtgtgtgtgtgtgtgtgtgtgtgttttaaccttcttttatgccaagtgtatttttgtgagctgcctcaaatctttttggaataaggcaaagcagacataaaaattaaaaatagtattttttgttgttgttaatgga

SEQ ID NO: 684730 - DNA, 594 bp, Homo sapiens
tcccaagcctccttctcccagccctgctctggcctagacagcaagtctgagtcggcctgccctgaagggtggggaagccggcctctggttcacagggaggatgccactgggcttttcctcctctatcagacagtgccctcccccatcggcctcggcaccagcccatcgggcttccctggggcagtgggctctgctgtctgwggacctcagcgagggcactgtagggagtggggcggtgagcgattggctgggcagggttgtggggggctctagcatccctgtctccgctctagatgcccccggtcaccgtcacagggggagatgcctgacacacttgcagcaggccaggtactccgcacctcgcccgcccggcctgcctgcggcaggcgtctgcctgactgttccaaccgggctgatttccgccatgatttcctcatttactctgtgtgtgtgtgtgtgtgtgtgtgtgtgtgtgtgtgtgttttaaccttcttttatgccaagtgtatttttgtgagctgcctcaaatctttttggaataaggcaaagcagacataaaaattaaaaatagtattttttgttgttgttaatgga

SEQ ID NO: 684731 - DNA, 609 bp, Homo sapiens
atataacatttatagattacacttcctactattaaagagaaaaaaaatatttcactaaacatagtaattgaaaaaaacatttctcagcctggcaaggtggctcatgcctgtaatcccaccactttcagaggccatggcaggaggattacttgagcccaggagttccagactagactggacaacacagtgagacctctattaaaaaaatacaaagaaatgctgggtgtgatggtgtacacttgtggtcccagcttctagggatgtggaagcagaagggttgcttgagcccaggtggttgaggctacagagagctgtgatcacaccactgcactccagcctggacaagggagcaagaccctgtctcaaaaaaaaaaaaatagaaaaaagaaaaaacatttctcaactcattcctcttccttacatttttaacattctcactttttktgtgtgtttttttttttttttgcattttaacgaaacacatttaatatcctatgtttaggaagtcagtgaagatggtggagtgaaggacctccaaaaattatctccttcataaaagcagtgagagagaacaatggcaaaataccgtcaaaatcaacttttttcagg

SEQ ID NO: 684732 - DNA, 608 bp, Homo sapiens
  misc_feature 367: n = A,T,C or G
atagaattacaacctcagggcttggctgggagctgaggtgtcgccctttaatctccatcctagaatcatattttagtaatccagcaacggagtgttattactcaagtgcagatgaagttttgattttctgcatctttaaactcactatgcaacagagtccctcggggctttttaagagaagcagccctttgagagttgtggygcttgatgataatatcgcatgtggcacttccttagtacttatttcccctgagaaaaggggaaaggacgggctttactccagggtactactgcaatgttagaagcagcctttctttatggtgagcgagcagtgtgtttgcagaagcatttcctattgagagcttcnttgtcttcccatataactgcaagacacctgccccgagttcactgtaaacttgtctggtggagcaatgcgtctaaccacaagctgggtcattcaggaatatcccatagcagtatagtatttatttctctttggtgtccatttctcataactgtgttacaaaggcgtgtttacctaggtgacagcaatgacttaacagcgggcttgtatccaatacccattctgtttagaagacactggctac

SEQ ID NO: 684733 - DNA, 608 bp, Homo sapiens
  misc_feature 367: n = A,T,C or G
atagaattacaacctcagggcttggctgggagctgaggtgtcgccctttaatctccatcctagaatcatattttagtaatccagcaacggagtgttattactcaagtgcagatgaagttttgattttctgcatctttaaactcactatgcaacagagtccctcggggctttttaagagaagcagccctttgagagttgtggcgcttgatgataatatcgcatgtggcacttccttagtacttatttcccctgagaaaaggggaaaggacgggctttactccagggtactactgcaatgttagaagcagcctttctttatggtgagcgagcagtgtgtttgcagaagcatttcctattgagagcttcnttgtcttcccatataactgcaagacacctgccccgagttcactgtaaacttgtctggtggagcaatgcgtctaaccacaagctgggtcattcaggaatatcccatagcagtatagtatttatttctctttggtgtccatttctcataactgtgttacaaaggcrtgtttacctaggtgacagcaatgacttaacagcgggcttgtatccaatacccattctgtttagaagacactggctac

SEQ ID NO: 684734 - DNA, 1865 bp, Homo sapiens
tctgcagtaaacttttccctctttaagtaggaagaattctgtccacttgaaggttaaaaaaatgggaaccagtctctatttttttatttccttcctttcactagagatagctgcttcttttatgttttaattggagaacacagttcatttaaaatgttttctaagtagttattaggttttatttatatatgtatacacatacatgtacttttttcagttggctacttcaaatatttttaaatgatgtgctttatatgcagtacattaatgggagtaggtaggaagattacatttataacatgctatgcctgctgatgtctttggtatcacaaaaaactatataaaattagttaaatcaagtgtgttagaaagaaaaatattagtcaggatctccaataaaaagcatatacaaccaattctaaattttccaagacttttcccctcactgttggtcttttgaactagtttactaatattagcatttgaagttaggagtagagcaaaagagaaacagggggtgacacttattttgaatcaatatatgagaacatttaggtagaagggaggccagagacttaagtgattaaaataaacttaggagtttaactttcccttcagttatccattaccttgctacctttctcaatattttattttattattcttaatgacagtttggcaacagatgtgatttccttgccaaacccacttccaaaacatctatatacttctactcttttgtataatcctccaaaagaggataatcctccaaaagaatgccacaatgggaaagagtttccaagaccagcaaaatggatcctgccaaaagctgcagtttctgcctgccactaaatgatcctatctactcattgagtttggtcattcatactttgtagatacctgaatcttgcgtccataaagagctcccctgaagcttctggaatctagatacagactgtggtagggacaaaactgctctggatcagaatagagaaaaaggatttcctggtgctggggctacacttttctgaagaattctcatgcactgaatgattctaggagccctctggccttctggtacatctggagcagtcataaatactctttgcaattccccctgaaatcttcccttggaataattaagtcagtagagaggacacaaaagtcatgctctaggccagcctagaaggccaaggacacagcagaaaatctcccacaacttggaaacattaattggcaaaatcttcatcatatctgcatgcttatagtgtatgctgtatgccaatatagtcagatgatcagtgccctcttggggcacataaatgttatataagaaacgcacactggcagaaagcattccctggaagagaaagggagtgagaaaaaagctcttcaaatggattccatctacagaaagaataaaactgaggctagaacttcctaaacaatgagcaattctagttacatataattatttgtgacactgatttatctgggcaaaagggtgtattctgcccagacattcttatgactattgtataaaactagagtctttatttcaaggcataaagttgatatttattagagaggatccgtgggatttcattgacataatttggaattttgcagatctggatcctgagtattattagagttcgaccattctgatggactttcttcttgacaattaatgggtcttccaattcaactaaagaagacaggcccctggaaaatactttattwttgtgatttctgggttattcattttgtaatcaatttttgtggagacaggttgacatataattggaccttagagaattctgtttttatgggggcattgcagggtagcattttgtttcataatg

SEQ ID NO: 684735 - DNA, 1531 bp, Homo sapiens
agcaggtattaagaatatgtggcacatttcacaatggcagtatttgttgaggttttctgctgctgctgctgctattattattatttttccttacagagagtctgaagttcaaagacagggcaaatctgagatagttcagaggttcagtagttgctataggtggttgaaagcctatggggaaactgttcctgtctaatgcagccctcaccagtttatccagggcttgaccctggattagggcataggtgaaacttggagacctccaaaggttctagttactctgacattcctaaaatgttgggttccagaccagcctaaatgtgtttaaataacttggaaactttgggggaaggagcaaacttcctctccctctcacttcccttagtgattgatgaatgtgcccatttatttacatatcttgttccagagccacctaaagattaaatgtgctaagttcagagctattcttctctctttaccctgctcctaaatgtgtgattctcctagttgtaaaaatgtttacttgtattaacaaagaaaaattgggaatattgtaatcattggattaacttcactaaagttctacaattatcaggagttaagtaatataggtgatacagaccttctaaatccataataaagttttccatccttagtcagacatctatggctgatggatcagaccttcagctgtattttctctcttcactgatctgcaaaacaggctagatcattgcaactctcaccattaagattcaactaaaagctctctggactccaacacattcttattccataatgattaaggcaaaagcttctttcctaaacctgcaaccaaagagactagtgatgatggtaatatctgttgttaatgatgctaaaacaagttattgtttggttctccagtggttaaactgaatgaggcccagatcgcttgcaaaaggtacctccaaagagggccacaggtctttggctacaagtcacccataggggtttttctagctgtaatctctgatcatgactaggttataaaatctgtaaagaaagaacaaatttctgtaggccttcagggcatagtgcaagacccagctgttccatcaagttcttatttgattgaagtaaatgggccaacctggctggaaagcatgttaatattttaaatttctacattaacaactgtacacgtgcccagaggatgggtgatgaccacctcacataattgcaaaaaacaaaastgataagaataaataaatccaagcaaattggattaccatttgcagaagaactgccagcaaaggcaagggagagaatgtcactgatacatgttcctacttcagcaaggtatttgacaccttctcttgtgaattgcatgaatggtgttaattcaagttggctggcctatgttttcagcatgggctgaaggagtgcacccagcatggctaggctggggctgaacaaccgacctttctctctgaatattaatccccagtactgcccactcatatgacttaaatgtcacttcacctcgtgg

SEQ ID NO: 684736 - DNA, 928 bp, Homo sapiens
caggcaccaacccccacgcccggctaagtttttttgtatttttagtagagacggggtttcaccttgttagccaggatggtgtcaatctcctgacctcgtgatctgcccgcctcggcctcccaaagtgctgggattacaggcgtgagccaccgcgcccgacctagtcactgaaaattctttacttaatatgtaatatttctggcctttgttaattctcttcctctaaaccagcactactgtggggtgtcttttctttccaagattattctatcagaagtttacgtgatatatatagagagagatggatagatagatatgaatatatatgtattgttttttcaaattttccattctgttggaaacagttttcctagacaaataacaattggggggcccaagcgaactccactgttgtcctcaatgcacgtggtcatagtcttatcctctcatgtattcagcattaatgatgaaaccatgccatgagaaagattattgagctgggaggctgtgaacctgatgtaaatttcaagcttttgtcaccttacaagctactggattaagggtaaactattgcctttcattggcttgctttcctcgtgtgcaaaatgttatctttaaatactctaatgtcaaaaaaatrgaatgattaagccctactatttgagagcacaacaggttgattatagtcaataatatcttaattgtacttttcaaaataactaaaagggtataattagattgtttgtaatacaaatgataaatgcttgagggaatggataccccattctccatgatgtgattattacgcattgcatgcctgtagcaaaacatctcatgtacgccataaatatatacgcctactatgtacccacaaaaattaaaaatgaataatgtcacttgtactctaagaaacaaacttactgtgcta

SEQ ID NO: 684737 - DNA, 1368 bp, Homo sapiens
ccatcttagaagaagagagcagcccatatcagacagctgaatctgtggtgccttgattggactttccaacctccagaactgtaagaagtaaatttctgttctttataaattatccagtctcaggtatttttgttatagcagcacaaaacagactaagacacagccagagttctgaaaggaaggtagtgagtgagcctgagagggagactatttgctggctatgtttctgaagcttttcatagaaatccataaaaactagcttgcacagacgtactgtgacatttccgtggagaaatatgagcaatttgagtgaaagtctgtgggataagctggaggaagcatattagcatgcaatacttaatgtgagttctgctttcccttcggtcacataaatgarcaatttgcaagcagattattacctagcccagttaagaattttccatccttttttaaaaacaaaaacaaaaaacaaaaaactccttttaaaaattgatgtctagctgggaacttacaagagattagcacatatggcatagtgacgtaagcaagaagttttaacattgttatttaatttaataaccatatttaataacttgtagtttttgaaagtttatccagagcttaaatttggtcatattttattttttcttttatattttccttttttctttcttactctctctttttgagtgtgtgagagaaaaaacaataggacatttcctttatctaaaacttcatagaaactcttgtagaatttgtcctcactaaagacaacaagtatgccatcctaaaaaataaataccagcaagcaaattcaataagataggaaattaaggctgagaaacaaaaactgactggaactctttaagtcctctctgatttatcatcttaaatagttggtacagcactctcaaaatttctggatcaaatgagagttgttagtgacttcacaatgtaaaatcaacccaaattatggaacaaactttttataatcaaattatattttactccagccttaaatcaatataacacttgctttctaaatcaagttttgtgtattcgggctgtattggatttttataaaactttacagcaactcattaagtaagctaaatagatcaagaagttttgtatgtgttataatgttaacttttttgtgttttgactagaaaactaggcatgtttctttaagatgactaaattttctattattacgtagatatatgtatatattatatatgcattatgtagttgcactatttgaaggtccaataggaattttttttctctgaatttttttcctcctacaccctgaactcctccggcatgtctccattatattttctttgtgaatcacagtacgatctt

SEQ ID NO: 684738 - DNA, 1025 bp, Homo sapiens
atggggtaaaaaattawaaagtaccagatgaagcttacataatatctatcttgtaagtttattctcctccctgtctgtacataccgtttctcagatcaaaaggtagagctcactttccttctctttgaattctgacttataactgaatatgaccacgagaatagcaatttcagaagaagaaatgatgttctgagaccttgaagtccaggctttaagaggaatggaagtttctacttttggccttttggaacgcagtcaccatgctgtgaggatcccagatcatatggaaagaccacgtagaggagaacagaggtgctccagttggcagccctaattaagctcctagtggacagtcagaaccaactgtaagccattttggatgttctggatgtccaggttgaaccccccccagtgactgcagccccagggagtatcacatggagcagaagaactgactgagcctagccaacttgcagtgtcatgagagataatatagtcattgttttaagtaactacattttgggatggcttgtgatacagtagtagatacttaaaacatctcactattggtattatttgtgtccagttattcatgcctaccaatgacatggaatcataactataagaacaaactagtagtgttagtgaatcactaaacagctcatgaatttttgtcctcacatttcctagtctgagtcatattattcaaaattccattctggatatcttgtataacacattccaggaatatgtgtaatatattccaagattctctgaatgtgtaactggaggattgtttaagaaactaagattacattttttaagagttggaaagtcagagaatctatgatctggtatgtctgggtctctccccatccgcagaagacacaaatgaaagctagacaatctgaaattatcctcctctctcttacatcaagaagcctagaaagtataataaaaagacactaataattaaaaattttggttgtgatcaaaaagatacaacatatttattataggcttac

SEQ ID NO: 684739 - DNA, 1025 bp, Homo sapiens
atggggtaaaaaattaaaaagtaccagatgaagcttacataatatctatcttgtaagtttattctcctccctgtctgtacataccrtttctcagatcaaaaggtagagctcactttccttctctttgaattctgacttataactgaatatgaccacgagaatagcaatttcagaagaagaaatgatgttctgagaccttgaagtccaggctttaagaggaatggaagtttctacttttggccttttggaacgcagtcaccatgctgtgaggatcccagatcatatggaaagaccacgtagaggagaacagaggtgctccagttggcagccctaattaagctcctagtggacagtcagaaccaactgtaagccattttggatgttctggatgtccaggttgaaccccccccagtgactgcagccccagggagtatcacatggagcagaagaactgactgagcctagccaacttgcagtgtcatgagagataatatagtcattgttttaagtaactacattttgggatggcttgtgatacagtagtagatacttaaaacatctcactattggtattatttgtgtccagttattcatgcctaccaatgacatggaatcataactataagaacaaactagtagtgttagtgaatcactaaacagctcatgaatttttgtcctcacatttcctagtctgagtcatattattcaaaattccattctggatatcttgtataacacattccaggaatatgtgtaatatattccaagattctctgaatgtgtaactggaggattgtttaagaaactaagattacattttttaagagttggaaagtcagagaatctatgatctggtatgtctgggtctctccccatccgcagaagacacaaatgaaagctagacaatctgaaattatcctcctctctcttacatcaagaagcctagaaagtataataaaaagacactaataattaaaaattttggttgtgatcaaaaagatacaacatatttattataggcttac

SEQ ID NO: 684740 - DNA, 596 bp, Homo sapiens
cggcacactcacacattcacagacaatttaagattagtctcagatgagcacacactaacacactcatccagtggtgagcttgggagagtgaggaggaattccggcctttgagccatgcttgtttggtgtcaggagggacttgggattcaggggctcagccactgccctgtctgcccaccacctagtttcagcagacaamcccccattttggagatccctggaggcaggctggggatgagaggaatgatgcagccccctgtgtcctgcccaggtcagcatcggctgcccagagaagatggagcccatcaccaagatctcgcatatcccagccagccgctgggctctgtcctgcagcctctgcaaggaatgcacaggcacctgcatccaggtatgtggcctacttcacctcctgctgccaggagctggctgagaggcatgcttggggcctcagacagcagctgccaccaccttctcccctccatggggctgcagactgatgggccccagaggggtgtgggactggggccagagtcagaatcgcacctgttggggagcatttctccatcccctggtcttctagggagtgggaacagacc

SEQ ID NO: 684741 - DNA, 635 bp, Homo sapiens
acagagttgtcattgtaaacgttagttgtgccttcacccatccacggaccttcaaaaggatttgtgagtgcagcatcagcagtcataatagttgggtgcgtgattgctgacacagttatcatcatccaaggctaagagagagggtcaggcctcaagctgtctggatgaaaggagagggaaggggactaagtccagcccctcttcccagaggacaaaaaggggaccacagtccccatcttagatgagccagtgacccatcatcagcctttctcttgatgctctgtgatgccaaagtcattttgcccacacaaaaatgcagcttgaggccrggcacggtggctcacgcctgtaatcccagcactttgggaggccgaggcaggtggatcacctgaggtcaggagttcgagaccagcctggccaacatggcgaaacctcatctctaaaaatacaaaaactaggtggtgcatgcctgtagccctagctacttgggaggctgaggcaggagaatcgcttgaacctgggaagcggaggttgcggtgagatggaaccactgcactccagcctagcaacagagtgagactctgtctcaaaaaaaaaaaaatgcagcttgtccccagaggtgtttctcaaccgtc

SEQ ID NO: 684742 - DNA, 604 bp, Homo sapiens
tcctgcgtcacagcgttccatgtcacatgcgcctttgaccacggcctggaaatgcggactatattagcagacaacgatgaggtcaagttcaagtcattctgccaggagcacagtgacgggggcccacgtaatgagcccacatctgagcccacggaacccagccaggctggcgaggacctggaaaaggtgaccctgcgcaagcagcggctgcagcagctagaggaggacttctacgagctggtggagccggctgaggtggctgagcggctggacctggctgaggcactggtcgacttcatctaccagtactggaagctgaagaggaaagccaatgccaaccagccgctgctgacccccaagaccgacgaggtggacaacctggcccagcaggagcaggacgtcctctaccgccgcctgaagctcttcacccatctgcggcaggacctagagagggtgagtccccatgccgcytgcccaccccctgcctggtgggtccaggagtcctttccatgccacactcactgccctggagcagctaggactcaccaggactcaaactgtgagctctggtggaccggccctgctgcaggagcctgccaagggg

SEQ ID NO: 684743 - DNA, 651 bp, Homo sapiens
agggtagatgggtaaacgcggctccgtggggtgctgggcaaacagaacagaggcacgaaggagacagggtggactcaaggaacggtggagtggaaggaagaggtgaaaggggctggtggatcgcacgagactgggctggtggatcacagtgtgtctggaagctgcagaagtgctaaggagggactgacatactgtggctgggacttgcacccaacactccctggaggagaagtcccagagtctggaatgggtgggctggctgaaaaccacccccagctgtgtgctgggaaacaggtgacggtggcttggtccagggggctgagtgaaatgaagcaggatttctggatccttttccagtcctctgaaccccacaggctgttctggtctctcctctctgggacatttctagggttccagagcatatgggaccgtgtcacagtgtctcccctgggttcagacatacatgctcaccctctccctgggtcctgtcaggaaatagccctgggcaggagcatgcagggaacgttgtgtgacccaaggcgcctgcttttcttatctgcatcgcagtgggcaaggctgtaaaatgggtagaacatctccargggtgttgtactgtcagggaaggggcactggacccagcttccccaatcc

SEQ ID NO: 684744 - DNA, 640 bp, Homo sapiens
taggaaattcactgtgtgtgtgtgtgtgtgtgtgtgtgtgtgtgtgtgactgatatcaggatcgctaggcctaacattctgtgaaacacctccaatattgttttgaaaaacaattagttcttcagctccttatttttccttgctatgtactcattaaacaattacattatgttagctggaaacggaggcatctaacaatgaatgttagtctttaaaaaaaactaaatgttatcttctcaaattattgctataaattttccttaaaacttttgtgacactgccatttactttatcatatttgaatattaaaaggcatttgattcaaaattaaatatataagaaaatttatattattatatatgtktctgatattctgaaacagtatattaattaaaagttttgccacaggaaaaaaaagtgagagtaccaatatacgatgtatgcaagaaaaaagcaataataaagtatcatgaactttaggtacatatatctgaccataaataaaaatatagccatccttaatgttgtaatgattcagtgctgcatcgggactgttagcaataatataagtatagaatttatcttgcaaccgggaaccattttgagatgaaagaaggcacaatcagtaattatactagaa

SEQ ID NO: 684745 - DNA, 580 bp, Homo sapiens
agtttagaccaaaggggatattttgcattttgtgctgttttcctctgcagtttaatatataacaaggaaaatataattttagtctaaaattgaaacaatgataactaaaaagaaaagaatgttagatcttctctgcataaacctacaaatgtcttaacctctccactaagttcatctgtaataaatgattttttgcaaaatgatctctaacttttatgaataagacacctgatacacatgagcataagtctgagtacatacagtggcttgcstaccttgttgccttgaaatgctattttcttttcttacataatacagttagattagaaacaaaagtttcctaaattggaatttattacccattaggtcataaatccaatatttctacaattgagaacttttaaattccaatttgagtgctttgttgttatattattcattattcttttgcaacttgagcctttccacttaggcactggaaaattagctgagaaaatgaaagtaattcagactcctccctcatatactttgcctaatacagataacgtgtatttattctcaatattatctttcattctca

SEQ ID NO: 684746 - DNA, 3054 bp, Homo sapiens
tggcttactatatctcatcctatctggctgtcatatactacatrcattatgttgcagtactatcttcaagagtaattgttacctttttcttctactggcctgccttagttgccccaggctgagtcgttttatttttgctgatccttcgttttccttaccacatctactgaaaaggtctttctctagtttctcagttattatagaacatattttttctaatacttttgcaaaatgaccatgtatcatctttcgacaactttcataccgtgttaatatctttctctccaaatagattgcacttctcctgtctcatcagccttccgtatcaaccccttttcctaagctaatgctctgtgtgtcttaagtgctcaattaatgtgtttgatcatttggagttggagaagccgttgctcatccatactttcttctttctaaggtgagcccacaaaggttgggatatgagatcctctttctttgtacaattcctgggatatctggcttactacatttatttttctaatccaatttgagacagagatgcacaacatgtttatttccattagaagggagggcaatatgaatagattccttccaaatatctattagcactgtcaaaatctttaaggctgcatgtaaaagatttgaggctaaaagtcatatatatattttcaaatattctgagtgtcacttgtgcatcacaaattcttctcataaacgttttttatgtttaccgtctctgctaaaaattttaacttgcttcatgtatgtgtctgtgctggtggttggataattttaaaagagattcttctgatttgaatggagtctttttggtaatttcaactttataggtctaaacagaagagaacataaagacgcagacttcacattcaggaagacctaggttttaatcccatctccactacttcctgactctgtgacttaacaagatacctaaattttttgttccttaggttcctcattaactaaattagagtaactaataatttttgtatatttgtccagtgtctggcacaacaaaagtgatcaatgaatctgagtcattcttgaagagaatgattttcatctttatgaaagtcaacctgaagtttatgataatcaagttcttccataaatgtcattcagtatagtcattcttctcctcttttatgaagcttcttctccataaatcagagcttcactcaaaaacacataatttacggaccaataaggacttcttgaatgccaaatcaattgagaggttagcacaatatgggcaccatgagttgaatcagagggagtacaaggaagattcatgtcctaattttataataatcccctaagattgagttattatgttgttttattctgaagagttgtttctttgccttgttttcttttttaaaagatcaggaatattaagattgtttgtcttcaattttggtcaatcaaaagaatgaagataggaagaaataaataaagggagaatagcaacaacagaagtcagggaggcagggagagagggacagtagagaaggagagaaaccaattgtgttaagaagaaactgaaataagcagtcaggtgaaatctctctagaggaagaacaaatgagcacaacttgactttcatgtaacccttaatctatttagagaaggaagaattgggaaatgaagtacttctcagcagtagtttaagtgaagaactaaaattaatttacttgattttcaagctatgagacttgtttatactctatagaaaccacaatttcacactcctagattctagtacaatgttgacaaaacaacttccttgaaaaatcaggcaaactactcaccaccaactgtattgcatggaagatgtctttattgtgtgaaataatcacccttctactaattgaataaagcaaactcctttagaacccagaaaaggatatttgaaagatgatggacatggttactagggtcttaattgaaaagaattgttattacttcacattaatttaaacagtaaaaactgtgagaactctatcaatacaattgaatagttacattgagccaactttgttttaaatgtcaatggtctaaaaactttcaggctaaataaagaagaacaaacttttaaagcaagaatgcaatttttatttgaattattggaatactaaatggatactattgatgcaatttaatccaaaagcaaaattattgtaaacaaatccaaaaatgaaattattgtaaacaactatagccaagatttttactcagaaaaactgacctcaagaaaaaaataaatttaaaacatgttgtatgccagataatgttctgctgtatttgtattgataaatgtatatgaaatcattttttgtatgataaaaaactaatgcaaaggagctggatcatgagttgctgcaaaatctctatgtattaccgttgtatcagctaggtactgccagaacaaagctacataacaaacaaacaaaaatctcagtggcatattagtatagacatttttgaaggtaatatatctgtgggtagggaggaagtttattgacccaggctgggctcggctgggtgcctctcattcaagttgggcgtggttacctgctggggtttctgcttagatttgcttcgcgtgtgtttatgcttgaattcgtgttgacaaggcagcagctaatgagaggaaactcctctcatgtcaatggcagacagcacaagaggacaagtagaaacagtcaaggtatcttaaggtctggtcatgcaatttgcatacccctcactgctaccccattcaactggccatagcagaaaaattgtgggaagatctgcaaaatcacatagcaaagagcatggttataggaagggcctttaattacggcctgttatgcagcccaacaccacaaccatcttcatataaaacaataccattgttaatcacaggaaggaccacaaaggacaattataaatctataaacatttccaaacagatatctgaatggaagttgtctgactggaagaagacctagttagagaaatttactgtggtatatcagtgaggaaaaa

SEQ ID NO: 684747 - DNA, 3054 bp, Homo sapiens
tggcttactatatctcatcctatctggctgtcatatactacatacattatgttgcagtactatcttcaagagtaattgttacctttttcttctactggcctgccttagttgccccasgctgagtcgttttatttttgctgatccttcgttttccttaccacatctactgaaaaggtctttctctagtttctcagttattatagaacatattttttctaatacttttgcaaaatgaccatgtatcatctttcgacaactttcataccgtgttaatatctttctctccaaatagattgcacttctcctgtctcatcagccttccgtatcaaccccttttcctaagctaatgctctgtgtgtcttaagtgctcaattaatgtgtttgatcatttggagttggagaagccgttgctcatccatactttcttctttctaaggtgagcccacaaaggttgggatatgagatcctctttctttgtacaattcctgggatatctggcttactacatttatttttctaatccaatttgagacagagatgcacaacatgtttatttccattagaagggagggcaatatgaatagattccttccaaatatctattagcactgtcaaaatctttaaggctgcatgtaaaagatttgaggctaaaagtcatatatatattttcaaatattctgagtgtcacttgtgcatcacaaattcttctcataaacgttttttatgtttaccgtctctgctaaaaattttaacttgcttcatgtatgtgtctgtgctggtggttggataattttaaaagagattcttctgatttgaatggagtctttttggtaatttcaactttataggtctaaacagaagagaacataaagacgcagacttcacattcaggaagacctaggttttaatcccatctccactacttcctgactctgtgacttaacaagatacctaaattttttgttccttaggttcctcattaactaaattagagtaactaataatttttgtatatttgtccagtgtctggcacaacaaaagtgatcaatgaatctgagtcattcttgaagagaatgattttcatctttatgaaagtcaacctgaagtttatgataatcaagttcttccataaatgtcattcagtatagtcattcttctcctcttttatgaagcttcttctccataaatcagagcttcactcaaaaacacataatttacggaccaataaggacttcttgaatgccaaatcaattgagaggttagcacaatatgggcaccatgagttgaatcagagggagtacaaggaagattcatgtcctaattttataataatcccctaagattgagttattatgttgttttattctgaagagttgtttctttgccttgttttcttttttaaaagatcaggaatattaagattgtttgtcttcaattttggtcaatcaaaagaatgaagataggaagaaataaataaagggagaatagcaacaacagaagtcagggaggcagggagagagggacagtagagaaggagagaaaccaattgtgttaagaagaaactgaaataagcagtcaggtgaaatctctctagaggaagaacaaatgagcacaacttgactttcatgtaacccttaatctatttagagaaggaagaattgggaaatgaagtacttctcagcagtagtttaagtgaagaactaaaattaatttacttgattttcaagctatgagacttgtttatactctatagaaaccacaatttcacactcctagattctagtacaatgttgacaaaacaacttccttgaaaaatcaggcaaactactcaccaccaactgtattgcatggaagatgtctttattgtgtgaaataatcacccttctactaattgaataaagcaaactcctttagaacccagaaaaggatatttgaaagatgatggacatggttactagggtcttaattgaaaagaattgttattacttcacattaatttaaacagtaaaaactgtgagaactctatcaatacaattgaatagttacattgagccaactttgttttaaatgtcaatggtctaaaaactttcaggctaaataaagaagaacaaacttttaaagcaagaatgcaatttttatttgaattattggaatactaaatggatactattgatgcaatttaatccaaaagcaaaattattgtaaacaaatccaaaaatgaaattattgtaaacaactatagccaagatttttactcagaaaaactgacctcaagaaaaaaataaatttaaaacatgttgtatgccagataatgttctgctgtatttgtattgataaatgtatatgaaatcattttttgtatgataaaaaactaatgcaaaggagctggatcatgagttgctgcaaaatctctatgtattaccgttgtatcagctaggtactgccagaacaaagctacataacaaacaaacaaaaatctcagtggcatattagtatagacatttttgaaggtaatatatctgtgggtagggaggaagtttattgacccaggctgggctcggctgggtgcctctcattcaagttgggcgtggttacctgctggggtttctgcttagatttgcttcgcgtgtgtttatgcttgaattcgtgttgacaaggcagcagctaatgagaggaaactcctctcatgtcaatggcagacagcacaagaggacaagtagaaacagtcaaggtatcttaaggtctggtcatgcaatttgcatacccctcactgctaccccattcaactggccatagcagaaaaattgtgggaagatctgcaaaatcacatagcaaagagcatggttataggaagggcctttaattacggcctgttatgcagcccaacaccacaaccatcttcatataaaacaataccattgttaatcacaggaaggaccacaaaggacaattataaatctataaacatttccaaacagatatctgaatggaagttgtctgactggaagaagacctagttagagaaatttactgtggtatatcagtgaggaaaaa

SEQ ID NO: 684748 - DNA, 3054 bp, Homo sapiens
tggcttactatatctcatcctatctggctgtcatatactacatacattatgttgcagtactatcttcaagagtaattgttacctttttcttctactggcctgccttagttgccccaggctgagtygttttatttttgctgatccttcgttttccttaccacatctactgaaaaggtctttctctagtttctcagttattatagaacatattttttctaatacttttgcaaaatgaccatgtatcatctttcgacaactttcataccgtgttaatatctttctctccaaatagattgcacttctcctgtctcatcagccttccgtatcaaccccttttcctaagctaatgctctgtgtgtcttaagtgctcaattaatgtgtttgatcatttggagttggagaagccgttgctcatccatactttcttctttctaaggtgagcccacaaaggttgggatatgagatcctctttctttgtacaattcctgggatatctggcttactacatttatttttctaatccaatttgagacagagatgcacaacatgtttatttccattagaagggagggcaatatgaatagattccttccaaatatctattagcactgtcaaaatctttaaggctgcatgtaaaagatttgaggctaaaagtcatatatatattttcaaatattctgagtgtcacttgtgcatcacaaattcttctcataaacgttttttatgtttaccgtctctgctaaaaattttaacttgcttcatgtatgtgtctgtgctggtggttggataattttaaaagagattcttctgatttgaatggagtctttttggtaatttcaactttataggtctaaacagaagagaacataaagacgcagacttcacattcaggaagacctaggttttaatcccatctccactacttcctgactctgtgacttaacaagatacctaaattttttgttccttaggttcctcattaactaaattagagtaactaataatttttgtatatttgtccagtgtctggcacaacaaaagtgatcaatgaatctgagtcattcttgaagagaatgattttcatctttatgaaagtcaacctgaagtttatgataatcaagttcttccataaatgtcattcagtatagtcattcttctcctcttttatgaagcttcttctccataaatcagagcttcactcaaaaacacataatttacggaccaataaggacttcttgaatgccaaatcaattgagaggttagcacaatatgggcaccatgagttgaatcagagggagtacaaggaagattcatgtcctaattttataataatcccctaagattgagttattatgttgttttattctgaagagttgtttctttgccttgttttcttttttaaaagatcaggaatattaagattgtttgtcttcaattttggtcaatcaaaagaatgaagataggaagaaataaataaagggagaatagcaacaacagaagtcagggaggcagggagagagggacagtagagaaggagagaaaccaattgtgttaagaagaaactgaaataagcagtcaggtgaaatctctctagaggaagaacaaatgagcacaacttgactttcatgtaacccttaatctatttagagaaggaagaattgggaaatgaagtacttctcagcagtagtttaagtgaagaactaaaattaatttacttgattttcaagctatgagacttgtttatactctatagaaaccacaatttcacactcctagattctagtacaatgttgacaaaacaacttccttgaaaaatcaggcaaactactcaccaccaactgtattgcatggaagatgtctttattgtgtgaaataatcacccttctactaattgaataaagcaaactcctttagaacccagaaaaggatatttgaaagatgatggacatggttactagggtcttaattgaaaagaattgttattacttcacattaatttaaacagtaaaaactgtgagaactctatcaatacaattgaatagttacattgagccaactttgttttaaatgtcaatggtctaaaaactttcaggctaaataaagaagaacaaacttttaaagcaagaatgcaatttttatttgaattattggaatactaaatggatactattgatgcaatttaatccaaaagcaaaattattgtaaacaaatccaaaaatgaaattattgtaaacaactatagccaagatttttactcagaaaaactgacctcaagaaaaaaataaatttaaaacatgttgtatgccagataatgttctgctgtatttgtattgataaatgtatatgaaatcattttttgtatgataaaaaactaatgcaaaggagctggatcatgagttgctgcaaaatctctatgtattaccgttgtatcagctaggtactgccagaacaaagctacataacaaacaaacaaaaatctcagtggcatattagtatagacatttttgaaggtaatatatctgtgggtagggaggaagtttattgacccaggctgggctcggctgggtgcctctcattcaagttgggcgtggttacctgctggggtttctgcttagatttgcttcgcgtgtgtttatgcttgaattcgtgttgacaaggcagcagctaatgagaggaaactcctctcatgtcaatggcagacagcacaagaggacaagtagaaacagtcaaggtatcttaaggtctggtcatgcaatttgcatacccctcactgctaccccattcaactggccatagcagaaaaattgtgggaagatctgcaaaatcacatagcaaagagcatggttataggaagggcctttaattacggcctgttatgcagcccaacaccacaaccatcttcatataaaacaataccattgttaatcacaggaaggaccacaaaggacaattataaatctataaacatttccaaacagatatctgaatggaagttgtctgactggaagaagacctagttagagaaatttactgtggtatatcagtgaggaaaaa

SEQ ID NO: 684749 - DNA, 3054 bp, Homo sapiens
tggcttactatatctcatcctatctggctgtcatatactacatacattatgttgcagtactatcttcaagagtaattgttacctttttcttctactggcctgccttagttgccccaggctgagtcgttttatttttgctgatccttcgttttccttaccacatctactgaaaaggtctttctctagtttctcagttattatagaacatattttttctaatacttttgcaaaatgaccatgtatcatctttcgacaactttcataccgtgttaatatctttctctccaaatagattgcacttctcctgtctcatcagccttccgtatcaaccccttttcctaagctaatgctctgtgtgtcttaagtgctcaattaatgtgtttgatcatttggagttggagaagccgttgctcatccatactttcttctttctaaggtgagcccacaaaggttgggatatgagatcctctttctttgtacaattcctgggatatctggcttactacatttatttttctaatccaatttgagacagagatgcacaacatgtttatttccattagaagggagggcaatatgaatagattccttccaaatatctattagcactgtcaaaatctttaaggctgcatgtaaaagatttgaggctaaaagtcatatatatattttcaaatattctgagtgtcacttgtgcatcacaaattcttctcataaacgttttttatgtttaccgtctctgctaaaaattttaacttgcttcatgtatgtgtctgtgctggtggttggataattttaaaagagattcttctgatttgaatggagtctttttggtaatttcaactttataggtctaaacagaagagaacataaagacgcagacttcacattcaggaagacctaggttttaatcccatctccactacttcctgactctgtgacttaacaagatacctaaattttttgttccttaggttcctcattaactaaattagagtaactaataatttttgtatatttgtccagtgtctggcacaacaaaagtgatcaatgaatctgagtcattcttgaagagaatkattttcatctttatgaaagtcaacctgaagtttatgataatcaagttcttccataaatgtcattcagtatagtcattcttctcctcttttatgaagcttcttctccataaatcagagcttcactcaaaaacacataatttacggaccaataaggacttcttgaatgccaaatcaattgagaggttagcacaatatgggcaccatgagttgaatcagagggagtacaaggaagattcatgtcctaattttataataatcccctaagattgagttattatgttgttttattctgaagagttgtttctttgccttgttttcttttttaaaagatcaggaatattaagattgtttgtcttcaattttggtcaatcaaaagaatgaagataggaagaaataaataaagggagaatagcaacaacagaagtcagggaggcagggagagagggacagtagagaaggagagaaaccaattgtgttaagaagaaactgaaataagcagtcaggtgaaatctctctagaggaagaacaaatgagcacaacttgactttcatgtaacccttaatctatttagagaaggaagaattgggaaatgaagtacttctcagcagtagtttaagtgaagaactaaaattaatttacttgattttcaagctatgagacttgtttatactctatagaaaccacaatttcacactcctagattctagtacaatgttgacaaaacaacttccttgaaaaatcaggcaaactactcaccaccaactgtattgcatggaagatgtctttattgtgtgaaataatcacccttctactaattgaataaagcaaactcctttagaacccagaaaaggatatttgaaagatgatggacatggttactagggtcttaattgaaaagaattgttattacttcacattaatttaaacagtaaaaactgtgagaactctatcaatacaattgaatagttacattgagccaactttgttttaaatgtcaatggtctaaaaactttcaggctaaataaagaagaacaaacttttaaagcaagaatgcaatttttatttgaattattggaatactaaatggatactattgatgcaatttaatccaaaagcaaaattattgtaaacaaatccaaaaatgaaattattgtaaacaactatagccaagatttttactcagaaaaactgacctcaagaaaaaaataaatttaaaacatgttgtatgccagataatgttctgctgtatttgtattgataaatgtatatgaaatcattttttgtatgataaaaaactaatgcaaaggagctggatcatgagttgctgcaaaatctctatgtattaccgttgtatcagctaggtactgccagaacaaagctacataacaaacaaacaaaaatctcagtggcatattagtatagacatttttgaaggtaatatatctgtgggtagggaggaagtttattgacccaggctgggctcggctgggtgcctctcattcaagttgggcgtggttacctgctggggtttctgcttagatttgcttcgcgtgtgtttatgcttgaattcgtgttgacaaggcagcagctaatgagaggaaactcctctcatgtcaatggcagacagcacaagaggacaagtagaaacagtcaaggtatcttaaggtctggtcatgcaatttgcatacccctcactgctaccccattcaactggccatagcagaaaaattgtgggaagatctgcaaaatcacatagcaaagagcatggttataggaagggcctttaattacggcctgttatgcagcccaacaccacaaccatcttcatataaaacaataccattgttaatcacaggaaggaccacaaaggacaattataaatctataaacatttccaaacagatatctgaatggaagttgtctgactggaagaagacctagttagagaaatttactgtggtatatcagtgaggaaaaa

SEQ ID NO: 684750 - DNA, 3054 bp, Homo sapiens
tggcttactatatctcatcctatctggctgtcatatactacatacattatgttgcagtactatcttcaagagtaattgttacctttttcttctactggcctgccttagttgccccaggctgagtcgttttatttttgctgatccttcgttttccttaccacatctactgaaaaggtctttctctagtttctcagttattatagaacatattttttctaatacttttgcaaaatgaccatgtatcatctttcgacaactttcataccgtgttaatatctttctctccaaatagattgcacttctcctgtctcatcagccttccgtatcaaccccttttcctaagctaatgctctgtgtgtcttaagtgctcaattaatgtgtttgatcatttggagttggagaagccgttgctcatccatactttcttctttctaaggtgagcccacaaaggttgggatatgagatcctctttctttgtacaattcctgggatatctggcttactacatttatttttctaatccaatttgagacagagatgcacaacatgtttatttccattagaagggagggcaatatgaatagattccttccaaatatctattagcactgtcaaaatctttaaggctgcatgtaaaagatttgaggctaaaagtcatatatatattttcaaatattctgagtgtcacttgtgcatcacaaattcttctcataaacgttttttatgtttaccgtctctgctaaaaattttaacttgcttcatgtatgtgtctgtgctggtggttggataattttaaaagagattcttctgatttgaatggagtctttttggtaatttcaactttataggtctaaacagaagagaacataaagacgcagacttcacattcaggaagacctaggttttaatcccatctccactacttcctgactctgtgacttaacaagatacctaaattttttgttccttaggttcctcattaactaaattagagtaactaataatttttgtatatttgtccagtgtctggcacaacaaaagtgatcaatgaatctgagtcattcttgaagagaatgattttcatctttatgaaagtcaacctgaagtttatgataatcaagttcttccataaatgtcattcagtatagtcattcttctcctcttttatgaagcttcttctccataaatcagagcttcactcaaaaacacataatttacggaccaataaggacttcttgaatgccaaatcaattgagaggttagcacaatatgggcaccatgagttgaatcagagggagtacaaggaagattcatgtcctaattttataataatcccctaagattgagttattatgttgttttattctgaagagttgtttctttgccttgttttcttttttaaaagatcaggaatattaagattgtttgtcttcaattttggtcaatcaaaagaatgaagataggaagaaataaataaagggagaatagcaacaacagaagtcagggaggcagggagagagggacagtagagaaggagagaaaccaattgtgttaagaagaaactgaaataagcagtcaggtgaaatctctctagaggaagaacaaatgagcacaacttgactttcatgtaacccttaatctatttagagaaggaagaattgggaaatgaagtacttctcagcagtagtttaagtgaagaactaaaattaatttacttgattttcaagctatgagacttgtttatactctatagaaaccacaatttcacactcctagattctagtacaatgttgacaaaacaacttccttgaaaaatcaggcaaactactcaccaccaactgtattgcatggaagatgtctttattgtgtgaaataatcacccttctactaattgaataaagcaaactcctttagaacccagaaaaggatatttgaaagatgatggacatggttactagggtcttaattgaaaagaattgttattacttcacattaatttaaacagtaaaaactgtgagaactctatcaatacaattgaatagttacattgagccaactttgttttaaatgtcaatggtctaaaaacyttcaggctaaataaagaagaacaaacttttaaagcaagaatgcaatttttatttgaattattggaatactaaatggatactattgatgcaatttaatccaaaagcaaaattattgtaaacaaatccaaaaatgaaattattgtaaacaactatagccaagatttttactcagaaaaactgacctcaagaaaaaaataaatttaaaacatgttgtatgccagataatgttctgctgtatttgtattgataaatgtatatgaaatcattttttgtatgataaaaaactaatgcaaaggagctggatcatgagttgctgcaaaatctctatgtattaccgttgtatcagctaggtactgccagaacaaagctacataacaaacaaacaaaaatctcagtggcatattagtatagacatttttgaaggtaatatatctgtgggtagggaggaagtttattgacccaggctgggctcggctgggtgcctctcattcaagttgggcgtggttacctgctggggtttctgcttagatttgcttcgcgtgtgtttatgcttgaattcgtgttgacaaggcagcagctaatgagaggaaactcctctcatgtcaatggcagacagcacaagaggacaagtagaaacagtcaaggtatcttaaggtctggtcatgcaatttgcatacccctcactgctaccccattcaactggccatagcagaaaaattgtgggaagatctgcaaaatcacatagcaaagagcatggttataggaagggcctttaattacggcctgttatgcagcccaacaccacaaccatcttcatataaaacaataccattgttaatcacaggaaggaccacaaaggacaattataaatctataaacatttccaaacagatatctgaatggaagttgtctgactggaagaagacctagttagagaaatttactgtggtatatcagtgaggaaaaa

SEQ ID NO: 684751 - DNA, 1308 bp, Homo sapiens
tcaaattaaatyatatcaatatcccatttaaatattttatctaatatataaatgcatatttataacaatatgacaacagtgtatatctatagattctgaaagtatgcttatttttaagttcatatttttaaaatttactcacaatgactacatatcaaaatatgaaatgtattaaaatataggaaattctgttgaaagtgtcagctattctgtttatattttcctactcaataacccaaagcagcaatttgcagaatttctaagataataattctaaataagatgtcccttatttttctcctttatgaatgacacaacccaaaacttcatctttattaattgacttgtctatttgtgccaaggtccctgtcaggaagattcataatgaattatattattttgatatcttgtctgtcatttttttttcatagcatgtatttcctacttgaggtacccatgtggttaattaactttatgggcagtagcacgacacatatgaaaaagttaatgtcaagggaagaacatggattctgtgaatccctgatatccagactgtagctatgagtgagatttaattgcctggcctcaaccctattgtcctggttcttggaaataaaatgcacccctgaatgccatcatggatatataattacaaatatagtacaacctctgattcacatacaatataatccatatttcttgttggatttacatctgagtcttggtttttctgtccattttccacctggaactagtcttcagctctgaccttcaaggctgtagccctggagtggatgctaattcttagagtttatctctacttgtattatgcctcagctggtgctaatcctgtcaccactcaaaagaaaattctggaaccaggattttggcatctactatacacagagaagcattttttttctaggactccttgactatattattgtattcccaattttgaagttaggtgacttgcatattgataatatccatgactaatcttaaattacccatgtcttttgttctttgagagcttgttttatgaaggaattgaagttggatctagggagatatgatgtatatctaattccagatcttaagagaatgtatttaaattcacacatagcattcagtctctgaaaaagtatcattttatatctaagttttagattatatgcacctagaaatcagagcacttctaactgtatcttaaactgcagtaggccaaaaactttctttgcctgattggaaaactgtgcacataacataattccaagactctataaatattttcttaaagataatttt

SEQ ID NO: 684752 - DNA, 734 bp, Homo sapiens
  misc_feature 497: n = A,T,C or G
gagctcaaggagtaatgctcatttgaatactacaatggaataatactaattttagtattatttaaaagttagaatttagtatttcttagttttcaatatttagctttatttagtactaactattgagtaatactaaataggaggcttgtttaggaagtaaagaggttaataggaagtgtaaaagttttaattccctaggaatccaacaagattttccaaaaagcacatttgcaaactcttcctttattcttttccaaagtcagtgataagaatatttgcttcaagtctttgaactctgagctcacctttatccagtagtctatattcccatataatcatattaccattgtcctaaatcatagtcacatttatataaagggacatgtttctttctttctttctttctttctctttctttctttctttctctctctctctctctctctcyctccctccctccctccctccctctctctctctctctttctttctttctntcctttctttcttaaagggagcaggcacgtctttcttaagacattcagcctgacccaggagaggaggccgtgggtttcagaataaaataaactaaataaaaatccatcctcccaccaatacacttgtgtggagacacttacattgaagtcgtacaacacaccaaatgtttgctgccgatgctcttcggctctgggaacggttttcctaggtaaactgccatatggcaaaccccagag

SEQ ID NO: 684753 - DNA, 3195 bp, Homo sapiens
gacaattcaaacattttgcttagaataatcattttggttcaagagaaccagggaagtacactcttctaagatacatctctgatagccattgggttgtttctattttcattatttggtgtttatcatataaaagcctatgatgctgtgtagccatggcataaaatatttcaggattttttttactctatctatatccacaatttttttttttaatttgccaattagaatgatatgtgggttagtttgtcttaggaggtaaagatgtgttttaattaaaatgatcacaattgtttccatgcaaacataggaataactttaaattacatagatagcagttttattgaaatattttcagaaactagcaaaaataaaataaaacagatggcaagaaattatcagtaataaagtcaattagaaaaaatctttatgattaataatttaattgcttgatatgttaagcctttaacttgccaaccatttcaaaataattcatgatatttacatataattaccttaaagctttacactactgaacttccattaagaatcacatgtaaaacagcatctctaatccaacatcaccaaagaatgaaagaattatctatttgatgtgtggatttgccaggtaactaaacctacaggccaactttcagagaccctttaatagaaacaattctaatactaattaaatagtttataagttcagcttgtccaaatttcaagtcctttaaaaatcatatgaaatgtctttaagaatcccttttctaactatccctgtgagaacagttttcacttctctgagactccaagctactttgtttgtatttctctgggacacatatactttcttatgtcataataatttgtatctaagtggcctatcccttactatattatggacttttgaagattgcaagattgtgggcaattacatgttcatatccaagtatcccaaagatataagcaaattaggttgcacaaaagtagagctgggtaaataacttattgaatgaacatatgtatacaaaacttttctggattgctcagggttatcatcataaacccagtgctcaaagtacactaaaatataacaactacctctgagattattatggtatggaaagacgtttattcctgtactaaatgaccccagattggtatatcttttaagtctctgttgttaattgtttatttcaccaggaggatcaggctgtgttacagggtacagttgttgacacataagttaccctcaaatatgaaggtaattaaaatacttttctaatcagcattacaggaaacctgcttttctagaatcactcaaagaaagggctaatcatattaaaaggcataggcatgcctcatctaaattttcaggctaatctgtgcaagaatggttttctatcttaagtttgatatatttaaacaacagttgttaggaagaagaaggcataatatgctgaatttctcactgctatgaatatattacttatccacttaaaactgggtcaggaaaagcctgtaatattactggaaatactccaaaatgtctaacaaggcagtgtttttttaactgcctccaaagatagttagcattacaaccttggttttagttggtttcaaatgttgtgtcaatgcaagggaaattccctgaggcattacttgaatagttaaataaaaaataccctgaattaattaacctacataaatgtgccctgatttggctactaatctttctcaaaaatattatctaagattttcttttaaaaaaaagatgtttatcttcaaaatgaacaatagaaaatagactctaaaatagagaacagaactatcaataatcacaactaatttctgatactatttataatagatgcacaaattgtcgcagcaaaaatacaatttgcaaaacctatggagagagttgggttatgtggaagagtgggaggtaagggatcttgattctcaagatcaaaatgaaagtgaggccagctaggaagagacactgtcatagccacaggatccagttgcttcacatggccccatttcctagaagttgagcagttgccatgagggccatcagcagacgaagagagcagaggaattcctgtccaactcatctttttaaaaggatttttttgcrgcataaatagagaggaaaagcaaattttggaacacaacctatatcatgcatacatcaattggagatgttttctcaatgaaataccactgttggaaagcataagctttgctaaataggaactattactacataataatggaactaacaatcatagtaatacatgggacataaaatgtgttgcattttatttttgaaaggaataaagcataaagaaactttaaaagcagatataaataaaaaatactagagtcaaaatttaaaagcaagttttgtcttggtattcaaaagggagaaaggaaaagctggggaagaggaggaggaaaacttagacatgaagtagatggtgttattcttattctaaaagaaaccattttttgttaatgctaagcttctctacttgacaaatttttcattcagttgtttttaatgacaatcatttataaggaataacacaatagttagagctattgagtatagaagtgtgtcatcttgggaggacatcttagaaagttcctcatgcttcaaagtcctaggagtgtttggaggagattccaccacctgatggcgactcgcatggccctattacctgtgagttgtggaacaggttggctgttctcttgcattctttccaaggggtctaggttttctctttaattagaggtgttttacacgtacatttttcctacctgcctgctatctgcaaatttccaaaaagcaaaaagaagaaaagtattttcttggatttttcctaaacagcatttaatgcattattctacacaaagtcagcgtttactaaaatgttttcctggtggaactaaaagatattgagttgtattaaaaagaaaatgacaacccaaatcctctgtaacaagggctagcacactttctttctataaagggccaaatagttaatattttaagctttgagtgagatgtacaactctgtcccatatttgttgctttttattaatgaccctttgaagctgtaaaaaccattcttacctcttgggctggatttagccataattttccaacccctgctctgtaagataaagtga

SEQ ID NO: 684754 - DNA, 1969 bp, Homo sapiens
tatcaactggaaattctgaatacttttatctgatgtgactgtttatatccccaactaaattatatatatatatatatatatatatatatatatttttttttttttttttttttttttctgagagagtttcactcttgttgcccacactggagtgcaatggtacgatcccggctcactgcaacctccacctcctgggttcaagcagttctcctgcctcagcctcctgagtagctgggattacaggagggcaccaccacgctgggctaattttgtatttttttagtagagatggagtttcaccatgttggtcagactggtctcgaactcctgacctcaagtgatccgcccacctcagcctcccgaagtgctgggattacaggcatgagccaccgtgcccggcctaaattataatttttatagtaaaaccttagggatataattgctaattctttgaattctccatagcactaccttatttctttagcagagtgctcagtaaatgttaatttatatatatatcatatatattatatatgttgttatatattatataaacacatatatgttaatttatatatacataacatatatgttaatttttatatatacatatgtgtgtgtgtatgttatatatgtgcatatataccatattttacatataacgtgttcctacactatatgccaggacagaaaaccaggcatttcatttgattgagggttgtcaaaccaataatctgccttcctactaattcctaaacatggaggcgatcttatatatcacctggtgatgcctttactttactgatgaagaagcagcccagcaaagttaattgactttataaagcagttctatggcctgaaccagaactcaggcttctcacttggggtccagtgattattttgctacagaatgctaagtgtgtggctaaagaatgggggaaaaaaaagagaaattagatatagtttgcttaagttatagagaatttaacaagattctttagcattaaaagtatttttgttttatcagtttcawcagtaaggtagggtaatcatttcaaggttaatgctagattaatttgccttgtaaaaacttcattgtattgaaatggggaggaaatgtacagaattagagtggtcatatttcatgcagacaatgttttttatttatgatactatcccattattcttcataagtcataatttatctcgaagctttaatttagaattattgtatctttctaaaagaggaaagaatcatttttttctaagacaaataaatagctagcatagagtgcttaattatgaggatggcttttaatctaatttaccctcttttcctgattttgataaatattaaaacttttttattattaaaaataagcttcaattcaagccatagaaagactccagttaagaacatcaaataatctgaaataatctgtatctgcccagatgacccatgctgaccacacagttaaatgacttccctcctactggaagatgagatgttttttagcactaaaaagatcctggaagaataacttcattcagttcttcaggggtatctgttctcttccccgctgcgtgggtgaccggtccaaggggttattagctctggctgcgtgtcagtatgatctagagagtgttttgttttgtttgagacacattttgactctgttgcccaggctagagtgcagtggcacaatcttggctcactgcaacctccaccttccgggttcaagcaattcttgtgcctcagccttccaagtagctgggactagaagagcatgccaccatgcccggctaatttttgtattattaggagagacagggtttcaccatggtggccaggttggtctcaaactcctggcctctagtgatccgccccactcagcctcccaaagggcagggatgacaggggtgagccactgtgcccagcccagagagtttttaaaaggtatcacccagg

SEQ ID NO: 684755 - DNA, 1969 bp, Homo sapiens
tatcaactggaaattctgaatacttttatctgatgtgactgtttatatccccaactaaattatatatatatatatatatatatatatatatatttttttttttttttttttttttttctgagagagtttcactcttgttgcccacactggagtgcaatggtacgatcccggctcactgcaacctccacctcctgggttcaagcagttctcctgcctcagcctcctgagtagctgggattacaggagggcaccaccacgctgggctaattttgtatttttttagtagagatggagtttcaccatgttggtcagactggtctcgaactcctgacctcaagtgatccgcccacctcagcctcccgaagtgctgggattacaggcatgagccaccgtgcccggcctaaattataatttttatagtaaaaccttagggatataattgctaattctttgaattctccatagcactaccttatttctttagcagagtgctcagtaaatgttaatttatatatatatcatatatattatatatgttgttatatattatataaacacatatatgttaatttatatatacataacatatatgttaatttttatatatacatatgtgtgtgtgtatgttatatatgtgcatatataccatattttacatataacgtgttcctacactatatgccaggacagaaaaccaggcatttcatttgattgagggttgtcaaaccaataatctgccttcctactaattcctaaacatggaggcgatcttatatatcacctggtgatgcctttactttactgatgaagaagcagcccagcaaagttaattgactttataaagcagttctatggcctgaaccagaactcaggcttctcacttggggtccagtgattattttgctacagaatgctaagtgtgtggctaaagaatgggggaaaaaaaagagaaattagatatagtttgcttaagttatagagaatttaacaagattctttagcattaaaagtatttttgttttatcagtttcatcagtaaggtagggtaatcatttcaaggttaatgctagattaatttgccttgtaaaaacttcattgtattgaaatggggaggaaatgtacagaattagagtggtcatatttcatgcagacaatgttttttatttatgatactatyccattattcttcataagtcataatttatctcgaagctttaatttagaattattgtatctttctaaaagaggaaagaatcatttttttctaagacaaataaatagctagcatagagtgcttaattatgaggatggcttttaatctaatttaccctcttttcctgattttgataaatattaaaacttttttattattaaaaataagcttcaattcaagccatagaaagactccagttaagaacatcaaataatctgaaataatctgtatctgcccagatgacccatgctgaccacacagttaaatgacttccctcctactggaagatgagatgttttttagcactaaaaagatcctggaagaataacttcattcagttcttcaggggtatctgttctcttccccgctgcgtgggtgaccggtccaaggggttattagctctggctgcgtgtcagtatgatctagagagtgttttgttttgtttgagacacattttgactctgttgcccaggctagagtgcagtggcacaatcttggctcactgcaacctccaccttccgggttcaagcaattcttgtgcctcagccttccaagtagctgggactagaagagcatgccaccatgcccggctaatttttgtattattaggagagacagggtttcaccatggtggccaggttggtctcaaactcctggcctctagtgatccgccccactcagcctcccaaagggcagggatgacaggggtgagccactgtgcccagcccagagagtttttaaaaggtatcacccagg

SEQ ID NO: 684756 - DNA, 629 bp, Homo sapiens
acccagcagatccccttgccacaatcaacacaaacttttactcaacaaagggtgaggctcagccatcagtaggtgtggaattattccagtctctctcaaggcagttgactctgggttttctttcttcacctggagtttttgtttaactgaggtctaactgaaagttcaatgttgaatggcttctagcccacagagtttaccttcaagatcacttggcttcattttgggaaagagactttttatcttgccgccagaaagtgaaacaaaatttaagacacaaagcattctttgttatattatctccttcatctttcctggtttaggaagaagttgagttctgtgtggttctgcgagctgacrtttggcatggctttgttctttggtggtaagaattattcagtgagtttttctattgtttgttttctgaattctaattactacctttttaactttggaaggcaagacaagcttactcattttttaaagtttctgcttcatatggtgtatcttaatttttataaatatgtttgtttgcttatatgtttgtttttgtaaaattctttttgtccagttctcctagtcctctgggataagtcagttatttactaagaggcttctgtgccacttcc

SEQ ID NO: 684757 - DNA, 607 bp, Homo sapiens
ttcctttccagcagttggggctagaaagtatgtgttggcactagaaacattgtcaagatttgttctgtggtgtaggtatgcacattccataggtatgcacacggccatgtaatatcagtatatcccaagttaatgaaagtgttcatttacataggyaatggagacctttgcattttgatccatagaacataggaggatgttcttagtctgtctcaaagctctatatgtttacatattatttctgtagattgttttcaggagaaagttttgcttctatggtaagagtgagcactttggcttatgtataagttagaaataattgttagtttttaatatgcacttcgtggggaaatttcttagacgtatgcaagcaagtgaaaacaattagggccagtggtattaactactttataaaattttatttttgtttgtaagaagtcatctacttaaggcccagttaatataagtggaatcatcatagtttaaggaatacccagagattgctgctgttctatttattttacagaaaggatagctagattgaaagctcttcagtggaccttgagctaatagatcttttaccactaaaagagcattattctcatgt

SEQ ID NO: 684758 - DNA, 607 bp, Homo sapiens
ttcctttccagcagttggggctagaaagtatgtgttggcactagaaacattgtcaagatttgttctgtggtgtaggtatgcacattccataggtatgcacacggccatgtaatatcagtatatcccaagttaatgaaagtgttcatttacataggcaatggagacctttgcattttgatccatagaacataggaggatgttcttagtctgtctcaaagctctatatgtttacatattatttctgtagattgttttcaggagaaagttttgcttctatggtaagagtgagcactttggcttatgtataagttagaaataattgttagtttttaatatgcacttcgtggggaaatttcttagacgtatgcaagcaagtgaaaacaattagggccagtggtattaactactttataaaattttatttttgtttgtaagaagtcatctayttaaggcccagttaatataagtggaatcatcatagtttaaggaatacccagagattgctgctgttctatttattttacagaaaggatagctagattgaaagctcttcagtggaccttgagctaatagatcttttaccactaaaagagcattattctcatgt

SEQ ID NO: 684759 - DNA, 648 bp, Homo sapiens
acacargtaattgatagtccaatttaaagtgtgcagaggccaaatttctttccagacgctgaaggaaaaacaccagctgaggaagaatgaagaactgcctgttctaagttattctccttctgtggtcattcgagcaccaggaagaccaggtttgccccatcaagtacctcaagaaagaagtcaattacctaaagaagtcaagcaaagaggaaaggacaaaatgaaaatcatgtaccagggtacacgtcgaggctccaagctggaatgaatatggccttcaacatactctttatcatacagaagcttgtgttcagggcttggattttgaagtcagacagacctggattaaaaaccaattcaactacctattacatatgtgacctaggtaagatctaacctctctgtgcctcagtctactcctttgctaaatgggcattaggagcacagattttgaggcagtcagtgttggatttcaacctcagctccactactgactgtgtcaaaagggcaagttaatgaacctccaatgttaatttcttcttctctagagaggaagtgattacataggtccattgaaggactgtttggggggctggttgagataaaatataaaatgcacatgcacagtgctcaggaaaatttttgtga

SEQ ID NO: 684760 - DNA, 2057 bp, Homo sapiens
tcagcctccccagtagctgggattacaggcacttgctaccacacccagctaagtttttgtatttttagtagagatggggtttcaccattttggctaggctagtctcaaactcctgtcctcaagggatccactggccttggcctcccaaagtcytgggattataggcgtgagccactgtgcctggcctacatgcacaaattcttatcttgacaaactgtgaaatgactctcacacctttttcttttccctgtgtcctctcccacttctctggaagaatatgttgaacaggagatgagggaggaagtcaagtgaccactttcctcagagtccagcttctctgtgggcctggggtttaccccagaaccctactggctgccttacaattctacagtctcagcaagaattttagagtgacgcctgtgactttcagaccatgagcttgctgcttctcagtgttcttaatagggacaggagggatgagtggtactaagggtccatgtagacaattgggcggctgctactctcatctgtattgtcatgttatccagaaagttcagctgtaagtcaatagacggattctaagagggagccaagaatgccatatacttctaaactctcatcataaaaacattgtgaaatactttatattttttggtgcctggattatataagtcataaactagcttatataaatacacagacatagagatacacagttgacatctgaggttattctcaatgaaatcaagaagaaaacagtactttatttgagcagatatgtatcagcttctctgaggcctgggagccctcgcactccatcccagcatcactgagaaattattatactgcttacaatgtctattgtgttgtttgatggtacatttgatcacagtttatgagacaattcaccactgaataattttcatcccaatgtagaagctgaagatggtctaatttatgcctaacttcaaagctggagtggttgagggctgtagctgtggaatcaagcagttagcggaatgaacattgtaaagactttgattgtaaaatttggagtgtgaattcctggccagtaatttaacatcaatgatctctttttaagaaactctcaaaaagcccctctggttttttaggtaggcctttcaaaactcaaaattggtgagagtgataataatcaaaatagcaattctctgttttgggtagacagaattatagtatgtattaccaatttaatcctgacaagccctttgctacagctttattcttcccatatcacaaatgagagaaataaagttcccagaaaagaaataatttatctgagcaaaatcttatagttgttaggaagcagtagagacaaaacttaaaccttgattttctagtctaatctaacaccctttccactatagtagagtctgtctctgtcttgtaccctactttgtggttacttctaactgccttcagatgtgggtcccttagcaaaaaaagtagaatctctgctgtttcacaaaagcagaacaattagaagatactcgagttgacaagagtcttagagaatatctggtgctatccttttgctttaagatgagaaaatcaaggcccagaaaggatgacttgttgagatgagagccagcatcagaatctagacctcatttttggtctttctgcttctctctgacatttcatcagaaatgttttgcctccaaactcctgacattgtatgtatttacttgacctacatttgctcatcacttgttatgggacattactcactggggaaatgaagatttataatacaggaactctgtattttctaggaaagatagatgcataaataattatacttgctaaattggaggtttacacagatgaaacggattggcaaagaagccacaattaattaggcctatggaacaagggaagacttaccaaagaaaagctgagttttcagggaagagaagtttgttagccagataatgcagaaaggggttttgcatgaagagggagttatttgtgtaaaggaatgagggctgtgagaaaacactgaaagaataatgcaa

SEQ ID NO: 684761 - DNA, 924 bp, Homo sapiens
tgtgtcatacggtatgtgtgtcactgtatgacacacatcactatagcaagaaacgttaaatacactgattgtcttgatctaagttgcacacatgatgtgaagtcagcttccctgaaaatttatgaatactcagaaggaaaccatggactgtcttgttggagagaagtggcaaatgaatgttggaggtcagtaaaacagtccaccttaacatgcatgtctgggacacattctgatcctacacctgaggcttctgtccccactctttatcatagtccttgttttgagagcagtgatggggtaaacaaggatgtatttattgtcaaaagatgaaaaatgcccccaagtatccttattcctaattcagggagtagtagactaggtatcctaataggttctccaactactccaagttttataatgttgagaaagcaaaatgtaatgcaaaaaagttagtatcttctccaacttaagagtacagtaagttttgcttagaaacttaagggcaaggaaataattatacaagaaaatcacataaacaataaaataattcagccaatagaatagtttcagtaattctgaagctccaactttatcttgcttgtcctagaaaaagtgaagaaaactaactatagttgccatatacgggtaatacagatgtgtcaagtagcagggaaaaaataytcctcggaagggtcaaggatttcttccaaaaatgaaagagaacatcacagtcccccaaacagcatatgctagtcaagacatagcatccttaagttggatgctataataactggaagcaacccagtgtcaaaggcaacccatcaagagtggtttatgcatgttatttagtgtcacactatagattttcctaagacccagtccaagtgtgagcaggacctttccggaaatcacagtcaaagagat

SEQ ID NO: 684762 - DNA, 735 bp, Homo sapiens
agcagctattgagaagtttatcaaaaagagtaaataatgtataaaaagtcccaagtgagtgatgaaaaccttattcagatgacaagccacatatcagttggaagtcagtgcacagacttattggcaccaacaatgttttcttaatttcctaagtgtgcataacaccatgccctccccctccaattggcttagtatatcgttttttattgctttattctattaaaaattacttcaactcacttacattcctgacaaatccattttataattttaattagcagttctaatccttctcatggaacatttcttatttattttatgctttcattcaataaacacttgcttagtacctgttatgggcctggcactctagacacaatccctgttcccagtgaggctaaaagctagtgagggagacagactggtggctacatcactacaattacaatacggcaaaggccatgagataaacatgcaacatagaaaataaagcttcctggagactgagctcagagaaggctttgtggagggggaggtgatacttgggttcttaaaataggagacgttaaccagaaagtatatgacaatttctaataygggacactgtggtaagaccaaaatatggctttggagttagggccttaagtggtggtaacaggcttaatatcactgcccttaaattttccatattgagactatcacatttctaagtgtacttcctctctgcctgttgac

SEQ ID NO: 684763 - DNA, 2214 bp, Homo sapiens
ccaattaatgtttcttgaatgattacgaggagtcaggcactgctttatgaccttcacacatattagcttatttaatctttgcttatttatttgtatgattattacaggagtgtatatgagcagatctgaatttcaaaatatgactagtacaaagctacaccctatctaataaaaaacacctttatgggaaattcaaatgtacacacacacactcagagtaagcctgaaagcacaaattaacccactgacgatcaaatgatcaaatgcattaaaatttggcatcaattgaaatatgtaggtattcttctttattatacttaaaatgcttaaatatttatcattaaaaatcaaatgcaaattaaatgcttagaacccctctgaaactcactggagttctccaatttgaaaatgaacattaaatcctattactcacttacactaggatgtaaaaggagccaaatcagattcttttctaaaagcataagtgtgaagaaggaaatgagagatttttaacactaattcatttttcaggaaggtaagaaccttattaggtacccattatgtgccagcaatgttaatatattatctgtattctccatagcacccttatctagtaggcatcattatcttgacttgacaaaagagggaacaccggatctgaaatgtaatttgcttacctagggttcagtaactgcaaaatagcagataggacccaaactttgatctactcagctccaagcccctcccagcacaccagattgcctctccatcttgcttcccccattcataaaacagaaaaatgagaatgagtgagacagagtaacctgctcttggaaacactagttagttagtggcaaggctgcaacaggaatccagtagtaccagcatttcactaggtaaatcctatcagatggcccatggagagggtatcctgtgcaactaggcctactaggagccagcaaaatcattacttcacttcaaaactcaacatcagtctatatagcttcagagcagagactagacagaggaggggacaaatcagtcctgtccttaatacctaatatgtgtaaaacactgcttggtgcaggggaggatttgaaaaacagacaaacagaacagacaacaaggtccctgtcctcatatctgtgtgggaaagaaagcataatcatgtaaaatattaaatagcatccctggaggagacctcagcaatattctggttccctccctggacccctacaataatatgttttagatgacagtataaaacaatggcacaatacaatatatgagacttgccaatagtaataactaatatttttcagaacacttctttgtaccaggacctttgttaagtgctttgaattatctcattaaaaactcaatacaatcctatgagatagatacttttattgtgtacattttacatgaggaaagggagactgtttctgggagatcccggtctagtaaggattcacaccaggcagtctgacccagaatcactattctaagagctaaaaagtggtttcagttcagcatagggttggtttgggaatgcatacaggatcatggcagagaagctcaagaaacataccactataaataaattaaaagaactcactacagctagatttttttttatgaatgttatctgacaaggctatagctctcattgcctctccctgctcccagagcaatgggctttagtgagacagccatccaccagccaacattccatcactttcctcagctttcccattattccaaaccaatgcagaattgacattctgaatagcaacaacatacaaaggcaatacactaccacctccaccaccaccaccaccaccttcactgccatattagtggaatatattttataggctgtgaatcaggaaggacatgaaaagtcaytcctttgtcaaaaactctttctaagcaacctgaagagaaagctcactttaaatgataggagtgggatgttgtgcatgccaccacagtccttgggtgatgactttgtgtcataaataggatatggcatttcagaatgtctttaaagctatttccttttgttcaactaatttaatttaccaaatgctcctgggaaaagggagggggaccaagatgctgactccacatttcctgaaaaatcaacattttctttttaaactgctctcaaagaaattgcatctgattgttgtctgctggctccctcaaact

SEQ ID NO: 684764 - DNA, 504 bp, Homo sapiens
tacccccacccccaccccaccccttacttctagtgcttcttctaatcatttgacattaacacaattgcctcactttctattactttatcatttcagaaatgaatatgctttcagtgagagagagattactatgtacaccccaagtgaaacrgtaaagaatgaaactatgatttgtgaagtgtggttgctacccaactaagttagtggaaaacactgcataacatatgactcataaaatctagaaatcataatagtattaaattcaacctcatgaataaataaaagattctaagtttacattgcattatatatatatttatttggaaagtagaaccaaagaactggtataattctacagcaactcacatcttgccaaaaagaaaaatgtttttatgatttttttctaggtcataacagttataatcagttatttgtgcagcaattcaaagcaatgtttggtttggctattttgttatgcattcataattgttcttttaaaattca

SEQ ID NO: 684765 - DNA, 1479 bp, Homo sapiens
tcactaagtttttaaatgtcacattttttcattccaagttatcttgatttttctgtgtgttctccaatgaggaacatttagatctaaaaaactggggtgtttaagaaaagcaattcacatatttcaatttgtctccaaatttcttatcacctcctagagtgtccgatttgtctctcctccactcccgacgtcatgggttcaaatttttcagaatataacatttaaaaatgatgcctcagcgtgaggttaatttttctgaagtaaaggttccgggtgaacggttttagagttttcccagaggcagaaagtcctgcttctggggcgtaacctacagggtaagtcaccgggagtgtgctgggccgtgggggaaggtctgggtgggcatttttgggagcctctcgcgagttggagggagtctaggggcggcgcaccaaatgggtgagcgtcggtgaatcggcgcgcgggacctcgctcggaagtggcgcggctgggcagggcagggccgggggaagcccgtttcccacctggattaagatggatccgacagggtcgtggttttcagtgttctgtgccatggctaggtcagggaacggctacctccgcggaggcgcggtttccaagcacggaaaccttcagccggagccgctcgtccccatggcaacaccgcgcgcgacctggcctgttccacgctgggagcggaagggggtctaggggcggggtcaggccagcctggtcattccgagaacgccctctccggcctgtctccccctcgcgccggcggccgtggtgcagcccaaggcggaagcggctgcctgacggaaccggctcgcgagcgcagctatggctgctggcgtaccctgtgcgttagtcaccagctgctcctccgtcttctcaggagaccagctggtccaacgtgagtagataggcgcctgggccgacctccaaggcccctgagcctcagcgggcgacggacccagcaccacggcctctctgggccttgtccccgcagcgggccctgcgttcttcctccagtcagtggaggcgcccagtctccccaggtggctgcccctatctcttaatctcgtgcttttctgcccactcggccttcttcggcgttcctttcggcttcctgtgtaaagtgagactgatttcccgctctgctcagcccaggccacaggtttttgcgaggatccgttgagatgaacctgaaggctctccggaaattgcgctaggttacaggagtgtaaggtgctggaattgttgatatcgtgatgttgttatccttgctgctccgggagagagtgtttactctgaattctgaagtttattctgcgtatttactctgaagtttattctgcttcttaawgtgtacattataagacttgttagctttgtccgctccactctagttattcacgcctttcatctgaggcatgggctctccgccaacatgagtttttgggtatgattgggctagtg

SEQ ID NO: 684766 - DNA, 594 bp, Homo sapiens
taggcgatgaattcctgagcaccttgtttttcttccaaggttcgtagctcctctctgcccttccaagcctgtaacctcggaggactatcttttgttctttatcctttgtcttgtttgagtgggtcagccccagaggaactgataagcaaatggcaagtttttaaaggaagagtggaaagtactgcaaataaaaatccttatttgtttttgtagactttgtaatgcatatcattagccctcactgtgatcattactgctgtggctctgaactggcacatagtacagtggatggaaggtgcccgcacaccagctgagaactggttctggcctaggtgggctctagaaccatttacacagcatgaaagaaacaggttgggttaggagcagaaagaaataaggctcacacccctccagacactaccttataagcactgcagaacctgaaacagatggcagaaggaatggaatgctacaggggccagcaggagtgaccacrgggaggggacagctcagtgactggagcattcaggaagaggctttccagggaacactggacattgcttagtgaccttttgttccttttttttttttttt

SEQ ID NO: 684767 - DNA, 1713 bp, Homo sapiens
taaagtgatgtgacagaagaaccatttctcgagcttcattctgtccctggagaggcagactttagctagctaaaaacacatttgagtgtgtggctaaggttttaaaagttaaggggaaatacgccgggrcacagtggctcaagcctgcaatcccagcgctctgggaagccgagcaggtgggtcacctgaagtcaggagttcgagaccagcctggccaacacagtgaaatcccatctctactacaaatacaaaaaattggccaggcatggtggcatgcgcctgcagtcccagctacttgggaggctgagaccaaagaattgcctgaacccaagaatcatgccattgcactccagcctgggcaacagagtgagactccatctcaaaataaataaataaataagttaaggggaaacttggaaggatagctaagtgggaaagtttctttagggtttacaagttgataccaggcttctctccttaaccacacagacttccaagccatcggcaattatcttccactccttggtctataaaaggggcattcagggagcagatattgacatggttggcggaggatcagatactcagccaggcttctggacaaatgaagttcaaaggatgtgccagcaaagattttcaaataagagcttctactttgtgagcctgagaagaaacccgcagacttgttgttttatcccactttcactggatagaaaaaacacacataaaacatacactttctacacaccaagagaaggaaatattacccccaagtgatttagttaggcacacctggaagccaactcaaagagactacattttcatccagagaagctcagggaagagagaaaagggactagaacatgctccccaatcaatctcccgaccccgttgccacccagccatgtcatctgttccaccacagtccctgagagcaagaccgaggcttccatccccacccctccctctccatcctcacacacatgccctgggccaggctaaggaggcgttgcatggatcggcctccctggctgttcaccccactccactccccatctgccttcaaggatcctcccctgagcttagcaacctctggagacccctacctgttcaagagtgaagcccaggtccccacatctaatgtcttccaagcactcccacccgccactaggcagtgcccagcccccagctttgctctccccgggggcttcctctcacagctctttcctacagatcctctttctacctgcagccctgagatccccacacctgcctgcacttgaaagagggtccaggcaattcccaggacgccctatatataactcagctcctgctctgtgaattcacagccctggtcatgcggagcatgcggagccctgcctgctccccgcccaaaagaagtggtatttttagagggactgcagagtgaaaagggtcagcacaagctgcagtggcaaatccattgagtaaaaacacttaagtggaaaataataataatgatgagagctagtgctttcaaaggcgccttcctatttgcatgtgctttcacatccatcatccctctgactcaacatcattcagtggggaaaggaagcaggtgttcgctccattttacagacaagaaatataaagctggaggaagttaagcgcctgtggcagaacccaaaacttgggggttgttagtgctcaaggcctccttagcttctggcaatg

SEQ ID NO: 684768 - DNA, 1713 bp, Homo sapiens
taaagtgatgtgacagaagaaccatttctcgagcttcattctgtccctggagaggcagactttagctagctaaaaacacatttgagtgtgtggctaaggttttaaaagttaaggggaaatacgccgggacacagtggctcaagcctgcaatcccagcgctctgggaagccgagcaggtgggtcacctgaagtcaggagttcgagaccagcctggccaacacagygaaatcccatctctactacaaatacaaaaaattggccaggcatggtggcatgcgcctgcagtcccagctacttgggaggctgagaccaaagaattgcctgaacccaagaatcatgccattgcactccagcctgggcaacagagtgagactccatctcaaaataaataaataaataagttaaggggaaacttggaaggatagctaagtgggaaagtttctttagggtttacaagttgataccaggcttctctccttaaccacacagacttccaagccatcggcaattatcttccactccttggtctataaaaggggcattcagggagcagatattgacatggttggcggaggatcagatactcagccaggcttctggacaaatgaagttcaaaggatgtgccagcaaagattttcaaataagagcttctactttgtgagcctgagaagaaacccgcagacttgttgttttatcccactttcactggatagaaaaaacacacataaaacatacactttctacacaccaagagaaggaaatattacccccaagtgatttagttaggcacacctggaagccaactcaaagagactacattttcatccagagaagctcagggaagagagaaaagggactagaacatgctccccaatcaatctcccgaccccgttgccacccagccatgtcatctgttccaccacagtccctgagagcaagaccgaggcttccatccccacccctccctctccatcctcacacacatgccctgggccaggctaaggaggcgttgcatggatcggcctccctggctgttcaccccactccactccccatctgccttcaaggatcctcccctgagcttagcaacctctggagacccctacctgttcaagagtgaagcccaggtccccacatctaatgtcttccaagcactcccacccgccactaggcagtgcccagcccccagctttgctctccccgggggcttcctctcacagctctttcctacagatcctctttctacctgcagccctgagatccccacacctgcctgcacttgaaagagggtccaggcaattcccaggacgccctatatataactcagctcctgctctgtgaattcacagccctggtcatgcggagcatgcggagccctgcctgctccccgcccaaaagaagtggtatttttagagggactgcagagtgaaaagggtcagcacaagctgcagtggcaaatccattgagtaaaaacacttaagtggaaaataataataatgatgagagctagtgctttcaaaggcgccttcctatttgcatgtgctttcacatccatcatccctctgactcaacatcattcagtggggaaaggaagcaggtgttcgctccattttacagacaagaaatataaagctggaggaagttaagcgcctgtggcagaacccaaaacttgggggttgttagtgctcaaggcctccttagcttctggcaatg

SEQ ID NO: 684769 - DNA, 1713 bp, Homo sapiens
taaagtgatgtgacagaagaaccatttctcgagcttcattctgtccctggagaggcagactttagctagctaaaaacacatttgagtgtgtggctaaggttttaaaagttaaggggaaatacgccgggacacagtggctcaagcctgcaatcccagcgctctgggaagccgagcaggtgggtcacctgaagtcaggagttcgagaccagcctggccaacacagtgaaatcccatctctactamaaatacaaaaaattggccaggcatggtggcatgcgcctgcagtcccagctacttgggaggctgagaccaaagaattgcctgaacccaagaatcatgccattgcactccagcctgggcaacagagtgagactccatctcaaaataaataaataaataagttaaggggaaacttggaaggatagctaagtgggaaagtttctttagggtttacaagttgataccaggcttctctccttaaccacacagacttccaagccatcggcaattatcttccactccttggtctataaaaggggcattcagggagcagatattgacatggttggcggaggatcagatactcagccaggcttctggacaaatgaagttcaaaggatgtgccagcaaagattttcaaataagagcttctactttgtgagcctgagaagaaacccgcagacttgttgttttatcccactttcactggatagaaaaaacacacataaaacatacactttctacacaccaagagaaggaaatattacccccaagtgatttagttaggcacacctggaagccaactcaaagagactacattttcatccagagaagctcagggaagagagaaaagggactagaacatgctccccaatcaatctcccgaccccgttgccacccagccatgtcatctgttccaccacagtccctgagagcaagaccgaggcttccatccccacccctccctctccatcctcacacacatgccctgggccaggctaaggaggcgttgcatggatcggcctccctggctgttcaccccactccactccccatctgccttcaaggatcctcccctgagcttagcaacctctggagacccctacctgttcaagagtgaagcccaggtccccacatctaatgtcttccaagcactcccacccgccactaggcagtgcccagcccccagctttgctctccccgggggcttcctctcacagctctttcctacagatcctctttctacctgcagccctgagatccccacacctgcctgcacttgaaagagggtccaggcaattcccaggacgccctatatataactcagctcctgctctgtgaattcacagccctggtcatgcggagcatgcggagccctgcctgctccccgcccaaaagaagtggtatttttagagggactgcagagtgaaaagggtcagcacaagctgcagtggcaaatccattgagtaaaaacacttaagtggaaaataataataatgatgagagctagtgctttcaaaggcgccttcctatttgcatgtgctttcacatccatcatccctctgactcaacatcattcagtggggaaaggaagcaggtgttcgctccattttacagacaagaaatataaagctggaggaagttaagcgcctgtggcagaacccaaaacttgggggttgttagtgctcaaggcctccttagcttctggcaatg

SEQ ID NO: 684770 - DNA, 1713 bp, Homo sapiens
taaagtgatgtgacagaagaaccatttctcgagcttcattctgtccctggagaggcagactttagctagctaaaaacacatttgagtgtgtggctaaggttttaaaagttaaggggaaatacgccgggacacagtggctcaagcctgcaatcccagcgctctgggaagccgagcaggtgggtcacctgaagtcaggagttcgagaccagcctggccaacacagtgaaatcccatctctactacaaatacaaaaaattrgccaggcatggtggcatgcgcctgcagtcccagctacttgggaggctgagaccaaagaattgcctgaacccaagaatcatgccattgcactccagcctgggcaacagagtgagactccatctcaaaataaataaataaataagttaaggggaaacttggaaggatagctaagtgggaaagtttctttagggtttacaagttgataccaggcttctctccttaaccacacagacttccaagccatcggcaattatcttccactccttggtctataaaaggggcattcagggagcagatattgacatggttggcggaggatcagatactcagccaggcttctggacaaatgaagttcaaaggatgtgccagcaaagattttcaaataagagcttctactttgtgagcctgagaagaaacccgcagacttgttgttttatcccactttcactggatagaaaaaacacacataaaacatacactttctacacaccaagagaaggaaatattacccccaagtgatttagttaggcacacctggaagccaactcaaagagactacattttcatccagagaagctcagggaagagagaaaagggactagaacatgctccccaatcaatctcccgaccccgttgccacccagccatgtcatctgttccaccacagtccctgagagcaagaccgaggcttccatccccacccctccctctccatcctcacacacatgccctgggccaggctaaggaggcgttgcatggatcggcctccctggctgttcaccccactccactccccatctgccttcaaggatcctcccctgagcttagcaacctctggagacccctacctgttcaagagtgaagcccaggtccccacatctaatgtcttccaagcactcccacccgccactaggcagtgcccagcccccagctttgctctccccgggggcttcctctcacagctctttcctacagatcctctttctacctgcagccctgagatccccacacctgcctgcacttgaaagagggtccaggcaattcccaggacgccctatatataactcagctcctgctctgtgaattcacagccctggtcatgcggagcatgcggagccctgcctgctccccgcccaaaagaagtggtatttttagagggactgcagagtgaaaagggtcagcacaagctgcagtggcaaatccattgagtaaaaacacttaagtggaaaataataataatgatgagagctagtgctttcaaaggcgccttcctatttgcatgtgctttcacatccatcatccctctgactcaacatcattcagtggggaaaggaagcaggtgttcgctccattttacagacaagaaatataaagctggaggaagttaagcgcctgtggcagaacccaaaacttgggggttgttagtgctcaaggcctccttagcttctggcaatg

SEQ ID NO: 684771 - DNA, 1713 bp, Homo sapiens
taaagtgatgtgacagaagaaccatttctcgagcttcattctgtccctggagaggcagactttagctagctaaaaacacatttgagtgtgtggctaaggttttaaaagttaaggggaaatacgccgggacacagtggctcaagcctgcaatcccagcgctctgggaagccgagcaggtgggtcacctgaagtcaggagttcgagaccagcctggccaacacagtgaaatcccatctctactacaaatacaaaaaattggccaggcatggtggcatgcgcctgcagtcccagctacttgggaggctgagaccaaagaattgcctgaacccaagaatcatgccattgcactccagcctgggcaacagagtgagactccatctcaaaataaataaataaataagttaargggaaacttggaaggatagctaagtgggaaagtttctttagggtttacaagttgataccaggcttctctccttaaccacacagacttccaagccatcggcaattatcttccactccttggtctataaaaggggcattcagggagcagatattgacatggttggcggaggatcagatactcagccaggcttctggacaaatgaagttcaaaggatgtgccagcaaagattttcaaataagagcttctactttgtgagcctgagaagaaacccgcagacttgttgttttatcccactttcactggatagaaaaaacacacataaaacatacactttctacacaccaagagaaggaaatattacccccaagtgatttagttaggcacacctggaagccaactcaaagagactacattttcatccagagaagctcagggaagagagaaaagggactagaacatgctccccaatcaatctcccgaccccgttgccacccagccatgtcatctgttccaccacagtccctgagagcaagaccgaggcttccatccccacccctccctctccatcctcacacacatgccctgggccaggctaaggaggcgttgcatggatcggcctccctggctgttcaccccactccactccccatctgccttcaaggatcctcccctgagcttagcaacctctggagacccctacctgttcaagagtgaagcccaggtccccacatctaatgtcttccaagcactcccacccgccactaggcagtgcccagcccccagctttgctctccccgggggcttcctctcacagctctttcctacagatcctctttctacctgcagccctgagatccccacacctgcctgcacttgaaagagggtccaggcaattcccaggacgccctatatataactcagctcctgctctgtgaattcacagccctggtcatgcggagcatgcggagccctgcctgctccccgcccaaaagaagtggtatttttagagggactgcagagtgaaaagggtcagcacaagctgcagtggcaaatccattgagtaaaaacacttaagtggaaaataataataatgatgagagctagtgctttcaaaggcgccttcctatttgcatgtgctttcacatccatcatccctctgactcaacatcattcagtggggaaaggaagcaggtgttcgctccattttacagacaagaaatataaagctggaggaagttaagcgcctgtggcagaacccaaaacttgggggttgttagtgctcaaggcctccttagcttctggcaatg

SEQ ID NO: 684772 - DNA, 1713 bp, Homo sapiens
taaagtgatgtgacagaagaaccatttctcgagcttcattctgtccctggagaggcagactttagctagctaaaaacacatttgagtgtgtggctaaggttttaaaagttaaggggaaatacgccgggacacagtggctcaagcctgcaatcccagcgctctgggaagccgagcaggtgggtcacctgaagtcaggagttcgagaccagcctggccaacacagtgaaatcccatctctactacaaatacaaaaaattggccaggcatggtggcatgcgcctgcagtcccagctacttgggaggctgagaccaaagaattgcctgaacccaagaatcatgccattgcactccagcctgggcaacagagtgagactccatctcaaaataaataaataaataagttaaggggaaacttggaaggatagctaagtgggaaagtttctttagggtttacaagttgataccaggcttctctccttaaccacacagacttccaagccatcggcaattatcttccactccttggtctataaaaggggcattcagggagcagatattgacatggttggcggaggatcagatactcagccaggcttctggacaaatgaagttcaaaggatgtgccagcaaagattttcaaataagagcttctactttgtgagcctgagaagaaacccgcagacttgttgttttatcccactttcactggatagaaaaaacacacataaaacatacactttctacacaccaagagaaggaaatattacccccaagtgatttagttaggcacacctggaagccaactcaaagagactacattttcatccagagaagctcagggaagagagaaaagggactagaacatgctccccaatcaatctcccgaccccgttgccacccagccatgtcatctgttccaccacagtccctgagagcaagaccgaggcttccatccccacccctccctctccatccycacacacatgccctgggccaggctaaggaggcgttgcatggatcggcctccctggctgttcaccccactccactccccatctgccttcaaggatcctcccctgagcttagcaacctctggagacccctacctgttcaagagtgaagcccaggtccccacatctaatgtcttccaagcactcccacccgccactaggcagtgcccagcccccagctttgctctccccgggggcttcctctcacagctctttcctacagatcctctttctacctgcagccctgagatccccacacctgcctgcacttgaaagagggtccaggcaattcccaggacgccctatatataactcagctcctgctctgtgaattcacagccctggtcatgcggagcatgcggagccctgcctgctccccgcccaaaagaagtggtatttttagagggactgcagagtgaaaagggtcagcacaagctgcagtggcaaatccattgagtaaaaacacttaagtggaaaataataataatgatgagagctagtgctttcaaaggcgccttcctatttgcatgtgctttcacatccatcatccctctgactcaacatcattcagtggggaaaggaagcaggtgttcgctccattttacagacaagaaatataaagctggaggaagttaagcgcctgtggcagaacccaaaacttgggggttgttagtgctcaaggcctccttagcttctggcaatg

SEQ ID NO: 684773 - DNA, 630 bp, Homo sapiens
attaacttccattagatagaaagtaagggacaaatggatgactccaagagcccttgctgtcagcacacttaaggtgactgtgtcagccagggacccatgctctacctgcaagggccatgatggtttccaagtgaacagtatctatctgtctgtctrtctatctatctatctatctatctatctatctatctatctatcatctatctatctagctctctatcttctgtagtatagtgctgtgtcgttttgcccaggagaagaaagagcctcaaagagacttgataggccaaagtgggtgacaatttggacagagctgtagcagtactacctcttagaaaacttttaaacctggaatagtcagactttgaggacataaggtcatacacagcttgtttcctgttgtatcctggggacactgtgcatgctcaggtacacaccacgcctggctaattttgtatttttagtagagatggggtttctccatgttggtcaggctggtctcgaactcccgaccttaggtgatccgcatgcctcggcctcccaaagtgctgggatgacaggcgtgagccaccgcacccttgtacatctgattattatgtaatagtttgacaaattgctagaacagggtgt

SEQ ID NO: 684774 - DNA, 1743 bp, Homo sapiens
  misc_feature 1643, 1644, 1645, 1646, 1647, 1648, 1649, 1650, 1651, 1652,1653, 1654, 1655, 1656, 1657, 1658, 1659, 1660, 1661, 1662,1663, 1664, 1665, 1666, 1667, 1668, 1669, 1670, 1671, 1672,1673, 1674, 1675, 1676, 1677, 1678, 1679, 1680, 1681: n = A,T,C or G
  misc_feature 1682, 1683, 1684, 1685, 1686, 1687, 1688, 1689, 1690, 1691,1692, 1693, 1694, 1695, 1696, 1697, 1698, 1699, 1700, 1701,1702, 1703, 1704, 1705, 1706, 1707, 1708, 1709, 1710, 1711,1712, 1713, 1714, 1715, 1716, 1717, 1718, 1719, 1720: n = A,T,C or G
  misc_feature 1721, 1722, 1723, 1724, 1725, 1726, 1727, 1728, 1729, 1730,1731, 1732, 1733, 1734, 1735, 1736, 1737, 1738, 1739, 1740,1741, 1742: n = A,T,C or G
ggaatgcagtgcatccatgcgaccagaggacaggacaaggaggtgtagatgttgtagaaggaaatgatagactgggtgcggtsactcacacctgtaaccctagcactttgggagctgaaggcaggagggtcacttgagtccaggagttggagacaagcctgggcaacatagtgagaccttgtctcaataaataaagaagtaaacaaacaaacaaataaataaataaacaaacaaaattagccagccgtggtggagcacatctgtagtcccagctactcaggagctagacgtagaaggattgcttcagcctggatggttgaggctgcagtaagccatgatcatgccactgctctccaacctgggcaacagagtgagcccctggaaaagaagaaagaaagtaaaagaaagaaaagagagacagagagaaagaaagaaagagaaagaaagaaagaaagaaagaaagaaagaaagaaagaaagaaagaaagaaagaaagaaagagagaagaagaagaaggaaggaaggaaggaaggggaagggaaggaaggaaggaagagggaaattagttagaaaaaatatcttgttcccgactgcttcagaaatttaacaaaaaggaaatggtaaagtaagaaaagggaaagcaggaaaaagaaaacgtggaaaatcagaaggtgaagaaaaaagagccaggtatataagaagagtggcaccaatgaagagaacttgaggggagtaaaaatcccctgtatacagagaaataaataagaagagagaaatccaaagagaaggagagggaggcatgaaatgaaataagaaacagaggagagaaggggcctcaggaagcttggaatggctttagttggcttgtgaatttcagaggaaactaatatctattatttttcccctttgaaattctaatctgataattaaccattattaacaatttttatttttgtagtcctaaatgagttcacactgaagggggtaataatagctccccattgacagaaagtggaacagaaatcattatttcctggctttcagacatggccagagcaatattatctcaaaggccagatattacagctaaaaactacatctgacagccaaacatcctcaccctctgtgttaatcttttgaacacgtatgttcaactcaaagactctaggagtgttaaaaagagtaatgaccttaatatgtgtaaagttctttgaaggttaaaaagtacaagtactgtgtttttaaaagtcaacatttaatttgttcactaaaataaattgtaaggttttatttaggcaagtctttgagaaagaaagaaacatgcattaattacattgatttatgtcctgtgcttctcctgattgggaaagtgaactcttaacatgacattgaaaagacacaagatgccaagtaggcgatggagaggagacagagtaaagtaaggacaggaagtgacctattttgaaatcgcagctaacacaggagcacagccaaggactatgagactgagaaattgacagtttgccttcaccttcatctctttatctccttatcctgtcccctggctgtatggaagcattccattccctgcaccccaaaccccagatcaaccacctggagctgcaccaggtccaacttctcagnnnnnnnnnnnnnnnnnnnnnnnnnnnnnnnnnnnnnnnnnnnnnnnnnnnnnnnnnnnnnnnnnnnnnnnnnnnnnnnnnnnnnnnnnnnnnnnnnnnnc

SEQ ID NO: 684775 - DNA, 511 bp, Homo sapiens
  misc_feature 5, 6, 7, 8, 9, 10, 11, 12, 13, 14, 15, 16, 17, 18, 19, 20,21, 22, 23, 24, 25, 26, 27, 28, 29, 30, 31, 32, 33, 34,35, 36, 37, 38, 39, 40, 41, 42, 43, 44, 45, 46, 47, 48,49, 50, 51, 52, 53, 54, 55, 56, 57, 58, 59, 60, 61, 62,63: n = A,T,C or G
  misc_feature 64, 65, 66, 67, 68, 69, 70, 71, 72, 73, 74, 75, 76, 77, 78,79, 80, 81, 82, 83, 84, 85, 86, 87, 88, 89, 90, 91, 92,93, 94, 95, 96, 97, 98, 99, 100, 101, 102, 103, 104: n = A,T,C or G
ttatnnnnnnnnnnnnnnnnnnnnnnnnnnnnnnnnnnnnnnnnnnnnnnnnnnnnnnnnnnnnnnnnnnnnnnnnnnnnnnnnnnnnnnnnnnnnnnnnnnnngcattgcaatgaccatgaaaactacttgataaatgcatctgtggaagttatgctcagctaatttgtggtaaaactgggacaaaaactcatatccattgacttccaactcaatgccttttctgcycaatctcattgtcttggacagaattaacgtataaatgggaatcttgcctgtgctaaaagatgtttgaagaagactgttcccatgaagcaatattttaagggaacgattttgtttggctcttgaaccaaaggattggcacgttcaatcttggtcaagttgtgataatatagttagatacccatactgtctgtggccattcatttttcttttttggaaggtttttattaagccaaagcagccaactacaatttagaaaaattgaacttaaggataaagtgctttg

SEQ ID NO: 684776 - DNA, 1423 bp, Homo sapiens
cttttttttcacccccaaataacaatttacaggatctcaatattgaggccagaagagattacatagagattataggctctgcctgtaatcccagtgctttgggagccaagatgggagtattgctcgaggccagaagtttgagacaaagctgggcaacatrgcaagaccccatctctacaaaaaattaaaaaattagctgagtgtggtggtacatgtctgtactcctagctacttgggagcctgagggggaggatcacttgaacccaggagtacaaggttacagtgaattatgatcataccactgcactccaggctgggtgacagaatgagactccatttctaaagttaaaaagtgtatatattgaaaaaacttacttgaaaacttttagagtagaaattatctttatagtatctaatctatccagtcaaatgagctggcagtggaaggagcactggacttagagtcggaaggcatggccttttctcttttgccaatcaatgtgacatttagattttcattattatcattatcattattattattaagatttaaaaaaattgtgggctagaaatgtaactttcttcgtggcagaattttatacttatttttatttcatatgtgctcttccaactaagaaagaaaaaaactacagctctctggagcctgtagtgtttgaaacttattagctctgttgcctctggctacagaaatcaaaaaggagtttttcaagttgcattcagaaaagcagtctgtttttctgacctgcagtgttgctagtaattgtaagccaggtgttactcttggaaaatgatagtactcattattttaaaatagtgtggtgtggagggccaactgtaagacctggagctgtttgctgtttacacacatgcggacaacttctctggtcaaaagtgataaacaaatgaatctttcagcctccattcttcagcctctcaaatatatttctgaaaagggcatcgttccagggttctctctgaacaactcccacccctgaagttgaaagtcttgactatttcaatgtccttcccttgcatcatatcgcctgggcagcacgcccttactgttgttgctttgttaactgttagatactgagttatattaacatcaaagggcatagggaatcagaaatgaagcctccaactaacaatatgacaaagctgatctaccaatacatctttgatttggttttaagaggttgcagtggaagtggataggaggtatgaaatttctgattccaacttgagtctcattctagcccgtgccttggggatgtctataaagctgagagggaggaaaattgagggggaaaggaagagggaggaaaaggtagaggaagagaaagaaagaggaagacagaagaagagaaacagggagagaaggagattgcctgatcctgatcca

SEQ ID NO: 684777 - DNA, 1423 bp, Homo sapiens
cttttttttcacccccaaataacaatttacaggatctcaatattgaggccagaagagattacatagagattataggctctgcctgtaatcccagtgctttgggagccaagatgggagtattgctcgaggccagaagtttgagacaaagctgggcaacatggcaagaccccatctctacaaaaaattaaaaaattagctgagtgtggtggtacatgtctgtactcctagctacttgggagcctgagggggaggatcacttgaacccaggagtacaaggttacrgtgaattatgatcataccactgcactccaggctgggtgacagaatgagactccatttctaaagttaaaaagtgtatatattgaaaaaacttacttgaaaacttttagagtagaaattatctttatagtatctaatctatccagtcaaatgagctggcagtggaaggagcactggacttagagtcggaaggcatggccttttctcttttgccaatcaatgtgacatttagattttcattattatcattatcattattattattaagatttaaaaaaattgtgggctagaaatgtaactttcttcgtggcagaattttatacttatttttatttcatatgtgctcttccaactaagaaagaaaaaaactacagctctctggagcctgtagtgtttgaaacttattagctctgttgcctctggctacagaaatcaaaaaggagtttttcaagttgcattcagaaaagcagtctgtttttctgacctgcagtgttgctagtaattgtaagccaggtgttactcttggaaaatgatagtactcattattttaaaatagtgtggtgtggagggccaactgtaagacctggagctgtttgctgtttacacacatgcggacaacttctctggtcaaaagtgataaacaaatgaatctttcagcctccattcttcagcctctcaaatatatttctgaaaagggcatcgttccagggttctctctgaacaactcccacccctgaagttgaaagtcttgactatttcaatgtccttcccttgcatcatatcgcctgggcagcacgcccttactgttgttgctttgttaactgttagatactgagttatattaacatcaaagggcatagggaatcagaaatgaagcctccaactaacaatatgacaaagctgatctaccaatacatctttgatttggttttaagaggttgcagtggaagtggataggaggtatgaaatttctgattccaacttgagtctcattctagcccgtgccttggggatgtctataaagctgagagggaggaaaattgagggggaaaggaagagggaggaaaaggtagaggaagagaaagaaagaggaagacagaagaagagaaacagggagagaaggagattgcctgatcctgatcca

SEQ ID NO: 684778 - DNA, 1423 bp, Homo sapiens
cttttttttcacccccaaataacaatttacaggatctcaatattgaggccagaagagattacatagagattataggctctgcctgtaatcccagtgctttgggagccaagatgggagtattgctcgaggccagaagtttgagacaaagctgggcaacatggcaagaccccatctctacaaaaaattaaaaaattagctgagtgtggtggtacatgtctgtactcctagctacttgggagcctgagggggaggatcacttgaacccaggagtacaaggttacagtgaattatgatcataccactgmactccaggctgggtgacagaatgagactccatttctaaagttaaaaagtgtatatattgaaaaaacttacttgaaaacttttagagtagaaattatctttatagtatctaatctatccagtcaaatgagctggcagtggaaggagcactggacttagagtcggaaggcatggccttttctcttttgccaatcaatgtgacatttagattttcattattatcattatcattattattattaagatttaaaaaaattgtgggctagaaatgtaactttcttcgtggcagaattttatacttatttttatttcatatgtgctcttccaactaagaaagaaaaaaactacagctctctggagcctgtagtgtttgaaacttattagctctgttgcctctggctacagaaatcaaaaaggagtttttcaagttgcattcagaaaagcagtctgtttttctgacctgcagtgttgctagtaattgtaagccaggtgttactcttggaaaatgatagtactcattattttaaaatagtgtggtgtggagggccaactgtaagacctggagctgtttgctgtttacacacatgcggacaacttctctggtcaaaagtgataaacaaatgaatctttcagcctccattcttcagcctctcaaatatatttctgaaaagggcatcgttccagggttctctctgaacaactcccacccctgaagttgaaagtcttgactatttcaatgtccttcccttgcatcatatcgcctgggcagcacgcccttactgttgttgctttgttaactgttagatactgagttatattaacatcaaagggcatagggaatcagaaatgaagcctccaactaacaatatgacaaagctgatctaccaatacatctttgatttggttttaagaggttgcagtggaagtggataggaggtatgaaatttctgattccaacttgagtctcattctagcccgtgccttggggatgtctataaagctgagagggaggaaaattgagggggaaaggaagagggaggaaaaggtagaggaagagaaagaaagaggaagacagaagaagagaaacagggagagaaggagattgcctgatcctgatcca

SEQ ID NO: 684779 - DNA, 1423 bp, Homo sapiens
cttttttttcacccccaaataacaatttacaggatctcaatattgaggccagaagagattacatagagattataggctctgcctgtaatcccagtgctttgggagccaagatgggagtattgctcgaggccagaagtttgagacaaagctgggcaacatggcaagaccccatctctacaaaaaattaaaaaattagctgagtgtggtggtacatgtctgtactcctagctacttgggagcctgagggggaggatcacttgaacccaggagtacaaggttacagtgaattatgatcataccactgcactccaggctgggtgacagaatgagactccatttctaaagttaaaaagtrtatatattgaaaaaacttacttgaaaacttttagagtagaaattatctttatagtatctaatctatccagtcaaatgagctggcagtggaaggagcactggacttagagtcggaaggcatggccttttctcttttgccaatcaatgtgacatttagattttcattattatcattatcattattattattaagatttaaaaaaattgtgggctagaaatgtaactttcttcgtggcagaattttatacttatttttatttcatatgtgctcttccaactaagaaagaaaaaaactacagctctctggagcctgtagtgtttgaaacttattagctctgttgcctctggctacagaaatcaaaaaggagtttttcaagttgcattcagaaaagcagtctgtttttctgacctgcagtgttgctagtaattgtaagccaggtgttactcttggaaaatgatagtactcattattttaaaatagtgtggtgtggagggccaactgtaagacctggagctgtttgctgtttacacacatgcggacaacttctctggtcaaaagtgataaacaaatgaatctttcagcctccattcttcagcctctcaaatatatttctgaaaagggcatcgttccagggttctctctgaacaactcccacccctgaagttgaaagtcttgactatttcaatgtccttcccttgcatcatatcgcctgggcagcacgcccttactgttgttgctttgttaactgttagatactgagttatattaacatcaaagggcatagggaatcagaaatgaagcctccaactaacaatatgacaaagctgatctaccaatacatctttgatttggttttaagaggttgcagtggaagtggataggaggtatgaaatttctgattccaacttgagtctcattctagcccgtgccttggggatgtctataaagctgagagggaggaaaattgagggggaaaggaagagggaggaaaaggtagaggaagagaaagaaagaggaagacagaagaagagaaacagggagagaaggagattgcctgatcctgatcca

SEQ ID NO: 684780 - DNA, 1423 bp, Homo sapiens
cttttttttcacccccaaataacaatttacaggatctcaatattgaggccagaagagattacatagagattataggctctgcctgtaatcccagtgctttgggagccaagatgggagtattgctcgaggccagaagtttgagacaaagctgggcaacatggcaagaccccatctctacaaaaaattaaaaaattagctgagtgtggtggtacatgtctgtactcctagctacttgggagcctgagggggaggatcacttgaacccaggagtacaaggttacagtgaattatgatcataccactgcactccaggctgggtgacagaatgagactccatttctaaagttaaaaagtgtatatattgaaaaaacttacttgaaaactttkagagtagaaattatctttatagtatctaatctatccagtcaaatgagctggcagtggaaggagcactggacttagagtcggaaggcatggccttttctcttttgccaatcaatgtgacatttagattttcattattatcattatcattattattattaagatttaaaaaaattgtgggctagaaatgtaactttcttcgtggcagaattttatacttatttttatttcatatgtgctcttccaactaagaaagaaaaaaactacagctctctggagcctgtagtgtttgaaacttattagctctgttgcctctggctacagaaatcaaaaaggagtttttcaagttgcattcagaaaagcagtctgtttttctgacctgcagtgttgctagtaattgtaagccaggtgttactcttggaaaatgatagtactcattattttaaaatagtgtggtgtggagggccaactgtaagacctggagctgtttgctgtttacacacatgcggacaacttctctggtcaaaagtgataaacaaatgaatctttcagcctccattcttcagcctctcaaatatatttctgaaaagggcatcgttccagggttctctctgaacaactcccacccctgaagttgaaagtcttgactatttcaatgtccttcccttgcatcatatcgcctgggcagcacgcccttactgttgttgctttgttaactgttagatactgagttatattaacatcaaagggcatagggaatcagaaatgaagcctccaactaacaatatgacaaagctgatctaccaatacatctttgatttggttttaagaggttgcagtggaagtggataggaggtatgaaatttctgattccaacttgagtctcattctagcccgtgccttggggatgtctataaagctgagagggaggaaaattgagggggaaaggaagagggaggaaaaggtagaggaagagaaagaaagaggaagacagaagaagagaaacagggagagaaggagattgcctgatcctgatcca

SEQ ID NO: 684781 - DNA, 1423 bp, Homo sapiens
cttttttttcacccccaaataacaatttacaggatctcaatattgaggccagaagagattacatagagattataggctctgcctgtaatcccagtgctttgggagccaagatgggagtattgctcgaggccagaagtttgagacaaagctgggcaacatggcaagaccccatctctacaaaaaattaaaaaattagctgagtgtggtggtacatgtctgtactcctagctacttgggagcctgagggggaggatcacttgaacccaggagtacaaggttacagtgaattatgatcataccactgcactccaggctgggtgacagaatgagactccatttctaaagttaaaaagtgtatatattgaaaaaacttacttgaaaacttttagagtagaaattatctttatagtatctaatctatccagtcaaatgagctggcagtggaaggagcactggacttagagtcggaaggcatggcctyttctcttttgccaatcaatgtgacatttagattttcattattatcattatcattattattattaagatttaaaaaaattgtgggctagaaatgtaactttcttcgtggcagaattttatacttatttttatttcatatgtgctcttccaactaagaaagaaaaaaactacagctctctggagcctgtagtgtttgaaacttattagctctgttgcctctggctacagaaatcaaaaaggagtttttcaagttgcattcagaaaagcagtctgtttttctgacctgcagtgttgctagtaattgtaagccaggtgttactcttggaaaatgatagtactcattattttaaaatagtgtggtgtggagggccaactgtaagacctggagctgtttgctgtttacacacatgcggacaacttctctggtcaaaagtgataaacaaatgaatctttcagcctccattcttcagcctctcaaatatatttctgaaaagggcatcgttccagggttctctctgaacaactcccacccctgaagttgaaagtcttgactatttcaatgtccttcccttgcatcatatcgcctgggcagcacgcccttactgttgttgctttgttaactgttagatactgagttatattaacatcaaagggcatagggaatcagaaatgaagcctccaactaacaatatgacaaagctgatctaccaatacatctttgatttggttttaagaggttgcagtggaagtggataggaggtatgaaatttctgattccaacttgagtctcattctagcccgtgccttggggatgtctataaagctgagagggaggaaaattgagggggaaaggaagagggaggaaaaggtagaggaagagaaagaaagaggaagacagaagaagagaaacagggagagaaggagattgcctgatcctgatcca

SEQ ID NO: 684782 - DNA, 649 bp, Homo sapiens
tttaaaatctgtctacgtctgcctacatttccagttgatgttagtccattaactctttattctgctatatscaaactgctattaaatccatatatcaaattcttaatttttgttactttattttgcagttctcaaatttctatatgattattaagtctattcctttgatgaaactccccatcttaccctctatttcctaaacattttaagcacttattttaattttgtgttgctaaggacaatatctgcatcatctgtgagtcttttcccactgttgatttttttgtgttcttcctatttgttgagttattgctatattttgtatacctggtagatttttgttgaatgccagatactgaatataaaaaaccagggatgatgtggattgtgttatagctttcctgagagagtttgccctgtcctttggttggaagctatagtggaggcaaatcaccttaatcaagtaaacgagaagatgaaatgctgggtttcagtcttcttaagattggtttcctggagtgctatagcccctaaaggtctcgaatgagagtatgaagtgttctctgttgcccctctcccttagtgagtcatggcctccagttttgtcttctcagcactaaaagatgtttaaaaactctaatttgatttt

SEQ ID NO: 684783 - DNA, 649 bp, Homo sapiens
tttaaaatctgtctacgtctgcctacatttccagttgatgttagtccattaactctttattctgctatatccaaactgctattaaatccatatatcaaattcttaatttttgttactttattttgcagttctcaaatttctatatgattattaagtctattcctttgatgaaactccccatcttaccctctatttcctaaacattttaagcacttattttaattttgtgttgctaaggacaatatctgcatcatctgtgagtcttttcccactgttgatttttttgtgttcttcctatttgttgagttattgctatattttgtatacctggtagatttttgttgaatgccagatactgaatataaaaaaccagggatgatgtggattgtgttatagctttcctgagagagtttgccctgtcctytggttggaagctatagtggaggcaaatcaccttaatcaagtaaacgagaagatgaaatgctgggtttcagtcttcttaagattggtttcctggagtgctatagcccctaaaggtctcgaatgagagtatgaagtgttctctgttgcccctctcccttagtgagtcatggcctccagttttgtcttctcagcactaaaagatgtttaaaaactctaatttgatttt

SEQ ID NO: 684784 - DNA, 649 bp, Homo sapiens
tttaaaatctgtctacgtctgcctacatttccagttgatgttagtccattaactctttattctgctatatccaaactgctattaaatccatatatcaaattcttaatttttgttactttattttgcagttctcaaatttctatatgattattaagtctattcctttgatgaaactccccatcttaccctctatttcctaaacattttaagcacttattttaattttgtgttgctaaggacaatatctgcatcatctgtgagtcttttcccactgttgatttttttgtgttcttcctatttgttgagttattgctatattttgtatacctggtagatttttgttgaatgccagatactgaatataaaaaaccagggatgatgtggattgtgttatagctttcctgagagagtttgccctgtcctttggttggaagctatagtggaggcaaatcaccttaatcaagtaaacgagaagatgaaatgctgggtttcagtcttcttaagattggtttcctggagtgytatagcccctaaaggtctcgaatgagagtatgaagtgttctctgttgcccctctcccttagtgagtcatggcctccagttttgtcttctcagcactaaaagatgtttaaaaactctaatttgatttt

SEQ ID NO: 684785 - DNA, 1455 bp, Homo sapiens
tgttgcatgtctaacatgttccagtgaccattcaattgtggattacagagaactgtcattgtccaaattagaggcaggaatttcagtcctgtgggaagcatccaaaaagttcttcagcacagataggtttaggaataaaactggagatcttttgagtggttctcatttttataagcttggtcatgaacttatctgccccttagttatttttagaattgatttcatgctcaggtcaatcatttcacagtgaagaatataccatttctcaaactgccttctttccaaattttatgactagagttcagcctgagttcacataatcagctgatgaacatcactcaatggagcatattaactagaattgttgtctctatctgggtctcttccagatggtcttgtcaaatgctatcagagcatcatatattagagaatatgttatatcagcctccacttaagttactcatagattgttcttgacccttctcatggctcttctctcttgtaggttgtgttattggtaacataatttgctctgacaaaagcaaataaaggaaattttagacctktattattcaactggataaaactgaaggttcagaagtgattgcaaatattgccaaccaggtgaaaattatttccattctcagctgaacgctattacctttaaatcaaaagtaatcagtttaatgtaagtcttacctaagtctattaaaatttttctaggcctagcaaagcataaaaatgctgtatattttaatgtcctcagattaaagtatccccatctctgaatattttgaaattttaaaaagaaatcactaaaaggtgaccagcagaatttattcttactaaaaagaatggatgagatggcatggaatatagtaacagccccacagcttgtctccctgtctctactcttgttttttatattccctccttcacagagcaattttttcaaactatcaattagatcatgtatttctcctacttaaaatctccagtaggtttttcactgcaccagaataaaatcaccacttgttagcatgctctctgaagttctgacctgtccacatgctcagctcacctggcctgcccccccaaccctctcccactctctcctgtcatttggttgcaaccactgaacttttccccaaaactccaacttactaagcttgctctttcttaggaactttgttctaattttttctcctttttttgcttcatatctttgcttgactgcctccatattattcctgtctcacaccttcaaggaaaattctgatgactgtattttttatctgctttgtttacgatgtatcctcagagcgcagaataatggctagaacacaggaaaactcagtaaaatttcattgaatgaaataggtcttccctgcctacccaaggcaaagcagcttgtagtcttcttccctccttcccattaatttctctttcattttc

SEQ ID NO: 684786 - DNA, 1455 bp, Homo sapiens
tgttgcatgtctaacatgttccagtgaccattcaattgtggattacagagaactgtcattgtccaaattagaggcaggaatttcagtcctgtgggaagcatccaaaaagttcttcagcacagataggtttaggaataaaactggagatcttttgagtggttctcatttttataagcttggtcatgaacttatctgccccttagttatttttagaattgatttcatgctcaggtcaatcatttcacagtgaagaatataccatttctcaaactgccttctttccaaattttatgactagagttcagcctgagttcacataatcagctgatgaacatcactcaatggagcatattaactagaattgttgtctctatctgggtctcttccagatggtcttgtcaaatgctatcagagcatcatatattagagaatatgttatatcagcctccacttaagttactcatagattgttcttgacccttctcatggctcttctctcttgtaggttgtgttattggtaacataatttgctctgacaaaagcaaataaaggaaattttagacctttattattcaactggataaaactgaaggttcagaagtgattgcaaatattgccaaccaggtgaaaattatttccattctcagctgaacgctattacctttaaatcaaaagtaatcagtttaatgtaagtcttacctaagtctattaaamtttttctaggcctagcaaagcataaaaatgctgtatattttaatgtcctcagattaaagtatccccatctctgaatattttgaaattttaaaaagaaatcactaaaaggtgaccagcagaatttattcttactaaaaagaatggatgagatggcatggaatatagtaacagccccacagcttgtctccctgtctctactcttgttttttatattccctccttcacagagcaattttttcaaactatcaattagatcatgtatttctcctacttaaaatctccagtaggtttttcactgcaccagaataaaatcaccacttgttagcatgctctctgaagttctgacctgtccacatgctcagctcacctggcctgcccccccaaccctctcccactctctcctgtcatttggttgcaaccactgaacttttccccaaaactccaacttactaagcttgctctttcttaggaactttgttctaattttttctcctttttttgcttcatatctttgcttgactgcctccatattattcctgtctcacaccttcaaggaaaattctgatgactgtattttttatctgctttgtttacgatgtatcctcagagcgcagaataatggctagaacacaggaaaactcagtaaaatttcattgaatgaaataggtcttccctgcctacccaaggcaaagcagcttgtagtcttcttccctccttcccattaatttctctttcattttc

SEQ ID NO: 684787 - DNA, 1526 bp, Homo sapiens
cctcagatactatgaaatttttagtggtttattctacaaacttcaggtgtgaaaaaaaggggcaatagtgtgttgatatatcaagtacttgagactgcttgctagaggcaatcacagttcttataaaaagagctgtttgcagtttaactgcaaggagagaaatggcagttattttactttagttgtttgtgttaaacactaaggaaagtgtcatgaggctgtaagaagccaaaacaattcaataaaaggtaaaaatcacagtccattcttgcaacagttcctcatttatttctaacaaaatagctcctatcaatctcaaactcaccattaacatctcttacctaataaaaaggataaaataataaatcacttataaataccaaacaatagcagagcaattaaaaacagataagtgaaaatagtaatttaaatatttcttaaagaaatttaaaatgagaagatggaggcttgagaaaatatttacaaattccatctatttgaaatctgcttaaatgaagaaaagtatagaataaacaataatctactctgaaatttaagaaacaacccaacgtcatacaagaaactctgcagaatatctgctttgggccaaaaagaaagaaggtactggagagttgacatagcattcccacctgagggcaccaaacagagctacaaaaagaaagtagaggaaattagaaggatcccactactgatttttatttatccagtccaaaatatcaatagtgccaaggttaaacagcctccatctagaagaataaatgtgtgttaatagtcagaaaaattatgaaaatgaagaacaatgagtgggaacttcttcagccaggaattataatatatagttatattaagcattaattaaaagaacattccgggtaaagaaatatatattcagataagtgaaatgtaacaattcatttgtaaattcaaatacgtgtaataatttagtgtcatgaagaaagcagctttcaaatcmatataaaaagatagattttcactgtattcagaaaatttgtcagatactcaagaagaaaaaaatggatctgtactactcattctttacaacataaaatatttcacataattaaggttaagttactaaaataaaaacaggaaagcactaaaagcaaatatggatagagtcttttagttttagcaattaaagactcccttggcagacacagaaattctaaacaaatatggcaagtctacttttatttgaggggagaataggaacagaggatgttgttgatacttagtggcttgggttttaaggtaacaatcaatcaatcaatgtactgtaactttactaaaagtcacgtactgtttgaaagtaaaatctttaaaacataaatagataagtaaaaagtaagggatggaaaaaaaagatgtctgaggaaaataccaactgaaataaagctagtgacttcctttgatgctggcaatattctctatcttgatctgggtggtgggtacatggctgtatacattagaaaaaaattatcaaa

SEQ ID NO: 684788 - DNA, 583 bp, Homo sapiens
aatttttacactgccccacgtcctcacctttggcccttctcaaggagtctgtaatcatgggaaaagggcaaatgaatttcaggatggaagagttttctgcttacagagctcaggcctgtataactgcccaggggaatggttgggcagtcagggaatggtattgaagattctgcatgccaggagaataaagaggaaamgaaggggagattataaagcaaataagataggcacaaacataaacttggccttcctcagggtatttttgtggagttctgattatgttgctttctaagttgttctggccaacaaagaatgagggtatagtgtcttctgagagataagaaggcattagcaaaacatctgcatttgcatatggacacacatctcaatcacttcctctttcctagggaagcaccttattctccagatatatcttctaggcctggtcctgattgggtctgcagtttcagtgctgcaggtcatgatgctatgggccttgcctagagcctgaggtgtgggacaccactatcccatgggatttaattttgctcaaagccctttaacaccagtttctggccaaggc

SEQ ID NO: 684789 - DNA, 1074 bp, Homo sapiens
aatgtgtcgctaatgttagaggtacatacccacagagatttatgcagaaattaatgctgaaatgctcaggtgcatttcaaaatgtactcttcccatttgtgagaaaaaggatttataacaattattttgttcatccactcgccttgttgtccccagggtgtccttctattcagcaatgacatcagacaggaccatggtggcaacgctatgggttatttgcattgagactgactgtttcatcctttctcacactgctgtaaagaaatacccaagactgggtaatttataaagaaaagaagtttaattggttcacagttttgcagactgtacagaaagcatgatactggcaactacttggcttctggggaggcttcaggaacttacaatcatggcagaaggcaaaggggaagcaggctcctcttacatggccagagcaggamgaaggggtgcagcgtgccacacacttttaaacaaccagatcttatgagaactcactatcaccacgacaacaccaagtgggagagtgttaaaccatgagaaatcacccacatgatccaatcacctcccaccaggccccacctccaacattgggggttacaatttgacatgatatttggatggggccacagaaatgaactgtatcactggccagagctaatggaagatataaaaaggtctgcctcagtgagaggttcctgaacaggcaacgccagtgtcacgcttgttattcacaatgagttccttgtctcctgtctcattgtttccagacacacaatcttcccccaaggtagcactaagctaggtcacctgttgctccactgctaattaccatttacttcatttgcatgtgttatgaggttcctgtaaccaaggcaaccagaagtggtacttgtaccgtcaatggaacaatcttttctccatctggtcaggctgcaatggcattcttgctcactgcccctcactctcatggcagcaaaaaaatacacgttcagcagaatccttctgtgtcatcagtttctctacaaggactcaggaactgtacacttcactctagatttatcaggtaacttaatt

SEQ ID NO: 684790 - DNA, 683 bp, Homo sapiens
cctttgctaaacatcatgtcctattcgctgtgatcatagtgacatgcaggctgtggtctgtcctgatgagtgctgtgactgcacaggtgatatccaaattcaatcatctagcacttttcatcgactttcactaatgcaggaagaaataacactggattcaacaacagcaacaacaacaccaccaccaacaaaacaacctctgccaattccttatcctgtttctgactgacctcttttacacccaaggaaagtattgtcaaaccaccaatcccccagagctgcactgtcttggagatgctaaattacaaagagaaaayatctcagcattaaggaggaagagagctctggctgtggaatgattagagggtggagcatccttgggcaaaatgctgcaatatctccttgggcttatatgctattatcctgattctaagattttccatctcaggtattcagacctctaaactctgtctccttctccccaaccctatttacaagttgacatgtaccaaaaagaataaatgaataacaacagtttacattgttactcattctcagagacattttgacatgaaatacagatgtaatttaaactacagtagaatttaagtatagaatcaggaaggggtggtgggaaattagaggtccagatgattatatagtccagtaacctaggattaatt

SEQ ID NO: 684791 - DNA, 683 bp, Homo sapiens
cctttgctaaacatcatgtcctattcgctgtgatcatagtgacatgcaggctgtggtctgtcctgatgagtgctgtgactgcacaggtgatatccaaattcaatcatctagcacttttcatcgactttcactaatgcaggaagaaataacactggattcaacaacagcaacaacaacaccaccaccaacaaaacaacctctgccaattccttatcctgtttctgactgacctcttttacacccaaggaaagtattgtcaaaccaccaatcccccagagctgcactgtcttggagatgctaaattacaaagagaaaacatctcagcattaaggaggaagagagctctggctgtggaatgattagagggtggagcatccttgggcaaaatgctgcaatatctccttrggcttatatgctattatcctgattctaagattttccatctcaggtattcagacctctaaactctgtctccttctccccaaccctatttacaagttgacatgtaccaaaaagaataaatgaataacaacagtttacattgttactcattctcagagacattttgacatgaaatacagatgtaatttaaactacagtagaatttaagtatagaatcaggaaggggtggtgggaaattagaggtccagatgattatatagtccagtaacctaggattaatt

SEQ ID NO: 684792 - DNA, 1364 bp, Homo sapiens
cctcttacatttctaggtcttgctactgcagcaatctaaatatatcctaagcttcctatcactaatttcaccaccataaactccgaccataatggcttaatattaataattggcagcaaaatttgtaatattattctcaaggcacatttattttgcatttgataagtaaaagtatcattttaaaaaaaaaacccaccatatccttacaaaatacctttaagtagagaacctttaagtagagaagccgaaatcaacgaaaggtgtcctcttattaaatttctcatattcagtgacaggtagcaagcatctccatcactattttagaatgaggaaacagcctcagggacttgaactaagtgagtcagttgtgaggctaaaatagaaaccaaacttcaagatgaccttgaatgaaatccagccagaaaagaaggcgtacattggtagtgacacttgtttagcctaatgtgactccagaaaaaaagtcagaatagcctcattaaaaaaaatagcattactgcaaatcctaaatattattatacatttgtcattaccttggcaaattcatcacataagcttgctgtttggggtgtagccatatgttacatatgctatatctatgctgtcttattttccttcctaagtgcaatccacagaatactaaagtgactgtttgtctcacaaaactgcttgctacaatatgtacttattcttagattttgcatttcattctaaaatctattcaaacgtatttattaattagtttatccagatcagcagcatagctggagggaactgctcatcaaattgaaagcaaaatcacttctaaagacatccaagactgagagtttctgtcaagaccacccaactacttagtaacaacgctgagtcaaaatcaagaacgcaggtctgactcccacccagtgcctttcatttaattgtaccaaaccattttctccaattaagtggaaaccctactccaaactaaaagcagccctctgttcccagatcagttagggcttctaatatcactgcgacatatttaagaggagcaggaaatgtctatttgaagccttctttctcttcacaaaacccctccctcttcctcaaccctgctctgccttgcccaggtattaaatgccrctagtttcaaagcccattaatttgaacttgtacataatgagaaaaagcaagagatgaaaagtttggctgatatcaaattgccctctccacaccacaatatgcacaactatttctgcctttgtgggaaacaaaaggcattacagatgaggaagagaaaaatggaaaaggaaggatagcagaagttgtattccagtaaaatgtatactcagtatgaaattgagggg

SEQ ID NO: 684793 - DNA, 1141 bp, Homo sapiens
cacctcgtagcttcttctgtcgataatctcctagaaaaaaagaaacatctgtcttgaatgtttctgaaataacctccttgccctcaacaaccgctaagatttgctcaagaaaacaaattggaaaaatgtggggaagggtgcagggagcaaatgaagactatacctggattcctgcaattctgtcactgtaaatttgtacattcttaagtaactgatgaaaaaaaacctcaagactgaaattcagtgaattttgtctgttggcttttagtctaaagaacaaagctaagtaagtacatgatttaaaggtatcgaggtaacaatggaaagaaactggtcttagagccagaaaagttagactcagctcctgactccattcctactgtcacctaaatgtctgcacttctgaaatggggataatgatgcccattacatagttgtgtgagggtcacacaaggtaacatctatgatatttaatacagcaccagcacagaagaggtgctgaattcaggttacttgaatctaagcatatttttagagtaaatttgaacagttrtttccaaattgagagctcagattgacaactaagtagaaccaagaagtatcctttgccacccacagttttatgagagatggatgatatggcttacttaggaaaaaaaaaaaaaagaggattcccattctgagatcactaagctatacgttttgaaaaggaaaataaacattcctttcactcacgtccagggatataaaaggagctgccaagagacaggatttttccagtggctcatctggtcagcttctcactaaagaagtgagctatatgacttgctgtattacccagggaatggcacgtggccgtactactcacttgagagcgcggttgggtttgtctggaagaatagctgtgaaatcactacacgagtctgacttgtgagacaggcatcccagtcgagtcctcatccctttgttcctgcaacaagcacaggggcagaaggacggggaaactctcatgatcacagctgtcagctctatacagggcccctggagctgctgctacgggagccagcactgcccccacccttccccaggtggtctctgaagacttcatgaacaggaagagaccacctagagaatcaataac

SEQ ID NO: 684794 - DNA, 2364 bp, Homo sapiens
ttcttcctgcttgggaggggtaaatacctagaaatgcgcgaagtgtggctgggcgttgccaggagagcggccggcaccccacgggggcagggagcagacctgactcagtggcgtcagtgctacttcaaagcggcagcgcatttcattaaaaatctgatgtagaaattaccctgggctttgttttgcaaagagcatttgcataagaaaaaataatcagccggttaattcccccgtccactggcaggaagagagacagccttcagagagtttgggactctctcattcccggagaattaaaagcctccgagacatccattttagaagttctggtcaatcgttcttaaagtgcggtcagaagaccccttgcgtctgaatggtttggagcactcatacaagcagaatccctgccccagtcttgagtctgggaacggagaagggagcgtcagcggggtggtgagggggtagcggggagggcgaagttgaccgtgccaagccggcccgctggaagagctgcagggaccagacggggagcagacggaacaagcgtgctgatggtaagaggcccccagactttttctttccctaaccctttccctgtctgggcctccgtttccggttttccggttggtgcagtgctctctggggttctcccagggggactgtcggtgaggctgcggcgcccgagaccgctccacgtgcagctccacggcgtgcccaccagggggcgcggcccgcatccttcctcggagctgcggcgctccaggaccagcaggtctcccgcaaacgcgcgcgcacggagagcacaaggcgtgtggctcttggcatgtgtgccggttggggtcctctggtaagcagacgctgagatggcgttaggagtgcaagaagtttgttggggatttaaacctgtgtaaggacgactggcggggagagcctcagacggcaatgcagatctgaccaagtctctgccagcccagcagggagatcccggtggagactgccgatttgaagagtcccgcaatgggatgacgtggccgggcacttgcacccgtgcagtgctcaggcattggctgggggctgcctgggaagatccggatattgaatgtgaaagacaggaggtgctggaggctgctaactgtgctccctacagctggtctgcaagttcattcattgttttcttcctttctttctctttcttttttctttttcgttcttttttttctttttctttctttctttatttttttttttcttctgagacaggwtctcgctctgtcacccaggctggagtgcagtggtgcaatcatggctcactgcagcctcaaactcctgggctcaagcgatcctcccaccccagtgtctggagtagctgggactacaggtgcatgccaccatgcccagctaattaaagacaattttttttgtagaaacggggtctcaatatattgcccaggctggtcctgaactcctggcctcaagtgatcttcctgcctccgtttcccaaagtgttaggatgacaggcctgagccaccgcgcccagcctgcaggttctttcttgaagggaaacaccagcagccggcagtgtgcagcctcctgtctctctaagcactgtcctccacatacaacccatcttcctcctctctgctccttgctggtcagggccgctctccagctgtgctccctagactcctgcctttcagggccagctttcaggaccttgagggcagggtgctaggcataagccagtgatcttactagtggattctgtacgagggaaaagcctgcacaacccgaggggaccagaggaagcagaaccgcagctctcctcacgatcttgtggggacttgtgcaaattagcaccactcttctgggtttcccatggcacagcccgggtaattttccctagcgcctccagggataggatccaaaatgggaatttaggaggggccatatttcccccaaaggaatggcacacagagagcatagagctctggtggttgttgagggatttatgttccctccaccccgcgtcccccaggctcccagcacaactttgcctctcaatactggttgggtcccaggaaagggagcttgaagagggtttttttccagaatctgtcaggcctgagggtgctcgggagataagggggaggggctgggagagggctgggctgggacagtggaagagctcctgcatatgccacgctgggcggcccccctcccagctcctcccaggcacggtgatgcccatctgccattttggagcgtttgggcagtgcctgcagctcactctccccggtccagatggtcacccatccctccctccccgactctcccctgccctcacccccagccccactcagagca

SEQ ID NO: 684795 - DNA, 619 bp, Homo sapiens
tgataaaaaatactatctcctgacgagccacagtaagaatgtacccacagagagtcagggaataaaaccccagcctgccaaaccaccttcaagccacttcctattgaacaacccacgtacttcgctccctttgtttgtccaggaaacattggagtgtcagagatcagaagatatctagtagttgttgaggcaaagagaaagactratttaggattagtctgcaccgtttccaccttttaggtttgctttagccatttagcttttaaaagaaataaatgcatgaatttataaacgtttaattaagccattttgtctgctttttcagttttgtttctgctaaaatttaagcaaaattggaattgaaactgaaactggaaacttaaatgcaccacatattccttgaagaaattgaattcgtaatttaaaagcccctttcctatccccaaaacacaaaatagtccagacccagatgaactcactagtgaattccaacaaacacttaagaaagaaataccaattcaaagaaaaaaaaaaaaacactcagaaaaaagaggagggaacatattccaactcattatgagaccatcatgtcccaatacaaataaaactacatacagat

SEQ ID NO: 684796 - DNA, 648 bp, Homo sapiens
tcttcctctttttgtaaggaaatcaatcctattgtatgagggccctaccctatgacctcatttaatcttgatcatcaccttcaagaccctgtcttcaaacacagtcacactggaggttagagcttcaacataggaattttgggggaccatgattctgtcgaaaacagaactttaagttggtgccttttactaggtacacatacacaaagacactatattttaataaagtaaataaagaaatctttttcaacatttaaaacttctgctctttgaaaaacatcttcagtaaaggaaaagacaagccacaggctgggaggaaatattcatatagctgacaaaagctatatgtaaagtgaacattatatcctgaatttataaagaacacttagaactcaataataacaaaaaatttgaaaaatgctcaatagattaaaaaagatggttcccaaaagaagatgcaccaatggccaataagcatgtgaaaagatgctcagcatcattagtcatcctggaaatgaaagcctaaaccacaatgaggtatgactacayacccattagaatagttagtatttaaaagctgacaatccaagaattggaaggatgtggagcattgctggtgacagtctaaaatggtatagccccttcaga

SEQ ID NO: 684797 - DNA, 946 bp, Homo sapiens
aaattaattgttccctgtataactttaccatcagagtcccctctcaccttaagcaaacctaatttataaaattccaattttawgataaaagcattgtttttaaaaatgtttacaaccaaatttctttaaataattaaatccccagacatttaaaagtattgttctattactataattctattaaaagtattattccagcaatttcgttttcaggaacaacctgtattagataggaaaaatttattttaatatatactctgtcctgcaatggtttagagaacgaatagacttaagcagtgttcatgatccaggggtaatgataaataggttgggaaaattgataagtagctcaggggaaaccctgaagctgtacagtttattcttccttgactagattgctgatccaactaaatccctaattatgtcaagggtcacaaagagggcagagatgaggtgagaggctgtggaccaaggcaagactcaaataggaacctggatccaggaaagagtgtctgtggcagttaataacgattaatgcctgtgtgtttttcagaacactgagctgaaggttgaagtggagagcttgaaacgagaactccaggacaagaaacagcatctggataaaacatggtaagttgtaattttaagctctggtcctttccagagtctgtcttactaatctgagagcaatagatttggaaccaaattccttaacctatctgtggcatttgaatcctgtgtctgattcaggaactgaaacaatagattttcatatgctgtgtttcccttgggctctctctctattactaggtcagatggaccttgtcataagttggtaaatccaccagacctaagattgcaaacttcctattagtcagcaatcaactaaattgaaacagtgaatgtttccactttcagtagagacaaatgcaaataagctttatca

SEQ ID NO: 684798 - DNA, 3096 bp, Homo sapiens
ttccaaaataccaatataaaactgaactgaagtctcggccaggtactgtgtctcacacgtataaatcccagcattttgggaggccaagatgggtggatcacttgaggccaggaattcgagaccagcctggccaacaaggcaaaactcccatctctaccaaaaataccgaaattagctagctggtcatggcagcgtgcacctctagtcccagctattcaggaggctgaggcacaagaatcacttgaacctaggaggcagaggttgcagttagccaaaatcatgccactgcaccccagcctgggcaatagagcgagactctgtctctaagtaaataaataaataaataaataaataaaaactgaagtctcatccatcttttgctcatatcagtatttctcaaaactataggaagaacgacttattattaaagatattttcaacttttggcaaaaatcttaatttaagtgtgctgtacccctttcatttgcctctttagatctcctctctgccctcctgcaccttgctttctgcactgggaagctgacttggatgaagcgcctcaatagactccttgctctgtgccagttaggttcaggcaatgaagaagccccaacagtagggaagaaggagaacagacagtgagtgatgtccgggtatttattcccctggcttctttcagagaaggaaataaccttcttctggaagtatccctctaccaaaagttacgctcctctcaagttggccttctctagaaattttctccttttcagtttcagaaactgctcctcccccttatacattcaggcctagggatggtaacaaccagtatgctactggtcagaggttactgtaccttgtaattctcctacagcctagtcatatctttgtatataatcccttaagctaatttgggtgtgccatctgtttcctgtatgaccctgatacatttgtcttctttttgagggaggtttatgggagtattactgtctataaaaataaaatttgaaaaactggacattatataaagcagcacttggagagtatatagttatgaaacactagagtgtttttccaaagcaagatgacccatttatctagcaaacttgaaacacttcaaaaattctaagccagtaaaaccaatttctcttttaactaaaaattgcagcgatatagcctgatcctacttgttctcactccctgtacttactgtacttaggacatttcctttgatcccttaccatcagatactttaccaggtctgattagtaattrgtctttctataattcttgtacaaatacagacacctatgctcaccattcctgaatgtagtaaatattataccccaataccatgagtaccaggtatcttctatttctttgttctgttttgtttttttaattagaggatcttattctactaaaagaaacaaaacatcattctttctgatttcccaattctgatctccataaaatgagccttattgtgagtgtgagtctgtggactggggtaaagaagaactcagccattatatgccaatcaagtagatctttagcaaagttcctgtcacatgtgactctaaagaagaatcaaaccaaataacagaaagggcaaaaggcaacaatttctatgggggaaagatcaaaagactagagaaaattacttttcagaacaaagccttagtcactcaaaaagacaaaaagaagtggaatggaaaaggaagcagaagctaaaacttcagcaagtaaacatcagaaaaaatgtataaatattatatcagtgtaacaaatagcttctccatattgtttgctcccttgatagagagaagtgaggggcaaaaacttaccaaattcaataaaggaatagggtcgggacacagtgggcaccttctttccatgctgttcatcaaattctgagtgcaaatcttctaggtaggcaaaagccaacgtcttagggaaggcagcttcacataaaaccaaatcacacaccccctgctcaataatgtagctggtgagacataaaaagcaagacaaagttgtctgtaaagtaatagcactgacaatagtttaaagcagaatctctgtcccatgcaaacttttttaaaaatctagcctaaatactttgaggctggctaaacgagagtcaatttaaaaccgcaaatccttggaatcagaaagcaaacatcttcccattattagatgtatattcttttttttttgtttttggtttttttttttctttttttttgagacggagtctcgctctgcccccgggctggagtgcagtggcattatctcggctcactgcaacctccgcctcccgggttcaagccattctcctgcctcagcctcccgagcagctgggactacaggcgtgcgccactatgcccagctaatttttgtatttttagtagagacggggtttcaccacgttagttggccaggatggtcttgatatcttgacctcgtgatccgcccgcctcagcctcccaaagtgctgggattacaggcgtgagccactgcacccagcctattagccgtatattctaaaaggagtatttagacatatttattataatttttcatccattagattctcttttttttttttttttttttttttttttttgagacagggctctttcgatcacccagattacccgggctggaatgcagtggcatgatctcagttacagcaatctccgcctcccaggttcaggtgattctcacgcctcagcttcacaaatagctgggattacagacacccaccaccacacccagctaatttttgtatttttagtagagatggggtttcaccattttggccaggctggtctgaaactcgtgacctcaatcgatccacccaattcagtctcccaaagtgctgagattacaggtgtaagccactggacccagcccattacacaattcttcaactaacattttaaacttttattttagcttgaggatgtatatgtgcgggtttgttacctgggtatattgcataatgccgaggtttggggtacaaacaatcccgtcacccaagtactaagcatactacctaatagtttttcaacccctgccccctccttccctcct

SEQ ID NO: 684799 - DNA, 1095 bp, Homo sapiens
cattcaactttcgaaagagttacttagcctgactctgatactgttgaaggtcccggccagactgaaagaagacatcttcatttaagaattttccacaaaatgctgtatcaattagtgagaagcaccatattatgaggacactctgaatgaggtccttcatttacaggtaagtaagattcattttaacggaggaaagacaacctactttcagagtacagaggaagacctaacccctacttcttcaagatgatcgcattagttatttgctaagaagcaaaagcatatacctcaaatacacttaagcactcttaactttcaatccagtcttctttccactattaggacagtactctcctcctaacccatttcatttgcagttattggcacagaactacacagcatgtgctatactcaggggaatatcctaggaacaagattggtgaatttcatttttatgttggaatatccagcagaaccttccacaagtgttacagtttttagcatttaaacaaaactaaatgtgtgtactagtgactgcaaattattatgaacactttgactgcaattacataaaaatgaccaagggtagagacaaagattagsatgtcagataccctttactgaagaaatctatttggttcccaagtttggacagcaaaagtttgaatatcgagggatatatgcagacaaaaatgaaaataatagcattcacatgttataattacaggtaatattttcctgaacaatttctaactgcttttacaattatttttgttaaaaagagggggcaaatctactggaaaaaccagcagtgtcatttcaaaagaagaaaaccatgcatctccaatctactagatccaacagggaaaggaagtgcctgaagaatgggaagcaaatagacattgtttttccatccacatgtggggtaggggagctttctgccagctacccagctatagtctgaatgtttgctggtatcccccacaaaattcatgttgaaatcctaaccccccaaagtgatggtattaagaagtgggacctttgggaggtgattaagtcatgagggtagagccctcatgaatgcgactagtacct

SEQ ID NO: 684800 - DNA, 639 bp, Homo sapiens
ctaagcctcagagcttccttatctattattggagattttaatagtacctgttctaatatggtagtatgaggattaaataaaaaaatgaacttaataggcttagcacagtgtttggtatgtagtaggygcttttataaatgttctgtatactattaaaatagtaaaagtaagcctaagattcagatctttacagacattaaaagtttaggcaaactttattattcaaagtcaaaattcctaaaggaaaatactatggcactacaatcacaaaaatatttgtgtgtaaaatttctttccttgtcaattaaacaaagcatcccatcttgataaaccaatatgaaatcaataccaaatttataattaaaaaacaataaatcaattaatttttcaataaagtatcatggcagagagtaggggccactaatattaagtagactttcaagttcactttgtattctttgctaacactggaattcaatgcaataatttaaaaattgaccagattccatcccccctacccccaacacacagccacccactgtaggaaaactattttttagtcaaactacacatccttcaaggatattcccctgcactatctactttgttcaaatcatattcctaggttcatttgaacaa

SEQ ID NO: 684801 - DNA, 639 bp, Homo sapiens
ctaagcctcagagcttccttatctattattggagattttaatagtacctgttctaatatggtagtatgaggattaaataaaaaaatgaacttaataggcttagcacagtgtttggtatgtagtaggtgcttttataaatgttctgtatactattaaaatagtaaaagtaagcctaagattcagatctttacagacattaaaagtttaggcaaactttattattcaaagtcaaaattcctaaaggaaaatactatggcactacaatcacaaaaatatttgtgtgtaaaatttctttccttgtcaattaaacaaagcatcccatcttgataaaccaatatgaaaycaataccaaatttataattaaaaaacaataaatcaattaatttttcaataaagtatcatggcagagagtaggggccactaatattaagtagactttcaagttcactttgtattctttgctaacactggaattcaatgcaataatttaaaaattgaccagattccatcccccctacccccaacacacagccacccactgtaggaaaactattttttagtcaaactacacatccttcaaggatattcccctgcactatctactttgttcaaatcatattcctaggttcatttgaacaa

SEQ ID NO: 684802 - DNA, 610 bp, Homo sapiens
cagttatgcaacgattttaaatattcttaggagatacacattaaatatttaggggtgaagaatctacatcttactctcaaatggttcatcaaaataatactaatgattgtgtctgtgtgcttgtgtgtgtgtgtgtgtgtgtgtgtgtaaagagagaaaacaaatgtggcaaaatgttaacratctatgaagcaattgaaagatttacaggactttattgtgctagttttacaactttactatatgttgaaaattttaaatttttcaagctggaaagttaaaaaaatcagtgttacttttcactcatatgtgtgtatgagtgaaagttattatatatggcttcagggaccagctagtagatggcatgatacaagaaacaaaggcaaggaccatggatatatatggctatcttgtccttagaggtattttttcttttttttaagagacagggtcttgctcactgtcacccaggctggagtgcagtggtgtgattacagttcactgtaggctcaactcctgggctcaagtgatcctcccacctcagcctccagagtagctggaactagtggtttgcactaccatccctagataatttttaaatttttttttg

SEQ ID NO: 684803 - DNA, 610 bp, Homo sapiens
cagttatgcaacgattttaaatattcttaggagatacacattaaatatttaggggtgaagaatctacatcttactctcaaatggttcatcaaaataatactaatgattgtgtctgtgtgcttgtgtgtgtgtgtgtgtgtgtgtgtgtaaagagagaaaacaaatgtggcaaaatgttaacaatctatgaagcaaytgaaagatttacaggactttattgtgctagttttacaactttactatatgttgaaaattttaaatttttcaagctggaaagttaaaaaaatcagtgttacttttcactcatatgtgtgtatgagtgaaagttattatatatggcttcagggaccagctagtagatggcatgatacaagaaacaaaggcaaggaccatggatatatatggctatcttgtccttagaggtattttttcttttttttaagagacagggtcttgctcactgtcacccaggctggagtgcagtggtgtgattacagttcactgtaggctcaactcctgggctcaagtgatcctcccacctcagcctccagagtagctggaactagtggtttgcactaccatccctagataatttttaaatttttttttg

SEQ ID NO: 684804 - DNA, 658 bp, Homo sapiens
caaattgcctaaggtcaggagtttgagaccagcctggccaatatggcgaaatcccgtctctactaaaaatacaaaaattagctgggcgtggtggcgggtacctgtaatcccagctgtccaggaggctgaggtttggtggcgggtacctttaatcccagctgtccaggaggctgaggcagaagaaccactggaacccgggaggcagaggctggcagtgagcagagattgtgccactgcactccagcctgagtgacagggcaagactccgtctcaaaaaaaagaaacaaaagaaagtgtgtgctagtgtrtgtgtgtgtgtgtgtgtgtgtgttacagtggaggtttctattcattggtacgtcatacacaaacgtaacgttttagaacaataattatctatacattcgaagtgaatttgataagcatttgttactgaaatgactactaaatataatagatggtgtgattgagttatatccacaaacacattctcattagggattcatcaattcataatagatgaaagatatgttgtggagtcagtatttggttccacttcctgccatcttatttcttgattgtcctgttaccacacaatgcctttcaaagaactgtagtgttcttttaatatagttccctttagttttcctagttaagt

SEQ ID NO: 684805 - DNA, 658 bp, Homo sapiens
caaattgcctaaggtcaggagtttgagaccagcctggccaatatggcgaaatcccgtctctactaaaaatacaaaaattagctgggcgtggtggcgggtacctgtaatcccagctgtccaggaggctgaggtttggtggcgggtacctttaatcccagctgtccaggaggctgaggcagaagaaccactggaacccgggaggcagaggctggcagtgagcagagattgtgccactgcactccagcctgagtgacagggcaagactccgtctcaaaaaaaagaaacaaaagaaagtgtgtgctagtgtatgtgtgtgtgtgtgtgtgtgtgttacagtggaggtttctattcattggtacrtcatacacaaacgtaacgttttagaacaataattatctatacattcgaagtgaatttgataagcatttgttactgaaatgactactaaatataatagatggtgtgattgagttatatccacaaacacattctcattagggattcatcaattcataatagatgaaagatatgttgtggagtcagtatttggttccacttcctgccatcttatttcttgattgtcctgttaccacacaatgcctttcaaagaactgtagtgttcttttaatatagttccctttagttttcctagttaagt

SEQ ID NO: 684806 - DNA, 1207 bp, Homo sapiens
ggacagcagagcagaaaaaaagttttcttgttttataataaagattgtgttttttctttccatattacataatttttctatactcaaagatgttaaggtgaggatgtgctgtttcaagatacataatcacatctgcttgaaatagcttaataatttcatccaacccagaatattgtagaagacagaattcatatttttttaatcaaaatgaaaataaattaggatattttgagtttctatcattcaggtgaatatttgtaacttcagtaattccagttcagagtgcacatatgtgctttctacctccctccctagatattttaatgtgaatacatgatctgagaattgtgtaaggtttttaagtttttataatttccatcccttcatcttgcatctgcctaataatagtctcttgatcactcagtaaaaacaatttaagttgctcagattcagaatgtatttcttctctcctacattttttttcagctccattgatttgttggcttacaaatttatcactgtttcaattccttccacactattcttcaaattcaatgctacatttaagaattttcctgtggtggaggcagcattcttaatggggcaaatgtaatgcttccattgttttgaggagaaattgcactgtatttacagaacctctaggttcttttcacagagaaaagccagaaattgattatatttattatacctggtattctatcctgtgttttcttgttgttttttctcatctgtagtatcttatcaatttcagtcaaattaccaagctagagattttgcctgaagttttcgtctgggcggtaaaaatggcagacagacctgaaaaaggtattatctagaactttccacgatatattgatgcaggagccacatagattgtgcccatagttgagtctttcaagtaatccacaagggattacttgggccattgagtctttcaagtaatccagaagaatgtccagctaaactcctcttggargtttgcaagggctgtcacaaattccactaagccatgaccaaatggggtgggctacagaaagcaaggcctccatctctagagctcaaggctaagtgaaaatggatatctccccggaaacctcaaagactgactggctgtaggtttcactggtcctaccaaagtctcatttaggcctctgcctcttagctccagaagcagcttgcatgtcga

SEQ ID NO: 684807 - DNA, 1856 bp, Homo sapiens
cccaatctcataatcttttgcctttaattttaatgctttttctaccttcttcacacggattctgagattgttgaattttaagattcctttttttaaatgcatatatttaaagttataagtttcctttcaagtagaaatttatttgcacccccataagtttaatgtgttatattttattaatattaatttcaagctgtttctaatttttactgtagttttttccagacaatataatttggttgtttcgtttctaaatatttgtgcttttttctgttattacttttattgtattaatttgtaacttgtcaaagcactttttgtataaattcttttttattattaatttataaactttatttttagagaacttttaggttgacagtaaaatttaatgaaaaatacagagttcccatgaaccccacactataaaaatgcacagcctcttccactatggacaaacctcaaccagagtagtacacttgttaaaattatgaacctacattgacacatcattatcaactaagtccatagtttacattagggttgtaccacagtttaattattcattcacctgttgaaagacatcttggttgctgaggcaaatgtccatgtggaggcttctgtgtggatacaagctttcagttcatttggctaaatattaaggatcatgatttctggataatatggttagaatatgtttagttgtgggaatgtaccactttgcatttccacaagcaatcagtgaaagtttctgtcattccacatcttcagtagcatttgacactatctctgtttcaggttacggcaattctaatacatgcatagtggtatcttattgctgttttaatttccaatttcctaataatatatgacattaagtttttttataaacttacttgcaatctgtgtatcttttttaatggagtgtctgttgagctcttttgtttatttttaatcaagttgttcattttctttttattttttctggttttactgagatataaaactaaaaattgtgtgtgtgtatatatatgtatataatgtatcatgtgatgttttgatgtataaaaacattatgaaatgactaccataatcaagctacttaacatattcatcatctcagtagttatatttttttgcattgtgggggagaaagagaacattaacaacctactgcattagtgagtttcaaattacaatacagtattattaactctatttcccatgcaatacattagattctcagaacatattcatcctgcttaaataaaactttttatccttcatccagaatctccctattgcccccactctctagctccrgcaaccattattctgaattcaaatttttaaaataacatatgatctactgttttttactttttgacataaactttagaataatgttagatattacattttataaatatcatttagttggggcttgctgagtgttgtttaaatgtatactcacggatttttcttttgtgtgcttcttctgttgtttactgagatagttgcattaagaacaccaactacttattaaatagggaatcctttccctattgcttgtttttctcaggtttgtcaaagatcagattgttgtagatatgcggcattatttctgagggctccgttctgttccattgatctatatctctgttttggtaccagtaccatgctgttttggttactgtagccttgtagtatagtttgaagtcaggtagtgtgatggctccagctttgttcttttggcttaggattgacttggcgatgcgggctcttttttggttccatatgaactttaaagtagttttttccaattctgtgaagaaagtcattggtagcttggtggg

SEQ ID NO: 684808 - DNA, 1856 bp, Homo sapiens
cccaatctcataatcttttgcctttaattttaatgctttttctaccttcttcacacggattctgagattgttgaattttaagattcctttttttaaatgcatatatttaaagttataagtttcctttcaagtagaaatttatttgcacccccataagtttaatgtgttatattttattaatattaatttcaagctgtttctaatttttactgtagttttttccagacaatataatttggttgtttcgtttctaaatatttgtgcttttttctgttattacttttattgtattaatttgtaacttgtcaaagcactttttgtataaattcttttttattattaatttataaactttatttttagagaacttttaggttgacagtaaaatttaatgaaaaatacagagttcccatgaaccccacactataaaaatgcacagcctcttccactatggacaaacctcaaccagagtagtacacttgttaaaattatgaacctacattgacacatcattatcaactaagtccatagtttacattagggttgtaccacagtttaattattcattcacctgttgaaagacatcttggttgctgaggcaaatgtccatgtggaggcttctgtgtggatacaagctttcagttcatttggctaaatattaaggatcatgatttctggataatatggttagaatatgtttagttgtgggaatgtaccactttgcatttccacaagcaatcagtgaaagtttctgtcattccacatcttcagtagcatttgacactatctctgtttcaggttacggcaattctaatacatgcatagtggtatcttattgctgttttaatttccaatttcctaataatatatgacattaagtttttttataaacttacttgcaatctgtgtatcttttttaatggagtgtctgttgagctcttttgtttatttttaatcaagttgttcattttctttttattttttctggttttactgagatataaaactaaaaattgtgtgtgtgtatatatatgtatataatgtatcatgtgatgttttgatgtataaaaacattatgaaatgactaccataatcaagctacttaacatattcatcatctcagtagttatatttttttgcattgtgggggagaaagagaacattaacaacctactgcattagtgagtttcaaattacaatacagtattattaactctatttcccatgcaatacattagattctcagaacatattcatcctgcttaaataaaactttttatccttcatccagaatctccctattgcccccactctctagctccagcaaccattattctgaattcaaatttttaaaataacatatgatctactgttttttactttttgacataaactttagaataatgttagatattacattttataaatatcatttagttggggcttgctgagtgttgtttaaatgtatactcacggatttttcttttgtgtgcttcttctgttgtttactgagatagttgcattaagaacaccaactacttattaaatagggaatcctttccctattgcttgtttttctcrggtttgtcaaagatcagattgttgtagatatgcggcattatttctgagggctccgttctgttccattgatctatatctctgttttggtaccagtaccatgctgttttggttactgtagccttgtagtatagtttgaagtcaggtagtgtgatggctccagctttgttcttttggcttaggattgacttggcgatgcgggctcttttttggttccatatgaactttaaagtagttttttccaattctgtgaagaaagtcattggtagcttggtggg

SEQ ID NO: 684809 - DNA, 928 bp, Homo sapiens
tgctaaccatctttgagactttgcattggaaggtgttacggatcgcggatgattaaaaaataaagtcacaaaggggccagcagcctgcaaaaaagcagtgctcccacttacttgaacatctcgctcctctctatggtggcgagccaaaagctgtaagcgtttgcgtagtaattgcaggtcccacggccgtgacactcgatgaatggcgcacttctaaactcctccaggcaggagccgggggacgccagggcttggccagagccttctgcaccagcgctggtgtgctgcagaacagatgcgagccgtgagtcagaggttccctccccaaacaccaggaaagagatcgatccttcccaggaaggcgccagggtgttccctctggaaagccacacactgcagcctcatgtggtcaccacaggacacactctgtgcccaaattatcgggctggcccgcaagccagtgcctgcatggctggggccccatggtgctcarcatggccccagggatcgtctaatggctgcttcccaaataggtgaccagcccagcttcattagagtttaaagaagagctcactgtgtattagatttgaaacactccaacccattctaacatgggtcatgagacaatagccaaaatgttcaaataatgttgtaaacaactgatgtggaatcagactttacaaatgcattcctgtatttgctatattagatgctatttatcttataataaggtaaagaataatcattcaattttttttctttaaaaagagagaaaaacaagagaaagagaaaaaaatagctactactatatcaaattgcattttggtctagcaggtttaagtaggaccttcctgtactcagaaatcaagaccttaaaatgaatgacatacaaacttgactaagacattacaacagagccccgtgacta

SEQ ID NO: 684810 - DNA, 653 bp, Homo sapiens
agaaaataggttatctcctgccatggtgagacagatttatattttttgcttcgtagaagccattattgagttgaaatatactatcacagatttttgcatatttatgtttgtagtattttgaaagccaatgtgcacttgaatgacatacattcatcattgcagtaggtgcagaaacaaggatttgttcttggtgcagcacgggactatgcacatagtaggcacacacaatacgtatttcctaagtgcgaaacctcaggtcaatattctctacaaagcaagaaaaaaactaaacctacaattgtcatagggaagaaaaatgtctattaaatagaataaatgaactagtttaagcacatcaaaaacaactacacagaattgaagagcaaaacttatatctcacacatcatgacacgtttgcaaaacatttttccagggtgccacatttttccagtgttgcaaatatagtgaatacaaagtaaatgactgagtaaaaagtaataacatcttttaagaacttataaaatgacatgtaacttttcccagtcaatataatttgggaaacagkaaaagtaaaatatttttctaagcttagaacatgcaagacaagcttgagaagaacctgctaagttcaaactgcatagcatgttggggtt

SEQ ID NO: 684811 - DNA, 632 bp, Homo sapiens
tgttgttccagcggctcaatagtgttagggccagcaactctgcagttctcctggcctcatcttattgtctcaatactcaagctacagctccaggcattaggtctgcatttagggcaggaaggagaaggttagggaagcagctctctgcctctatctctttcatcagcaaaaggaaaagccatctcaggagctcccagcagactctctcactcatttgacagaatcacatcaataccccagctgcaagagaggctgagaaattacgtgcttagctgttctcatctctgtggtagaggcaggtagaagaaagggattgtgattaggttgagttagccaacctacagtgtctagcttaccttccacatatataaaaggcagaggctgtgctaggtgatctcttagacctttcccagctccaaacscatgttaatctctgaatagggagaaaacctcagtatggagtatcactttcatgtgtatggcaattcctggtttctattcaaatcctctccccagaaataccttcactaatattccatgtacaggctggagaaaagctgatacatttctcatatgggtagcacaatgtcatcccaagaaaaaaacagagggggccagtattcataacataa

SEQ ID NO: 684812 - DNA, 603 bp, Homo sapiens
ctgtattatcattgtttattttactctagctttgaattttcacatttctgcaatgaatagaaataaggagaaagttgatttgacagagtgccaagaggcgtggccagggcgccctctgaaatctcgtcaggtgagtgtgacaccctgtgaattcctgccactactccataaggtagtttggctcctgttgtctcttggggcaattcctgcacaagaagtttcagcaggaaactggaatggaaaaaatggaatatgtggggcccacaagcccctgcctaccctgccagttgccatggagggaaatgattgaggagggaaaattgtgagaggycacacctgggctgatttggaaaaggcagattttcacgtggttctcgccaatctcccatgtcttccacctacacctctcaatcacctaacagaagtgattgtatgagaattttcaggggtagtgttacaaatcactcagcctggtgccaggcacactggagggtgcaatgggtgaatggccatatcaaaagctggggctggaaggggtggtggaataaaaatgtttgtgagcatctcccatgagctacctttatgagccttcacaacaagaac

SEQ ID NO: 684813 - DNA, 682 bp, Homo sapiens
actctgtaggaaatcacatttgtcaagaaaagatttcaaactggcaggtcaattaggagaacagaacccctgcttctaggcaaatttccatgctggttctgatcagtgtgtcagcagctctgccctgttggtgagayatgtgaccttactaaatgtacactttatttccagaaaagaaagaaaagtactggaggatagtataattcatgtccagaatataattgtgacttcataaatcaaactaataccaaaatttaaaaactggatcaaattcttttatttaataacagtgattttgaagtgtttaatagttttcatctaaaggcctttaaaaatattttgtaaattagaaatagagtgcacatttatttaataataaattagtaagccaattaacagtcctgtttaacatgtagtaaatagtcatttcaactttccctgacttaaccagtgagaaaaacagcatccatttaagggccacatttccccagctcaaaagtattgtcagcccagggctgttttgtccagcttgtgttagcgagacactagcacatttttggagaatgcatttttttattcttcagatttctggaaggcaaactaaaagaacacattttaaaaaggtttattttaattttaagaaattgcatgtcaagtacagttttaaggtaaaatcttaata

SEQ ID NO: 684814 - DNA, 1941 bp, Homo sapiens
tgcatttaatatgtgcaaggtgaagtgataaaatgcagccttaattcaatgagaagcaatatgaaaaagtcataaatttttaacatgagacacaaaagtcccacactttgtatttttcagctctgggtagaatggtaagctcatcgtactttgtaagtcagcaatgcagctgactaaggccagggggcactataattagataatgaaatgagagcattatcaattttttcccacttttaatatgtctgacaatctcacaaaaagcaggtttctctcaagacaagactggcattggatggctgggcttggcaaaccaccggaggatgaaaagcatgcttttaagaacagttgaaatcaatgcctcttatcagcatccagcccatggaaatgtgttctctagagctggattcctgagctcagagattgctttggcagtgttcaaaaatgaagacggagatcattcacatcaatttcgcttaattagcatttacatgactttcatttctgttaagttagctaattaacaacatggtaccaaatctcaactctcctacgcctctcttttgagttcacaggcatttttcactctcctgctcactaaaatcagctctgttcacttcttctgcaatgattcaggcttgagggtagttccccattgagacacagtagctatactattaattttgttctatacttttctctctccgggaaacaaactatttaattcgtaagatggctctgaggcaatgtgtttatgttgttgagcagatttttgtagtgcttgtattgaacaatcgagtatgctgactggaaattattatacttgccacacatataaattttaaataatttttttgcaaagtctatgtaagtaaatgaagagagccctttgcattaccgaaatgaatactaacttgtgttttcatatttattttttcttaaagagagttgtgattatatcttcatagtaaatctttgatcattgttgaatgcatctgacacttttgcctgatcaggatgaactccctacctccttccaaactacaatattgggaaacttctaaataattcccaggtcacattgaaatttataatcagttgactgagccatatcaatcagttctttgcagaaagaattcatgtttctctctattaaccccagaatttgattctcagttctacttaaactggcatcaatacttacatctctccttttgcgcacaactgagaacagtttacattattcaacttggagaaaaatgaacaacataagctccaaatatctggaaccagtatggtcctcttaatttggacttagcacactaagtttgacatggtttagtcaatgtttggtattttatcacaatgcagtagacttgcacggtgggctatacagtttcaagtactcagtattattcttggtggataactgccagacatagtctagatacttaccagcactaccaggaaattggaatagtcgcaataaaattttrtattgcaactttcctaaacttctccaggttatatatatatatatatatatatatatatatatatacacacacatatatatatttatgcacacacacacatatacatgtatatataataggaatatataatatattgtagaaaaaatatattttacttgtatatgtaacttgtattcatatatgttaaataacagtgaaaagtcattatcttttacttgtatatatattttacttgtatttatattttaaatcacagtgaaatatcattatgaataagtcttaatagattatttttcagcaaaagtcactaaaaataaatcaggtcatataaatttgacaatagaacatctgcttggggcatattgataattgaatacatttaaatttaaataaaattttgcatagaattgaaataatttctttaaaatatatggataacactgct

SEQ ID NO: 684815 - DNA, 1941 bp, Homo sapiens
tgcatttaatatgtgcaaggtgaagtgataaaatgcagccttaattcaatgagaagcaatatgaaaaagtcataaatttttaacatgagacacaaaagtcccacactttgtatttttcagctctgggtagaatggtaagctcatcgtactttgtaagtcagcaatgcagctgactaaggccagggggcactataattagataatgaaatgagagcattatcaattttttcccacttttaatatgtctgacaatctcacaaaaagcaggtttctctcaagacaagactggcattggatggctgggcttggcaaaccaccggaggatgaaaagcatgcttttaagaacagttgaaatcaatgcctcttatcagcatccagcccatggaaatgtgttctctagagctggattcctgagctcagagattgctttggcagtgttcaaaaatgaagacggagatcattcacatcaatttcgcttaattagcatttacatgactttcatttctgttaagttagctaattaacaacatggtaccaaatctcaactctcctacgcctctcttttgagttcacaggcatttttcactctcctgctcactaaaatcagctctgttcacttcttctgcaatgattcaggcttgagggtagttccccattgagacacagtagctatactattaattttgttctatacttttctctctccgggaaacaaactatttaattcgtaagatggctctgaggcaatgtgtttatgttgttgagcagatttttgtagtgcttgtattgaacaatcgagtatgctgactggaaattattatacttgccacacatataaattttaaataatttttttgcaaagtctatgtaagtaaatgaagagagccctttgcattaccgaaatgaatactaacttgtgttttcatatttattttttcttaaagagagttgtgattatatcttcatagtaaatctttgatcattgttgaatgcatctgacacttttgcctgatcaggatgaactccctacctccttccaaactacaatattgggaaacttctaaataattcccaggtcacattgaaatttataatcagttgactgagccatatcaatcagttctttgcagaaagaattcatgtttctctctattaaccccagaatttgattctcagttctacttaaactggcatcaatacttacatctctccttttgcgcacaactgagaacagtttacattattcaacttggagaaaaatgaacaacataagctccaaatatctggaaccagtatggtcctcttaatttggacttagcacactaagtttgacatggtttagtcaatgtttggtattttatcacaatgcagtagacttgcacggtgggctatacagtttcaagtactcagtattattcttggtggataactgccagacatagtctagatacttaccagcactaccaggaaattggaatagtcgcaataaaattttatattgcaactttcctaaacttctccaggttatatatatatatatatatatatatatatatatatacacacacatatatatatttatgcacacacacacatatacatgtatatataataggaatatataatatattgtagaaaaawtatattttacttgtatatgtaacttgtattcatatatgttaaataacagtgaaaagtcattatcttttacttgtatatatattttacttgtatttatattttaaatcacagtgaaatatcattatgaataagtcttaatagattatttttcagcaaaagtcactaaaaataaatcaggtcatataaatttgacaatagaacatctgcttggggcatattgataattgaatacatttaaatttaaataaaattttgcatagaattgaaataatttctttaaaatatatggataacactgct

SEQ ID NO: 684816 - DNA, 667 bp, Homo sapiens
cacacacacacacatacagatagacaacttttctctggcaaaattattgttcttaaagatattttaaaaaactgaatacatgacttaaatgagtccccaaattttcagtttccagttttcttttgaaccaaattccagagcccatctatgattcttttttcaacttgatgatttccaagttatgatccctgtctaggtttaagttttccaaataaaattatagataacagagctgcaaagatgctttttgaattcctgtccagtatcgtcttttcacagatgataaaaataggtcctaagaaggactgatttgttcacattcacacacttagtaggaaattcaaaagatcaaaaatcaggtattggtttcaagaaaaatgcacattctgtactctattttgccaaattaatcagtattttcttttacctaaaattttagtatgaaatrtacattcctcagtccattgagaagcagaacttaactcaagttcaatcaaggatttaccaatatgctgctttttacaggttaaggttcctagcagctattttaatagcagaagatttctatttgtgtttggtctagccgagatgctggttttaaagtctgtattacagtgatatagtggtaaagagataataagaaagcaatggaaaacaaagtctgtga

SEQ ID NO: 684817 - DNA, 624 bp, Homo sapiens
cagactaatactgatactcctcttatccttctactgaattctcactactttatccttagtttgctaattacaataaaaggaaaatgatgtccatgtgcctgagccttgaagcacgctatatgcttcgtaagagcagaaaccatgtagcattcatccttgagcccacccctggtctgcggactgccttgaataccacacataattataatagtcccactttagccataatttcgcagtccgaaaacattaagatattttgagactgcagtccaaaaacagtaagatcttttgagrgaaagagagaacgcattcacataacttttattacagtatatggttaggaatgttctattttattattagttattgttgttagtctcttactgtgcctaatttagaaattaaactttatcatagatatgtatgtataggaaagacataatgtgtatacggttcacactacctgatgtttcaggcatccactggtggtcttgaaacatatcccctgcagataagaaaaaactattgtatagttcttgttaaatttgcatatgtttctcctgggtatagatacagctataacctatgctgatgaaatagcacgtatggaagcagtaggcatca

SEQ ID NO: 684818 - DNA, 624 bp, Homo sapiens
cagactaatactgatactcctcttatccttctactgaattctcactactttatccttagtttgctaattacaataaaaggaaaatgatgtccatgtgcctgagccttgaagcacgctatatgcttcgtaagagcagaaaccatgtagcattcatccttgagcccacccctggtctgcggactgccttgaataccacacataattataatagtcccactttagccataatttcgcagtccgaaaacattaagatattttgagactgcagtccaaaaacagtaagatcttttgagggaaagagagaacrcattcacataacttttattacagtatatggttaggaatgttctattttattattagttattgttgttagtctcttactgtgcctaatttagaaattaaactttatcatagatatgtatgtataggaaagacataatgtgtatacggttcacactacctgatgtttcaggcatccactggtggtcttgaaacatatcccctgcagataagaaaaaactattgtatagttcttgttaaatttgcatatgtttctcctgggtatagatacagctataacctatgctgatgaaatagcacgtatggaagcagtaggcatca

SEQ ID NO: 684819 - DNA, 624 bp, Homo sapiens
cagactaatactgatactcctcttatccttctactgaattctcactactttatccttagtttgctaattacaataaaaggaaaatgatgtccatgtgcctgagccttgaagcacgctatatgcttcgtaagagcagaaaccatgtagcattcatccttgagcccacccctggtctgcggactgccttgaataccacacataattataatagtcccactttagccataatttcgcagtccgaaaacattaagatattttgagactgcagtccaaaaacagtaagatcttttgagggaaagagagaacgcattcacataacttttattayagtatatggttaggaatgttctattttattattagttattgttgttagtctcttactgtgcctaatttagaaattaaactttatcatagatatgtatgtataggaaagacataatgtgtatacggttcacactacctgatgtttcaggcatccactggtggtcttgaaacatatcccctgcagataagaaaaaactattgtatagttcttgttaaatttgcatatgtttctcctgggtatagatacagctataacctatgctgatgaaatagcacgtatggaagcagtaggcatca

SEQ ID NO: 684820 - DNA, 624 bp, Homo sapiens
cagactaatactgatactcctcttatccttctactgaattctcactactttatccttagtttgctaattacaataaaaggaaaatgatgtccatgtgcctgagccttgaagcacgctatatgcttcgtaagagcagaaaccatgtagcattcatccttgagcccacccctggtctgcggactgccttgaataccacacataattataatagtcccactttagccataatttcgcagtccgaaaacattaagatattttgagactgcagtccaaaaacagtaagatcttttgagggaaagagagaacgcattcacataacttttattacagtatatggttaggaatgttctattttattattagttattgttgttagtctcttactgtgcctaatttagaaattaaactttatcatagatatgtatgtataggaaagacataatgtgtatacggttcacactacctgatgtttcaggcatccactggtggtcttgaaacatatcccctgcagataagaaaaaactattgtatagttcttgttaaatttgcatatgtttctcctgggtatagayacagctataacctatgctgatgaaatagcacgtatggaagcagtaggcatca

SEQ ID NO: 684821 - DNA, 624 bp, Homo sapiens
cagactaatactgatactcctcttatccttctactgaattctcactactttatccttagtttgctaattacaataaaaggaaaatgatgtccatgtgcctgagccttgaagcacgctatatgcttcgtaagagcagaaaccatgtagcattcatccttgagcccacccctggtctgcggactgccttgaataccacacataattataatagtcccactttagccataatttcgcagtccgaaaacattaagatattttgagactgcagtccaaaaacagtaagatcttttgagggaaagagagaacgcattcacataacttttattacagtatatggttaggaatgttctattttattattagttattgttgttagtctcttactgtgcctaatttagaaattaaactttatcatagatatgtatgtataggaaagacataatgtgtatacggttcacactacctgatgtttcaggcatccactggtggtcttgaaacatatcccctgcagataagaaaaaactattgtatagttcttgttaaatttgcatatgtttctcctgggtatagatacagctataacctatgctgatgaaatagcaygtatggaagcagtaggcatca

SEQ ID NO: 684822 - DNA, 899 bp, Homo sapiens
ctatgttcatcatctaaacagaggtgaaatattgtagtgagtagtttagagaatatttacttccccttaagcattagtaatatattgagttaagagttactttatttttcatgaaaaattctcatgacaatatacaacaatattttcattttagatccattcattacataatagttttcatgttttatgataatactggctagattcttccatgcgacatggttattgtagtcttaagagaatccctaatgaagcagcattaactcttttatgattttaagatcaataaataatgtctccaaatattcaggaaatttttgaaagaggctgaaatcaaacaacaatagctagaaacaatagctttattgccataggaaataatttttgaagataaattctgtggattgaaacacaagtttctttatttaaaaaatgtttctcatacgaagaatttacaattttattcccagatgtaatcagcaaagttttttcttatgtatttactgtatatgtggttccatgattaatgtaaataaatgaatgccttattttatcaattatgagacaataatrtttgtataatacatttttaatttgccgttaggaaagaacacagaactcccaagtaaaccatgacacaatggtaaacttcacacagggagtgtttattctataatcatgaaagtgttgttttcagacatttttaaccacatgtatttatcttcttttcatttttgtgcaaatacaaaaatgaaaacctaagtaaaattaattacgatggcatgtctaatagttttctacaatctgagcctgactcagctaaattattctctgactcagattaattgaattccatgatttacaaacaatattatcctccttgttttcaaaaacaccaa

SEQ ID NO: 684823 - DNA, 661 bp, Homo sapiens
caatttatttgccattttatatattgttcactgcaatgtgggttgcagtagtatttgttgttgttgttattaacacagctccaaatcagtctatttcacaagaaacctataagggatgacattagaacaaggttgagagagagagagagggaaagagagggaagcagggagggagggaggaaagacaagctatgccatttaagaaatctaacatgtttgccaagcaaagcttaaaatcacactctcttattcatctgtcttggctttgtattgtacaaactgcacataaaaaagggacttgacaatttcataagacaggtacctttaggtatttcaaaacttattttttcctggaattttacttacctggtgtttaaggtaatgcaaaggactatccttatacttgaatctgaaaatctgagtacaatgactaatgagaagtatgtgcaaacaattctaaatgaaagagaatgaaagcttcctaatgaaatctctttaatatgtaattttaagctacyttaaaaagtcacagttgcttgcactaatgagaatctgttttaaaattacatgttattttgataatcagaattttgagggatgatttagaatagggttaacagcagaaataaaattgataggaagtaaacttttttctaattta

SEQ ID NO: 684824 - DNA, 1826 bp, Homo sapiens
gtttctaaatacaaactttctaaataaagtctgtgaggtttaaaagttcgttagcatgctcaaatctcttatctgctaaaattttgcatcctcagtttaaagaaaagaatatcaccgtccctatcccctgttgatcttattttggggttgatgtatcttatgactctaagaaaatggaaatatctgcatatggagaaggtacacaaaggtccttcagaaatcacagtaccaytgaagtcaaataagatgataactcaacaaacaaataagagataacgaagattgtagtaaatttatttcaggctttcagcctgtttccatgggggttcatcattgttcaattttatatgttaagattcagcttaccttccccaaaaagctttcttggatacccccagtcaaattgatgtgttattcttttgaattcctctgtgtcttcattcttgactctcttaaaatactactcattctgctttatgtttcagcaatttgtatagaatcagtttccattttccaagcacattatcttccagtgttcatttaaaagccacttgtttgggagtccaaagtacttatttctgtagaactaatcatacaagtgatgttcctattttctttttagttctatttctgtctgatctagtgctaatagaaatatttcaaatatgcctccattaatgacattgtttcttcaagacagaccaattctattataaggagcaaatttcatagattctagacttacatttgcctggattgtcttctacttattagccatttgatattaagtaaactgtgcaaatttgtgcctgagatttctcatttgttaaataaagataataattatatttctggtggctgtagtgaagattaaatgagttcatatatgaaagctgctttggtgaatactatttgacacagtaggaggtacataaatttgtttgtagatgttattattgttatttttattaaaatttagagcatcaggaacctgtctgctcacacacaggcaggtttgaaaatggaaacaggcagcatattttagcagttcaccttctcaaaacaggatagttgcttgaatcatagcacacagtcagaaaaaaacataactacctacctagagaaaaggctttttttctaactgtattttcaaagtgaataaaaacgaaaacaagataccataatcagctgcacctcattacaaaaatgaaattaaggtaaaaataacaatgattattattgaaatcatttgttgagcccttagtatgtgccaagcagaaaaggaatggctttctatgttatcttcatatgatcccattacaaaagaaactgatggccaaggaggcaaaggtctctcacagctaaagagttagagcaagaactccaacctaaacctttctgactttcaaattctttggtatttttactctaccgaagacggaactctgagccaagtccaaaagtgctttacaaattaatatttacatattccaatgtcttttttatgatttttgccacttaagaaatctacctggctcttttcagttccaacttctccatattgtctacaaaaatttttaagacatgatgtgtacaaaaatattgtaagacatgttgtcagacacttgggtgaagctcaatacactttatttagggtattagatttcatcagtatttcctaaattgtcttttcctccaattatttaagatcaccagctagtgagctagttgtttcagggcattgcctgaaagaaagaagaaattctttccttttgtagtatgtgagtgttatacatcagtcctgaatgtagccatctaacacaaaa

SEQ ID NO: 684825 - DNA, 591 bp, Homo sapiens
gaaagtgtgaatttcttcttgaaggagactgtagtgaagacaaaattcatgcacaaataatcagagtacaaataggaaagagacacctgacaaaagtactcagataaaaacatattaggagttaggtgaaagaacaaaaaatgcctcataggataaatgggacacggcttcctggacgtgctggcatttgagcaagggcagaaggatggtagaattggacagtcaaaaaatggggcattttactaaatggaagactacctattgrtcttatctacagattttgattcttttatatttattaaggataatcacatatttttcatgtctggttaggttttatttgaactcctgtaatcttttttttcattataaaaagctttttttccataaaaaatttcttaaaatatgtagccacacagccgagttttattttaaggacaacggcatttttacctcctgttttgcgtgagggtctgtgggttgtaggagatgagaaaagagagttcccagctgctacagctcaacaaagcccctaaaaatgatgactgcatccatttccacccaacgccacattctgaaagtgatcttttt

SEQ ID NO: 684826 - DNA, 1829 bp, Homo sapiens
tcgggggtcaagtttttaacacataaactttgggggacctattcaagccacagcattcccttagcacacttgacaagagaacagcttcactcaggaaagtggttttagtggtttatcagcagtagcctctcttgggaggactgaacccctcttgagttcatgaagagtagcacatttcctccctgaaagtgtgaaagctcactttgccaacaatgtgcatctcctcagacagcacaggaagaactggcctccagggatcactacactctagatgacaaactctcataaggctccatatcccagcccaaaagagtgttggaaaagtcccaggtggctgtccatgactaacagtcttgtaagtttccagagatcctttagggtgaccagcagttcttcccccatcatgacaaattgcccatcttaccacacagactcttaccagggctaccattactttctagaggtaatgctgactggtaccaggtcagaaccctctccaggaatctgctaaagccctgcaatgtctcctgctgcctttctgtctgctacctgtctacaacgtagcctcattcttgccttcacacctggcttccatgccaccaactatttattttttaaactcatcctctttagatccctcttaatcacattttcagcccctctccccaggagagctggccacttctttgtgctccaatcatcccatatttctgctagagtaccttagcatttcttatgcaattatttgcttaaccacctgccttctccaatacatgatgagctcctccagtgaagtgaccatattgttcacatctctgtatcctgagggcctagcaccatgcttcatgaaagtcattcaaagcatttattgaatgaatggatggattggtagagcagcccatcccctgtgtacttaggacaatgccctgatacaggacctggtacagggaacagcacaagcacggtctcacttcttcagcaaaacttgatccacactgtgagcttttcagagcctcctcgtattcctccctgatgccactttgtagattttcaaatcgtttcaaagctttaactttctacmaacagtatcaccaggccttctcacactgtctctagtgacagagaataggaggatgggagaagaattatgcaatgcatctttccatttttagtaaattccaaatttgttaaagccaggtatcaagataagccagaaagcaaaattggatgatgaaaagagaagcagactggcttgggtctcagtgcttgctgcacagctcccttttctgatcatgggttttactatctataaaagaaacaaaccttcctcagaggcttgcatgaagtttaatggagtgaaacaggttaagcacctagcagtgcccggcacatggtaggcatgtgactgtcacaaatatgaacagtcaagaggctgattacatgataattttcaggaaacatctaaaaacaataaatatctaggaaaatcagaaacatgaaatcttaagaggagcttgtgagaagatgtcattaactcaaatactttttatcagaagctctttcttccctctgcaaaagccagtgatcctacccctttcagaggaaggcctggcctttggacccagggccaacagtaacttgattctgagaaagaagtgtcttacatctactgaagctgaacagacacacgcttcaagacacatcaatttcctctgacagaaatgtgttcacaaattcttcaaaaatcacctacaagactattcacagcaacactgtgcatgatagcctgaaacttgaaactacccaaatgaccattaacagaagagtga

SEQ ID NO: 684827 - DNA, 1340 bp, Homo sapiens
tttttggtaggattaagcagcacagtataagaggaacttcttaaaacgtactgatatagaaataaaataagattcaccaaatctttatcataaccatatatcccaccaaaaaaccattttccaatgataattatttctatagatttcgatttccaacttcatttttactagtatacattttgttaaaatatttttaaagtacaaatatttgactgaagatwttgtcactgcaaaagctgctacatctcatgatagctacaggaacagacacatgctaattaagatactaaagaagtgaaaaagcatcctgatcatttaacatcagtttcaagcaatatggaaagagtagaataagaaacaagagatgttgaagatgttattttcctgaccaagaaaggtcagacatagtgcatcagaatgctgcatcttaagaaaatcattattttaactgctgaaattccagtgaatagaattgttttcaaatattaaaatctctgtggtaggctctgacctcagaataacaagaaaatgacaggtgcttatctttccgaatataaaaatgacccttattgtaaggtcatcatataaaaggcctatttccccttcatgaaataaataattataccagtgattagatatatttgcccacatgtctacatgtggtttaagtggtcatttcaatgacttaaatatagaaaagaactaacacctacaaactttaaaaactatagtccaagtggcccataggctttgtgtatcatttttccttggcaaattatttatacagcttcctcaaaaaccccataaatgttctttttaaacaaatcgcactttatttatcacatcaggcatacactgttttaaatagctggttttctatatatatatgcatatgtatgtatgcatgcatgtatgtaacagcactgtaaatgatgtggaagtcttgtctaattctactggaagggtatcttctttaagaaattctaaaaggcttaaagtaaaatttttcaaaggaggaagctgtaacgtgagtgtctgtgtcacagaaagggtttacagtagagttctgtggtagccagccccaagatggcccccaataccttttgggagcagacacccttatgtagtccctcccacgttgtatcagggttggtctatgtgatcaaaagaatactgcggaagtgatgaggtgtcaattccaaggttaggttataaaagatgctaaggcttttgtcttggctattctcacctacactctctcttagagacgtcagctgccatgttgtgagaacactcacttatggagaggcccatgtggatacttgcctatgaagaagccc

SEQ ID NO: 684828 - DNA, 1340 bp, Homo sapiens
tttttggtaggattaagcagcacagtataagaggaacttcttaaaacgtactgatatagaaataaaataagattcaccaaatctttatcataaccatatatcccaccaaaaaaccattttccaatgataattatttctatagatttcgatttccaacttcatttttactagtatacattttgttaaaatatttttaaagtacaaatatttgactgaagatattgtcactgcaaaagctgctacatctcatgatagctacaggaacagacacatgctaattaagatactaaagaagtgaaaaagcatcctgatcatttaacatcagtttcaagcaatatggaaagagtagaataagaaacaagagatgttgaagatgttattttcctgaccaagaaaggtcagacatagtgcatcagaatgctgcatcttaagaaaatcattattttaamtgctgaaattccagtgaatagaattgttttcaaatattaaaatctctgtggtaggctctgacctcagaataacaagaaaatgacaggtgcttatctttccgaatataaaaatgacccttattgtaaggtcatcatataaaaggcctatttccccttcatgaaataaataattataccagtgattagatatatttgcccacatgtctacatgtggtttaagtggtcatttcaatgacttaaatatagaaaagaactaacacctacaaactttaaaaactatagtccaagtggcccataggctttgtgtatcatttttccttggcaaattatttatacagcttcctcaaaaaccccataaatgttctttttaaacaaatcgcactttatttatcacatcaggcatacactgttttaaatagctggttttctatatatatatgcatatgtatgtatgcatgcatgtatgtaacagcactgtaaatgatgtggaagtcttgtctaattctactggaagggtatcttctttaagaaattctaaaaggcttaaagtaaaatttttcaaaggaggaagctgtaacgtgagtgtctgtgtcacagaaagggtttacagtagagttctgtggtagccagccccaagatggcccccaataccttttgggagcagacacccttatgtagtccctcccacgttgtatcagggttggtctatgtgatcaaaagaatactgcggaagtgatgaggtgtcaattccaaggttaggttataaaagatgctaaggcttttgtcttggctattctcacctacactctctcttagagacgtcagctgccatgttgtgagaacactcacttatggagaggcccatgtggatacttgcctatgaagaagccc

SEQ ID NO: 684829 - DNA, 1450 bp, Homo sapiens
tttttgtcccccagggtttcaacctacgtgcttgtttcccccccaaaataagtcccatcccaacttgttaatactcttaggtggaagtttggtaaaagactcagttttagtggttccctagtaaagtctattcagatataattaaaaattcttcttacaattatgctaataagttcaatatacagcctggctgatgaagtctaataaattccctattgtacttagaaacaatggtagctttgttgtattctgtattttagaaactcccgatgtcatagtgcttgctaagaaaagcaaacaataataaacttttttgttgttaggagttttactaaaagaagtctgtaagtgcgtatttggttatgtactctccttctagggtcacgctaatacttcagtttataaaatgaataattttttagtgtgcttcatctgacattgaccagcagttgccatctaataagcaagattatcaaaatccacatttacttagccttttctttaatgtcataaggatagcataaatattaggaaaccttatctccttttatttttttacaggacaataatttgagctcagtttagatcttttaccacgcatacatctcaaatttagaaataatattaagatcgtatcaccttaaaactctttcagaatatgccccacagtcatccattctttttctttttatttatttatttatttattttttgagaccgagtctaactgtcaccgaggctggagtgcattggcacagtctcgactcactgcaagctccacctcctgggttcacgccattctcctgcctcagcctcccgagtagctgggactacaggcacccaccaccacacccggctaatttttttgtatttttagtagagacggggtttcaccgtgggctcgatctcctgacctggtgatcctcctgcctcggcctcccaaagtactgggattacaggcgtgagccaccgcgcccggccccattctttttatacttttctccatttgttcactagttcccttgtcttgagttttgttagtttccacctctcaaaatgtcactgtctaaaaatgcaagtgtcttctacattaaagtttttgtctgcctcatgatatagcataaattctcccacttcctctgtagattgctctggcttacacgtgtgtgtgaataaaactttatttacaaaaacaggccacaggctggatttggctaaactgccctagattgccamcccttacagtaaaacagtggttctcaaaacatagtcttagggaaccagcatcaccagcagcatctggatacttgatagaaatgcaacttcttgtccctccaccccccatacacacccgtactgaattagaaattgtggattcacggcccagcaatctgtgttttaacaatctggccctttcatttatcaattgatttattcattatccacttcc

SEQ ID NO: 684830 - DNA, 600 bp, Homo sapiens
tagagttattttttcttggatacaaacctatggattctcaaattcttttaaaaataaaaaagccattttatcgtaagtttgaaaactgaggtatcaggattttcatgtgactaaaaaagtgtctactctcattttctattatcaatcgggtacccaatctggtcagatagtgatttgtcctagagaggtctagaaaggaaaacayggttttaattaagattggtagaaactagaacaatagttttcagtctaaattaaattttggtcgtcatacatacatttggataacctagagtgatttctttcttgcttcctactagtcatactataataaaaagacaagcacctttttgttttgttttgtttttgttttaagagacagggtcttgctcactctgtcaccccggctggagtgcaatagcacgatcataactcactgtaactttaaactcctgggctcaagtgatgatcctcccacctcagcctcctgattagctggaactacaggtacatgctgccacatccagccaattttttgaattttttgtagagataggagtctcattgtgttgcccaggttggtctagaactcccagcctg

SEQ ID NO: 684831 - DNA, 623 bp, Homo sapiens
tttttctataaagcatgtcccctagcatatgaagcttattttctcaagtaagtagaggaaaggyataatataataaaaaaaaaaagtcgctgatcagctttaagaaccatactacaaccctggtacgcaggagtcctgcccctaccatcacccaaacataccatcacccaaacataccatcacccacacaggcagaaaaggaaaccccaggcagagctcctttctttctggactcgcttctgagacaaaatctcaaataaataaatatcctttatacaatcagatgtcacctggaggagatggtaggcaagggaaaaaaaataaaggcactaattaaaatattaggaaggaataattttactggattagactaatttagtgattcatctctactcagtgcgtgtgtgagaagagagttggtaagcagactgatgttggttcataagattctttggtgtgtaaattctatcaaaggaatctacattctctttgcatattgcaaattggagtgtagtccaagtgactggggcatgtcaacatggcatagcagttaaaaacatagattttggacctagactccctgctttaaaatgtttcttaacttctctgtgtcacagtaacct

SEQ ID NO: 684832 - DNA, 608 bp, Homo sapiens
taaattttgttttaaataataaaaataaagtatgagtacactatttcttcttaaagcttctactgtttagcaagcaatctaagtctcttctcattttacctaaagtcaaacttttaggtcacaattacctcattaactgtttattttctaccatattttatgtggtcatcaggtttttttcatgtatttgatttttcatatctacctaggttgtgtcttctagaaaccttcccacatctaccatacatacagtcccaaactaggaaatatatatgattatatgtctgtgtagggtcattaaaacaacatttaacttttgttctacaaataaaagaaaaaaataaaattytaatgacagaacatgctaatattatataaattacctatgagtcattctcactcaatatttatttgcttatttattatttactatataagtctatcatgaaatatactctctgggtaataaaaaggacaggctactataaaaaatttaatgaataaatatattaatcaatagctttcagcattccatgagcaataatgcacaattgtaggttatatagttattgatccactatgaaattccacaaagaaaataagtgtgt

SEQ ID NO: 684833 - DNA, 411 bp, Homo sapiens
caggcaaaagaaatgttgggaggataggtgaaataaaatcagctaaatgttgatgccatttaaactgggtgatgcatacgaggagtttactttactattctgtttattcttttatatctttgaaatcttccataataaaatgttaaaaatatacattaatatacacatacccaagtcccaatcctggagactgaggggtgagaactactgagttatcgawttttttttaaaaaagctccacatgtgattctgatttataccccatttgagaaacacagcttttcattcttttaacaaatattcactgagtatccaccaagccctgtactaagcaataaagattttatatttaaggaatttatagactaatgcaaggcgaaagcatttcaaccaaactacaaggcatcataa

SEQ ID NO: 684834 - DNA, 681 bp, Homo sapiens
attcaggagggtagtgtttaacttccatgtgattgtattgtttccaaaattacttttcttattgatacctagttttatttctttgtagtgaaagaagattgccacggagacagacagcagcatggtcagtgtggtaggagccggccatcagcgagagctgctccatgcctggctgctgggagctagagcctgcggcccactggcttgcctcactgtagttggtggtggcagtgacagagactgcagcatgaccagagtggtaggacaggggctatccagggctgcacctttcgcagtgtggggtgggttgggggcrctatccagggtgtcattgcctgcattaggggtactggttggtagcactgcacaggactgcactgcccacagcagggagggtgggttatgggtgctttctggggctgcaatgcccatggaggaggacaggttagggcatatcgggtatatgctactggcggcattgggggacggaggtggggggcgctattgagggcaggactagccgtggagcgggggcgagttcggtgctatcaggggctgcactgctggcggcagtcaacagagttggcatccaaggaaggagtggttctcctctccctgactccacactccagagggcgaaccactcttggtcatactggagtgcggcagggcacgcagcgt

SEQ ID NO: 684835 - DNA, 681 bp, Homo sapiens
attcaggagggtagtgtttaacttccatgtgattgtattgtttccaaaattacttttcttattgatacctagttttatttctttgtagtgaaagaagattgccacggagacagacagcagcatggtcagtgtggtaggagccggccatcagcgagagctgctccatgcctggctgctgggagctagagcctgcggcccactggcttgcctcactgtagttggtggtggcagtgacagagactgcagcatgaccagagtggtaggacaggggctatccagggctgcacctttcgcagtgtggggtgggttgggggcgctatccagggtgtcattgcctgcattaggggtactggttggtagcactgcacaggrctgcactgcccacagcagggagggtgggttatgggtgctttctggggctgcaatgcccatggaggaggacaggttagggcatatcgggtatatgctactggcggcattgggggacggaggtggggggcgctattgagggcaggactagccgtggagcgggggcgagttcggtgctatcaggggctgcactgctggcggcagtcaacagagttggcatccaaggaaggagtggttctcctctccctgactccacactccagagggcgaaccactcttggtcatactggagtgcggcagggcacgcagcgt

SEQ ID NO: 684836 - DNA, 681 bp, Homo sapiens
attcaggagggtagtgtttaacttccatgtgattgtattgtttccaaaattacttttcttattgatacctagttttatttctttgtagtgaaagaagattgccacggagacagacagcagcatggtcagtgtggtaggagccggccatcagcgagagctgctccatgcctggctgctgggagctagagcctgcggcccactggcttgcctcactgtagttggtggtggcagtgacagagactgcagcatgaccagagtggtaggacaggggctatccagggctgcacctttcgcagtgtggggtgggttgggggcgctatccagggtgtcattgcctgcattaggggtactggttggtagcactgcacaggactgcactgcccacagcagggagggtgggttatgggtgctttctggggctgcaatgcccatggaggaggacaggttagggcatatygggtatatgctactggcggcattgggggacggaggtggggggcgctattgagggcaggactagccgtggagcgggggcgagttcggtgctatcaggggctgcactgctggcggcagtcaacagagttggcatccaaggaaggagtggttctcctctccctgactccacactccagagggcgaaccactcttggtcatactggagtgcggcagggcacgcagcgt

SEQ ID NO: 684837 - DNA, 681 bp, Homo sapiens
attcaggagggtagtgtttaacttccatgtgattgtattgtttccaaaattacttttcttattgatacctagttttatttctttgtagtgaaagaagattgccacggagacagacagcagcatggtcagtgtggtaggagccggccatcagcgagagctgctccatgcctggctgctgggagctagagcctgcggcccactggcttgcctcactgtagttggtggtggcagtgacagagactgcagcatgaccagagtggtaggacaggggctatccagggctgcacctttcgcagtgtggggtgggttgggggcgctatccagggtgtcattgcctgcattaggggtactggttggtagcactgcacaggactgcactgcccacagcagggagggtgggttatgggtgctttctggggctgcaatgcccatggaggaggacaggttagggcatatcgggtatatgctactggcggcattgggggayggaggtggggggcgctattgagggcaggactagccgtggagcgggggcgagttcggtgctatcaggggctgcactgctggcggcagtcaacagagttggcatccaaggaaggagtggttctcctctccctgactccacactccagagggcgaaccactcttggtcatactggagtgcggcagggcacgcagcgt

SEQ ID NO: 684838 - DNA, 681 bp, Homo sapiens
attcaggagggtagtgtttaacttccatgtgattgtattgtttccaaaattacttttcttattgatacctagttttatttctttgtagtgaaagaagattgccacggagacagacagcagcatggtcagtgtggtaggagccggccatcagcgagagctgctccatgcctggctgctgggagctagagcctgcggcccactggcttgcctcactgtagttggtggtggcagtgacagagactgcagcatgaccagagtggtaggacaggggctatccagggctgcacctttcgcagtgtggggtgggttgggggcgctatccagggtgtcattgcctgcattaggggtactggttggtagcactgcacaggactgcactgcccacagcagggagggtgggttatgggtgctttctggggctgcaatgcccatggaggaggacaggttagggcatatcgggtatatgctactggcggcattgggggacggaggtggggggcgctattgagggcaggactagcmgtggagcgggggcgagttcggtgctatcaggggctgcactgctggcggcagtcaacagagttggcatccaaggaaggagtggttctcctctccctgactccacactccagagggcgaaccactcttggtcatactggagtgcggcagggcacgcagcgt

SEQ ID NO: 684839 - DNA, 1061 bp, Homo sapiens
tgacctggccctgtcatggcccagtggtgccattgccctgccttaycctgcgctggttgtgccttggccccgcttggtgctggccgcttcctggacctgccctggacctgccctgaccctgccttggcttttgccctgccctcactatggcctggccctggccctagccctggtcctgccatatccctgaccctgcccttatccaggccctgcccctgctgctgccctggccctggcctggaacctggtcctgtcaaggacctgccctgactctgccatggccctggccctgctctgccttgttcctggccctgacccagacccagaccctttcctggctctgcactggtctttccctggccctgagctggcagtggtctgcccctggtcttgccatcaccctgccctgctgtgctctggatgtgtcatcaccctgccctggctctactctgcctttgaccctgccctggccttgccttggccctcaccctagtcttcgctaggcccagcacagacctggctctgaccctggccctggtctttgtcctgccatagctttggccctgaagtggacttggaggtgtcctggccccggtgtaacatggctctgcattggcctgtctctgccctgcccctaccatcgccttgccctgctctgccctgtcccagtactgacccggccacgctatttccccgccctaccctgccttggctgtgccctggctcggttctggccctggccccggccctgccctggacatgctctgacactgcctcagccttggcactagcctggctcattcttggcatcagccctgctctctctgtggaccggctcttgtcctgtcctgcactggccataccatgccctgccctgccctgccctgactcagccctgactcagccttggccttggcattgcccctggtcctgccatatttcttgccctgtccctaccctagccttggccctgacccttaccttgctctggccctgcccttgccctaatgcagcccctggccctgtcatgaccctgccctggacctgtcctggccctggcc

SEQ ID NO: 684840 - DNA, 1061 bp, Homo sapiens
tgacctggccctgtcatggcccagtggtgccattgccctgccttaccctgcgctggttgtgccttggccccgcttggtgctggccgcttcctggacctgccctggacctgccctgaccctgccttggcttttgccctgccctcactatggcctggccctggccctagccctggtcctgccatatccctgaccctgcccttatccaggccctgcccctgctgctgccctggccctggcctggaacctggtcctgtcaaggacctgccctgactctgccatggccctggccctgctctgccttgttcctggccctgacccagacccagaccctttcctggctctgcactggyctttccctggccctgagctggcagtggtctgcccctggtcttgccatcaccctgccctgctgtgctctggatgtgtcatcaccctgccctggctctactctgcctttgaccctgccctggccttgccttggccctcaccctagtcttcgctaggcccagcacagacctggctctgaccctggccctggtctttgtcctgccatagctttggccctgaagtggacttggaggtgtcctggccccggtgtaacatggctctgcattggcctgtctctgccctgcccctaccatcgccttgccctgctctgccctgtcccagtactgacccggccacgctatttccccgccctaccctgccttggctgtgccctggctcggttctggccctggccccggccctgccctggacatgctctgacactgcctcagccttggcactagcctggctcattcttggcatcagccctgctctctctgtggaccggctcttgtcctgtcctgcactggccataccatgccctgccctgccctgccctgactcagccctgactcagccttggccttggcattgcccctggtcctgccatatttcttgccctgtccctaccctagccttggccctgacccttaccttgctctggccctgcccttgccctaatgcagcccctggccctgtcatgaccctgccctggacctgtcctggccctggcc

SEQ ID NO: 684841 - DNA, 667 bp, Homo sapiens
ggctactgaggtttagaggcaactagattatagtaatactctatatttgaagccaactttacaaatgaattaaatccttgaatctaactttataaattatatacatttttctcatttagctttcataataattatgggagatggctattttcatttataaaggacgaaactaaatctaacaccctcatcatcacaggatactatattttatatacaatcacagggacttttttttttaattgaacacacacccatcaagtaaaatgaacataattttaaagcctttgtgaaatcttttatgccacataaaatcagtctgtgtacaatgctacacaaatgtcaataaccatatatcagagccaaaccagtttcataattcatggggagatgatcattaggggtatctgaatagtttggaacctcagagcaagcaggtaataattttatttaacamgcttgattaggtctatagaagaaacattttttccttctaaaagttcagcaaattctattttgaggaaaacaaaactgaaataaaatcatggcaatgatacttctacttcaggcaaaatcttgttcaattcaactgcagacccactctgcaattatggaagtcacagaacttgacaagtattgtatcaaaaatcattccatgccaaaagatcaa

SEQ ID NO: 684842 - DNA, 1567 bp, Homo sapiens
gtaaccaaaagtttccttataaagtgtaacagcagagcttcaaaggtggcatttggcaagcctctttttttgactatgccttttcagcttcctttgtgggctccttttctttcatctttatttaaataatatttccctatgttttatccccagcccattgcttgcctctgtactgcctccctgtgagacttcattaagtatcagaattttaccaatagctcatatgcttatgatgcttaccttttcagattcgtatatttaaatgttttgtgattatttcatcctggatgtccaaactcaacatgttaaaattcaaatttatcatctctcaccccgggcctgcttttggtctgcatttcctacctctattaatagcttcagttattagccaccgacaccagacagtctcggagtcatcctgaactctatcttcccctccttccccaagtcaatcactaatcaagtcctgctaatacatttccttactatttctgaaatccatccctcttcctcattcctactaacatcctaatttaaaactttattatcttttacctggactattgtcttaagacaacaactttaacccgttgcttagcctaggtgtaatccacagaggatcttgtctgtctaagatgcccctctagccacatccttcccctgctcagatcttgtcattggctcccatgaactgaagttgaagtttaagctccttaggacagcatacacgcccttctatgatctgttcccagaacatatttactggtttatctcatatcatggcccactttgtattttacacttttgaaatacagaaaatcattacattctcccaataatactaagctagtatatgcctaaaagcctttgccaatattttgtcttttgttgagaattctcttagcttattttgtcacgtggttaactccttatgtcctttcacgactcacatgtcaagamttcaggaaaccttctctaactcccaggctgggctgagtgacccttttctgggtaaataatgaactctaatcatactcttcatagcacttaccatactaatttgaagtctgaagtattccattttctgcctcagtttacttaggcaaaggaaccatgtcctagtctcattctggcctcaggacttcagcctgggcgacagtgggagactgtgtgtcaaaaaaaaaaaattgccaatgattgaagcctaatactgaagattctggtttattaataattagtctgttgctgggtgttaattgagctccccaagtgattactcatgtaggacttcaaaacgataatttagaaccttgtgactaaaaatctgggcaaaaataagcagcatcagtatcacctgggagcagcttcaggtctcactttagatttactctgaatctaaatattatatttttattaaaaaaattaagaacagatgacaagcttcaactacatctaaattctttagatttactttaaaagaatcaacattttgacacaataccaaagtgaactaaattcgctttttttttttttttttgagacagagtcttgctctgttgcccaggct

SEQ ID NO: 684843 - DNA, 624 bp, Homo sapiens
tcatcagtctctctcattttctgtcttatctccattccatctacatacagtttttgttttcaccaatgtttttaaataaacaattgtacaagcacgacgacaacagaaaccttccttcccccagtgttgtagtgagcaaggaatatatttaacttcaaataaaagacaaraacaaatgctggataaagctgacagaaagaaatgcaactgtaggtgctctggcaatatagaaatgatacaactaagaaaaatggaagaaaaggaaagagaaagtattcctcagaatgattttactgactgctcatctgtaatgcctgggagtcaaaggatattgtttatagaaatgtaagcatacttaatggcaccaggggaaacaaagttaatatgattaaatcaaattgtgggatgaaaaatcacatagggaggacaagaaagagaatacagctaataccattgttcttagtttagagacattagctactgtctaaagaaagagatgattttatgaaattacataaggtagccatcagaataaaagtttaactcttccaaatatcacaacatcaaaacaaaagcaataaaacaagacagcaaaagacagatatgtgcatataaatcatagca

SEQ ID NO: 684844 - DNA, 624 bp, Homo sapiens
tcatcagtctctctcattttctgtcttatctccattccatctacatacagtttttgttttcaccaatgtttttaaataaacaattgtacaagcacgacgacaacagaaaccttccttcccccagtgttgtagtgagcaaggaatatatttaacttcaaataaaagacaagaacaaatgctggataaagctgacagaaagaaatgcaactgtaggtgctctggcaatatagaaatgatacaactaagaaaaatggaagaaaaggaaagagaaagtattcctcagaatgattttactgactgctcatctgtaatgcctgggagtcaaaggatattgtttatagaaatgtaagcatacttaatggcaccaggggaaacaaagttaatatgattaaatcaaattgtgggatgaaaaatcacatagggaggacaagaaagagaatacagctaataccattgttcttagtttagagacattagctactgtcyaaagaaagagatgattttatgaaattacataaggtagccatcagaataaaagtttaactcttccaaatatcacaacatcaaaacaaaagcaataaaacaagacagcaaaagacagatatgtgcatataaatcatagca

SEQ ID NO: 684845 - DNA, 1298 bp, Homo sapiens
acttatatgattccatttcgccatagataaaagctagtatttcagcctaccattgagtgtgcttatagctcaccaaaagggcactctgtctcgggaatacagatttgcctacaggtatcctattgcagtcaaagaaagagcaatgagggatagaaaaggttagtgatggagacaccaacgctgcattttgcaacaaacaacgtaaaaattttacggattggttctgctaacttactacagtttacattcctctcgggggagaattgttgygttttttcttaagatagaaaagcaattcagataatctgaaatctccccaagaaggataagacgcacagcagaaactattctaggcaggaagtcaatcctttcaactgtctgtgctccatagaaacaattgtctgcactgggagtcatatgaggtacagacaacagccagaactctgatcctctcattagtgatttcagaagaaattaccagtcaactgagtaattcactgagtaaagtaaacatttggcactgaaagaggttagacggataactatttgtatcaccatattcatgaagctggaatattttccattactggtatcacatccgaatggaagatgttaaaaggtctctcatcttgtaagatggatatgaaagaacattttctgataaatgaaattattaacacacctgcgaggtggatggaagagaaaaaaaagaataatcagcttgagttcttctccttgataagacaactcactaaaaacataaagagaaaaatacaagtttaaaataattaaccagaagaagacgactctagagtttttaaattgctgataagattttaatttgctccaagttgaaaataattatattgcttgtgttttaaggcacataatgagcaattatatcacacatgatagtttcagcagtaaaatattatcagttaacagctggaactcataaaagcatagcactatgtgaagacggaatttgctaaaataaaccatctgctgaaaactactattctgcaaatttaaaaataaagtttaaatgttatttgtcttatttaataggtctgtgaaaaaatgcgctctttgaaaagcagctgctaccttaattaattctttatattagacggctggttacagtaatgcacagtaaggtgctacatagatatattgctaaattatctgcatatactatgtatttggcttaaattatttgaaattttatagttaaaataacaaatgtatatttaaatgttttgacacaaattgcaaatatacctttaaaaagcgtctta

SEQ ID NO: 684846 - DNA, 3363 bp, Homo sapiens
ctcccaaatagctaggacaacaggtgcacaccaccatgcccactttttatttttttaacttttgatagagactgggtcttgctatgttgcccaggttgcttttgaactcctgggctcaaggaatcctctcatttcagcctcttcaactgctggtattacaagcatgaaccaccatatgggccggaagctgatttttaaaatactgagatcatatagacgacaacacctgaaaaatagacaacaccaagctttatgttaaaaggtgtgagggtatcaatattgttgtggctattggggaggaaaacattagtaaaaccagtgagttaaagctgttgctttaaactttggctttaatttaacaaatgttctatggagtgacagtatgtatgtaaccatgctatgcccattcacagatgcagtagagggaagaatttctcaaagacaactgttctaagactcaaattaaacygtactgggtttgaaaagagaaagtccagggattaccaaatattttagatatcagataaaagagaatgccagatatgcgatgataatcagcaatggttgttcacacaatacatcaaatcagtatttgaattagcttttgaattacaaggacaaatggaccaagtctagactccttagtagataaatcttattaggctgagatgtgttttcccctgtttttccacaattagattacaaatttgcaaacctcagctgctctcattttatgctctcaccaagctaaagctgaagttcatcaatcagtgtgtctaagtgttcactggttatataccattttgtagtttcagctatctttccaacttcctaaatcatcaccttcatttgatcttgtttttttccactatcacttctttattgaccatataaagaatataagtgagttcttattttgttattgttcattttagtctaatttcatcaaaatatcacaatcttttaatttcattttaatttcaaagattaaatgaaacctacatagaaatgtgtgtaagatttgcatttgcattattttggcatcaatttgctatcctccctcatgcacatagagatcatttccacgtacgtgatttcaaacatccaagtgcagtattaaaagcagttgtaaattatggttctcattttcatgatacaattacaatataaacttcctcttgctgctgtaaccaattaccacaaacttcatatcttacaataaagtgaccattaatcctacagttctgtagttcagaagacttgaatgaaactcacagggctaacatcaagttttgggcagggctgcagtctttctgagggctatgtggcagaatctattacttgatttttttcagcatccagaggccacctttattccttggaacatgacctcattcttatatcctatttttctttttttttttttttgagatggagtctccttctgtcacccaggctggagtgcggtggcatgatctcagctcactgcaacctctgcctcccgggttcaagtgattcttctgcctcagcttcatgagtagcttggactacaggcacttgccaccatgcccagttaattttttgtatttttagtagggatggggtttcaccatgttacgcaggatggtctcgatctcctgacctcgtggtccacccaccccagcctcccaaagtgctgggattaggcgtgagccaccgcgctgggtcctcattcttgtatcttaaaagtcagtgatgttgagtaatttctcatgccaccacctccaaggttgcatttcttctgtcttcttctttcacttataaggaagtttgtgatttcattgatcccacccatttaagacaatctctctatcatttttccgcaaccttaatttcacttgaaatctaatttcacactgccgtgcaacctaacatatttgtatgttagactctgggaattaggacatgaaaatttttgggaggccattcttttgcctgcagcagacataatctatttacctgcagattaaagcgttctttatttttctgtctccctctcttaattttttaaaaataatatgaattgtagtaaagagaaagaaaagaaaacaaagaaaaagaaggaaggaaagaaggaaggaaataaagaaagaagaaagaaaaggaggaggaaatgagggaaggaagggagggagggaggaagggagaaagggagaaaaaagaaaacatgaacacaagaaagaaagagggaaggaaagaaaagaaagaaagaaacagaaaggaagagagaaagagagaaagaaagaaaggaggaagggaggaagaaaaggaggaagagagaatggtaaaagggaggaaggcaaagaaacaaagaaaataaagaggcgaaggaaggaaggaaaaagaggaaaggaagggagggaggaaggaagaaaaggagggcgggaggaagggagaaaaaaggaaagaaagcaagaacgtgagaaagaaagaaagaatacgagaaaagaaggaagaaaagggagggagaaaggaagggagggaggagggaaggaagaataagaggaaagaaagaaagaaggaaagaaggaaggagaaaaaagaaaagaaagaaaggaaaagaaaaaagaaaagaaaaggaagaggaaaagaagaaaggaaggaagaaggcaagggaagggaagagaagacaaaggaagatggaaagaaggaagaccgcaaacattagaaattctgggtttgttagagaatatgccatactgtttttttttcacttgaaaggaaagagtagctgccattgaagattggatgtcttgttggcgatattgttgttcttatcttccacatgattactgagtttgtgcctagtctttccattactaagacaaaagtgttgaagtctgcaaatataattttggatttttctagttcacctttgattctttcatgttttacctcacgtatttggaggctctgttgttagctgcataccctaattagtaggatgtttacatcttcttgagaattgattattctattatctattatctctcatctctgatactatttcttgttccgaactctgttgtgtctaatatcaatgtagtccttccacagccttattttagtgtttccatgatatggctttctccatatcttgatgataacctatttatatctctatatatttggagcaagatataaaatttcgacttgattttttaaagatttttcaagatggaattcttatttctttttgttctatttgacattctctgagtttcctatatctgaagtttgattttctgtcacttcttttagaatatttttggcagttattttgaaatatatttcttttgctccattattttttcctcttttctt

SEQ ID NO: 684847 - DNA, 3363 bp, Homo sapiens
ctcccaaatagctaggacaacaggtgcacaccaccatgcccactttttatttttttaacttttgatagagactgggtcttgctatgttgcccaggttgcttttgaactcctgggctcaaggaatcctctcatttcagcctcttcaactgctggtattacaagcatgaaccaccatatgggccggaagctgatttttaaaatactgagatcatatagacgacaacacctgaaaaatagacaacaccaagctttatgttaaaaggtgtgagggtatcaatattgttgtggctattggggaggaaaacattagtaaaaccagtgagttaaagctgttgctttaaactttggctttaatttaacaaatgttctatggagtgacagtatgtatgtaaccatgctatgcccattcacagatgcagtagagggaagaatttctcaaagacaactgttctaagactcaaattaaaccgtactgggtttgaaaagagaaaktccagggattaccaaatattttagatatcagataaaagagaatgccagatatgcgatgataatcagcaatggttgttcacacaatacatcaaatcagtatttgaattagcttttgaattacaaggacaaatggaccaagtctagactccttagtagataaatcttattaggctgagatgtgttttcccctgtttttccacaattagattacaaatttgcaaacctcagctgctctcattttatgctctcaccaagctaaagctgaagttcatcaatcagtgtgtctaagtgttcactggttatataccattttgtagtttcagctatctttccaacttcctaaatcatcaccttcatttgatcttgtttttttccactatcacttctttattgaccatataaagaatataagtgagttcttattttgttattgttcattttagtctaatttcatcaaaatatcacaatcttttaatttcattttaatttcaaagattaaatgaaacctacatagaaatgtgtgtaagatttgcatttgcattattttggcatcaatttgctatcctccctcatgcacatagagatcatttccacgtacgtgatttcaaacatccaagtgcagtattaaaagcagttgtaaattatggttctcattttcatgatacaattacaatataaacttcctcttgctgctgtaaccaattaccacaaacttcatatcttacaataaagtgaccattaatcctacagttctgtagttcagaagacttgaatgaaactcacagggctaacatcaagttttgggcagggctgcagtctttctgagggctatgtggcagaatctattacttgatttttttcagcatccagaggccacctttattccttggaacatgacctcattcttatatcctatttttctttttttttttttttgagatggagtctccttctgtcacccaggctggagtgcggtggcatgatctcagctcactgcaacctctgcctcccgggttcaagtgattcttctgcctcagcttcatgagtagcttggactacaggcacttgccaccatgcccagttaattttttgtatttttagtagggatggggtttcaccatgttacgcaggatggtctcgatctcctgacctcgtggtccacccaccccagcctcccaaagtgctgggattaggcgtgagccaccgcgctgggtcctcattcttgtatcttaaaagtcagtgatgttgagtaatttctcatgccaccacctccaaggttgcatttcttctgtcttcttctttcacttataaggaagtttgtgatttcattgatcccacccatttaagacaatctctctatcatttttccgcaaccttaatttcacttgaaatctaatttcacactgccgtgcaacctaacatatttgtatgttagactctgggaattaggacatgaaaatttttgggaggccattcttttgcctgcagcagacataatctatttacctgcagattaaagcgttctttatttttctgtctccctctcttaattttttaaaaataatatgaattgtagtaaagagaaagaaaagaaaacaaagaaaaagaaggaaggaaagaaggaaggaaataaagaaagaagaaagaaaaggaggaggaaatgagggaaggaagggagggagggaggaagggagaaagggagaaaaaagaaaacatgaacacaagaaagaaagagggaaggaaagaaaagaaagaaagaaacagaaaggaagagagaaagagagaaagaaagaaaggaggaagggaggaagaaaaggaggaagagagaatggtaaaagggaggaaggcaaagaaacaaagaaaataaagaggcgaaggaaggaaggaaaaagaggaaaggaagggagggaggaaggaagaaaaggagggcgggaggaagggagaaaaaaggaaagaaagcaagaacgtgagaaagaaagaaagaatacgagaaaagaaggaagaaaagggagggagaaaggaagggagggaggagggaaggaagaataagaggaaagaaagaaagaaggaaagaaggaaggagaaaaaagaaaagaaagaaaggaaaagaaaaaagaaaagaaaaggaagaggaaaagaagaaaggaaggaagaaggcaagggaagggaagagaagacaaaggaagatggaaagaaggaagaccgcaaacattagaaattctgggtttgttagagaatatgccatactgtttttttttcacttgaaaggaaagagtagctgccattgaagattggatgtcttgttggcgatattgttgttcttatcttccacatgattactgagtttgtgcctagtctttccattactaagacaaaagtgttgaagtctgcaaatataattttggatttttctagttcacctttgattctttcatgttttacctcacgtatttggaggctctgttgttagctgcataccctaattagtaggatgtttacatcttcttgagaattgattattctattatctattatctctcatctctgatactatttcttgttccgaactctgttgtgtctaatatcaatgtagtccttccacagccttattttagtgtttccatgatatggctttctccatatcttgatgataacctatttatatctctatatatttggagcaagatataaaatttcgacttgattttttaaagatttttcaagatggaattcttatttctttttgttctatttgacattctctgagtttcctatatctgaagtttgattttctgtcacttcttttagaatatttttggcagttattttgaaatatatttcttttgctccattattttttcctcttttctt

SEQ ID NO: 684848 - DNA, 3363 bp, Homo sapiens
ctcccaaatagctaggacaacaggtgcacaccaccatgcccactttttatttttttaacttttgatagagactgggtcttgctatgttgcccaggttgcttttgaactcctgggctcaaggaatcctctcatttcagcctcttcaactgctggtattacaagcatgaaccaccatatgggccggaagctgatttttaaaatactgagatcatatagacgacaacacctgaaaaatagacaacaccaagctttatgttaaaaggtgtgagggtatcaatattgttgtggctattggggaggaaaacattagtaaaaccagtgagttaaagctgttgctttaaactttggctttaatttaacaaatgttctatggagtgacagtatgtatgtaaccatgctatgcccattcacagatgcagtagagggaagaatttctcaaagacaactgttctaagactcaaattaaaccgtactgggtttgaaaagagaaagtccaggrattaccaaatattttagatatcagataaaagagaatgccagatatgcgatgataatcagcaatggttgttcacacaatacatcaaatcagtatttgaattagcttttgaattacaaggacaaatggaccaagtctagactccttagtagataaatcttattaggctgagatgtgttttcccctgtttttccacaattagattacaaatttgcaaacctcagctgctctcattttatgctctcaccaagctaaagctgaagttcatcaatcagtgtgtctaagtgttcactggttatataccattttgtagtttcagctatctttccaacttcctaaatcatcaccttcatttgatcttgtttttttccactatcacttctttattgaccatataaagaatataagtgagttcttattttgttattgttcattttagtctaatttcatcaaaatatcacaatcttttaatttcattttaatttcaaagattaaatgaaacctacatagaaatgtgtgtaagatttgcatttgcattattttggcatcaatttgctatcctccctcatgcacatagagatcatttccacgtacgtgatttcaaacatccaagtgcagtattaaaagcagttgtaaattatggttctcattttcatgatacaattacaatataaacttcctcttgctgctgtaaccaattaccacaaacttcatatcttacaataaagtgaccattaatcctacagttctgtagttcagaagacttgaatgaaactcacagggctaacatcaagttttgggcagggctgcagtctttctgagggctatgtggcagaatctattacttgatttttttcagcatccagaggccacctttattccttggaacatgacctcattcttatatcctatttttctttttttttttttttgagatggagtctccttctgtcacccaggctggagtgcggtggcatgatctcagctcactgcaacctctgcctcccgggttcaagtgattcttctgcctcagcttcatgagtagcttggactacaggcacttgccaccatgcccagttaattttttgtatttttagtagggatggggtttcaccatgttacgcaggatggtctcgatctcctgacctcgtggtccacccaccccagcctcccaaagtgctgggattaggcgtgagccaccgcgctgggtcctcattcttgtatcttaaaagtcagtgatgttgagtaatttctcatgccaccacctccaaggttgcatttcttctgtcttcttctttcacttataaggaagtttgtgatttcattgatcccacccatttaagacaatctctctatcatttttccgcaaccttaatttcacttgaaatctaatttcacactgccgtgcaacctaacatatttgtatgttagactctgggaattaggacatgaaaatttttgggaggccattcttttgcctgcagcagacataatctatttacctgcagattaaagcgttctttatttttctgtctccctctcttaattttttaaaaataatatgaattgtagtaaagagaaagaaaagaaaacaaagaaaaagaaggaaggaaagaaggaaggaaataaagaaagaagaaagaaaaggaggaggaaatgagggaaggaagggagggagggaggaagggagaaagggagaaaaaagaaaacatgaacacaagaaagaaagagggaaggaaagaaaagaaagaaagaaacagaaaggaagagagaaagagagaaagaaagaaaggaggaagggaggaagaaaaggaggaagagagaatggtaaaagggaggaaggcaaagaaacaaagaaaataaagaggcgaaggaaggaaggaaaaagaggaaaggaagggagggaggaaggaagaaaaggagggcgggaggaagggagaaaaaaggaaagaaagcaagaacgtgagaaagaaagaaagaatacgagaaaagaaggaagaaaagggagggagaaaggaagggagggaggagggaaggaagaataagaggaaagaaagaaagaaggaaagaaggaaggagaaaaaagaaaagaaagaaaggaaaagaaaaaagaaaagaaaaggaagaggaaaagaagaaaggaaggaagaaggcaagggaagggaagagaagacaaaggaagatggaaagaaggaagaccgcaaacattagaaattctgggtttgttagagaatatgccatactgtttttttttcacttgaaaggaaagagtagctgccattgaagattggatgtcttgttggcgatattgttgttcttatcttccacatgattactgagtttgtgcctagtctttccattactaagacaaaagtgttgaagtctgcaaatataattttggatttttctagttcacctttgattctttcatgttttacctcacgtatttggaggctctgttgttagctgcataccctaattagtaggatgtttacatcttcttgagaattgattattctattatctattatctctcatctctgatactatttcttgttccgaactctgttgtgtctaatatcaatgtagtccttccacagccttattttagtgtttccatgatatggctttctccatatcttgatgataacctatttatatctctatatatttggagcaagatataaaatttcgacttgattttttaaagatttttcaagatggaattcttatttctttttgttctatttgacattctctgagtttcctatatctgaagtttgattttctgtcacttcttttagaatatttttggcagttattttgaaatatatttcttttgctccattattttttcctcttttctt

SEQ ID NO: 684849 - DNA, 1219 bp, Homo sapiens
tattttaagggccattcattttagatgaagttgaggaaagtattttaaaaaaggaaaaaaataatgkatttgcagttaggctcactcctttaatcccagcactttgggaggccaaggtaggtggatcacttgagcccaggaatttgagaccagcctgaacaacacagcgaaacagtatctctaccaaaaaaaaaaaaaaaaaaaattaaccaagtgttgtggtgtgtgcctgtcctgtagtcccagttactctgtaggctgagtggggaggatcacttcagcccaggaggtccaggctgcagtgacccatgatcacaccactgcactgtagcctgggcaacagagtgagaccctgtgtccagcaaacaaacaaaatatattgccttccttgttagaattttgcttaataccttggccgggagcggtggctcatgcctgtaatcccagcactttgagaggccaaggcgggcggatcatgaggtcaggagatcgagaacatcctggctaacactgtgaaaccgcgtctgtactaaaaatacaaaaaattatgagccgagatcatgacactgcactccagcctgggcgacagagcgagactccgcctccaaaaaaaaaaaaaaaagaattttgctcaatatccagcataaccctgttaattttgtgggaacataataaaagctactttgataacaaagcagaaaaatcagctgtttgtcttcttgcgcatgtcaaaccttaaatttggctgtgttttctgctctcttccccagtaacttcatttttaagcctctttcttatgtatttgaacaacaatcaagaaaaataacattgttgtgaaataccttaacctcacatgtgacgtctctttaaaataagtaatataatgaaagcaagcaagcaccggtaatctttagaaaggctaaataacttgagtggtaatgactaatgatcttttttgtcttcacaaaatatttcttgccatttaaacaaacatctgcatgtggagtaaagcatattgatagatagccaacatttcacattcagtgaagaactctttcctttatcctaagtgataatagtaaatttaaagactaattaatttctttcactggaataataagttctgggaaaatatcagatattttaaacattggaagtgaagagaaagttgcatctatgaaaaaataatttttagtaagattgatacacatttatatca

SEQ ID NO: 684850 - DNA, 645 bp, Homo sapiens
catttaattatttttatttcaattttgttttttaaaatgtggttacttcatagacacatttattttccaacatcagctccttagtagtataatatagaatgcctcattagcaatggaaaatgggcttaagtttgtagcaggaatgtcctgaataatgtttttagatgtggaagaagttagcaagggagattatagaacctctcacttccccctggagatctttaaaacaagtaaatctttttatttaatccacaaattttacatcagatctatcctcatttactggtgctgcctttgctttactaagttctcttcctttgttcttcctcatgctgcctttgcttggagaagcttcatgaaagaagagaaataagccttggcttgaaggaggctatgggtattgctctagcaaatagaatgcctacattgcaacccatttctctctaggttccaatctagttttctcatttatcatttaagggagttggattagtgcatcagttttcraaatgtagtctctggaccagcagtattagaagcacctgagagcttgttaaaaatagaaatgttcaggtcccataccaaattaactgaatgagaaaccatgggagttcaagggaatgttgaactgctgtacactcagat

SEQ ID NO: 684851 - DNA, 612 bp, Homo sapiens
gcccttcttcctccaagacacatttatggcgatgcagtctctcagcacaatttgtactattgatacaaaaatgttactccaggcctatacacctaaaaaaaaaaggagtttcagacaccagttttccaccttctgctatcagttcgttagtgaacactcaaaagagtttttgcttccccacataacctcacaactgcaaaagtcagatagtgaatattcatttggttattttctcctaggtagcatctgaatatgaatctcagagtctgagagacaccatttcaaatcctgcttctgtcttatattcagataacttctctggatctcaatttttttcatcaataaaaatgtcgataagaaaaatctacctagtagcattgtcaagaagatgaaataaaataatttacttaaagtcttggaacataatagaccctyaataaatggtagctgttattatggaggaaacattgggtgagattatcagtgcctaccaagataggtgatatggtttggctctatgtccccacccaaatctcatctcaaattgtaatccctatgtgttgaggaagggacctggtgggaggtgattggatcatcggggtgttttccccc

SEQ ID NO: 684852 - DNA, 1400 bp, Homo sapiens
gaggaaactgggagggcctggctgtccagtactgatggaccacatgatgttccagccagcttcggtcatctggctcatctgcttgaaagaaatgtaatcagtttgagttaacaacaacaaaatactgggtcacaatacctggacttacagctccattcaaacgtatagttgaaaatggctttttaaaaataacagctacctaacatttatgtatatatgattattttaaaccacatatatctgctgggttctatggctcacacatataatcccagccctttgggaagccagggtgggatgaccacttgaatccaggagttcaagaccagcctgggcaacaaagtatgaccccccatctccacaaaaaatacaaaaaaattagccagggatggtggcatgtgcttgttctcgggaggctgacacgagaggggactggttgagccaagaggttgaggctgcagtgatctgagatcatgccactacgctccagcctgggtgacacagtaagaccctatctcaaaaaacaaagtaaaataaaataaaaccacacatatagaaacgcatactaaatttaattaaatgtaactgactagaaagtaaaaaaaaaaaaaattgccacatacataaaaagatataaatggtatatgttaattgtccagtaaccattaaggaaactgaaatggtaactgaagaccttcccaaccactacggaagtctcaggactggtgctaaattttgaaggattagataacctctatcttatacaagttgtttgaaaaagcagaaaaagagaaagccacctaacattttatgaggctaatgtaacagtgatgctttaaactagacaaagacaggatacatgtaattcatcaaagaataaagatgaaaaatcctacattaaaaaagagctaacctgttgggctcggtggctcacacctgcaatcccagcctgggctggtctcaaacatagtgagacctcatctctacaaaaaagtaacaaacttagctgggtgtggtggcatgcactggaagccccagcttcttaggaggctgaggtgggaggatactttgagcccaggaggttgaggctggagtgagctgtgatcacgctactgcactccagcctgggtgacagagcaggrcccggtcttaaaaaaaaaaaaaaaaaaaaagcaaatccaaaattgaatccgatctaaaaatgtactaaaaaataacatgatcaagcaagtttaggtgaagaattcaaggataattcaacatcagaaaatctatcgatgcattattaggataaaagagaaaagttatgagattatctcacggataaatagtagcatttaataaaaattcaacatttattcataattaaagacttctagaaaaaaaaagtaatagaagga

SEQ ID NO: 684853 - DNA, 913 bp, Homo sapiens
cccaagggcctccctccatctcccacacccctgggccatggaggacccgctgtgccatccaccagtcccactgccccaggtggggccctcaggacaatgagaacatgcacctcagcccagggctgggctaccaggcacacagatgagctcggggaagctccatcagcccacctggcagatgcctgggttgggtagggatcaggctggtgggaggggctgtttctttcccacctgtgtgcacctgggcaacacacagacagcataaacaattaaggagtgctcctcgacgacggccattccttcatctttcacccgaatccagtgcatgtttaaaaggcacaaagggaagaagacagcgtttcccgctccacctactctttctgttagggcagacccaccatggcggtctccgggaggacagtcacaccacagagggggcgctcccacgctcaggagaagagtgggggtccccattcacagatgccgacactgagcccagagggacagggagctgccgcagccccgtggcttgcctcacgtgcctmagtggcgtggcccgcatggccgggcagtcccgcctgctcaggaggccatgggctcggctgggcaccaagcatgacctcgggcgcttgacaaagcaattccaccgctggccattctggctgggggctctcagcctgctctgattcctgcggcttgaaggaaagggaactggctgccacccaccttgtcccccaccttatcactgtgcccaacagaccgtgtatctgctgggtcctgcggcgcccggctgaggaacaggcgccacgggcgatcgagccccgtgctccccctccccaccagcctctcaggttctcctctcagggcccaggagggtgcaggttgatgaccaaaggctacacggcagccacca

SEQ ID NO: 684854 - DNA, 1347 bp, Homo sapiens
caaaggaacagtgctcacacagtgttactcattttagaaagtttggtaaaattccatttggctgcatgtctgttatctgagcctaggggaagaaagtctgtgttttatactctgactttgttctcagctgcattttgtatcctgggatagtggaaagaaaaatggctttgaattaaacttgagatttagtcattccatatgttgccctcagtgaagaatgtcttgagttttcaagatgaacacatgagaaataaagacatgtacaagattcagtggcattctctctctcatttgcttggctaattgaataaagcttaatgatgagtgataatttatatttgaaacagttgtcacccgtgaacatattccattggctggtaatttatacacagtataagcattgctcttttctcagtaatttctaatagcagatggtttaactctggtgaggactttttctttctcccaaagtatttcagtgttgttacatgccctaaatgagccattttctccctcctcagtattttttcagcagctagacttcctttcttttcttttttttttaattttttacttcatagtgctacaaatagcttttttttaacctaccaattactaagaaaaagtcacttttgctgactcctgtttctataagctcaaatcccaaggaaaattagcaaaggtcttctctacagttttcctttgtaccaacaaaaaaaagtcctttctcaaaaagatctcccaaaaggagagtcctatgatcagatcacaaatatattgaaaatgcaccagaacaggctgctgcgtgaaaacatagatttgtcaatatggacatcaacttaaagtcagagcctagggaaataatcagtaaatttggaagtatatagtaatttgcaacttggaagcccttacacactttcttacacactaatcttattttatagatgatgaacatgagataattctaaactaaaataaaaatggataacatcagaggatggtctagaagttttcatctttatattaattgtaatgagttaagtcatggtatgtaaataaataactgcaaaagcttagtggcttaagacaaaggaaaggtatttctcaaatacatgacatgctcrtcatgagtttccagggggatctactccatgagcttggggattaaaattgatgaagcctcttgtattagttccttttgtgttgctatagaggaataaccgaggctgggtaatttataaagaaaagaggtctattttggctcatggttctacagactgtacaagaagcacagtaccagcacctgcttttggtgaagacctcagcaagcttttactcatggcagaa

SEQ ID NO: 684855 - DNA, 622 bp, Homo sapiens
aaaaaacaacgacaaaaaaatttttttttttagtcagagattctcaggtccttttctgatcttgcaccttgatttctctggcaattttattcatcgagagagagagacaaagagggagggagagagagtaaaataaactcatgatcgtaacttaaaagttagaatagtgtgtttaytctacaacccataggtactttggccagccaataaataagcaatgcttgtactcagtccaccaacattttactggttgttattttcttacttaatctcccaaatctacaaatattaatgtagaaaaaaattcctgttagaaagttgggtcccatttttataactcaatatggctatagatagtaaaaaataaagcccttaaacttagctccccaaactgctttttaaaaaattcctttctactcacctagctcagtactgggctaccctataccccctcacgtgactcacaaccatccaaagaacgctcatatgccaaagggccttttgcaacatacacagaggtagatacagttgtggatgttcttgcttagaccatattattttgcaggggttcagtgggaatatccaagctgaggattatagagctagaaaagagagcataaca

SEQ ID NO: 684856 - DNA, 657 bp, Homo sapiens
atttttatttttaaattttgagacggagattcactcttgttgtccaggctagagtgcaatggtgmgatctcagctcactgcaacctctgcctccttggttcaagtgattctcctgcctcagcctcctgagtagctgggattacaggcctggccaattttgtatttttagtagagacggggtttctgcatgttggtcaggctggtctcaaactcctgacctcaggcgatccgcccgcctctgcctcccaaagcgctaggattacaggcatgagccaccgtgcccacctcggatatgactctttctagctctctctgaaaagccatgcacttgttctacttttagtatattggtatgcagaattgaagttacaatgtcacatatcttatacaatgcctagttaagcatatattaattacatactatttgtttttgaaaatcagtgtaggcaattgaaagaatccttgctctggagccagagcaggcttaaattctgcctttgccactactgcataagactatggaaaactagtttgtttgttttttctgggtctcagttttagcttttcctggctgaaaaagtgaataatagtgctcccatgtgatagtaataaatgttagattgatttaatgaaatacatgtcaaacaccacgttaat

SEQ ID NO: 684857 - DNA, 657 bp, Homo sapiens
atttttatttttaaattttgagacggagattcactcttgttgtccaggctagagtgcaatggtgcgatctcagctcactgcaacctctgcctccttggttcaagtgattctcctgcctcagcctcctgagtagctgggattacaggcctggccaattttgtatttttagtagagacggggtttctgcatgttggtcaggctggtctcaaactcctgacctcaggygatccgcccgcctctgcctcccaaagcgctaggattacaggcatgagccaccgtgcccacctcggatatgactctttctagctctctctgaaaagccatgcacttgttctacttttagtatattggtatgcagaattgaagttacaatgtcacatatcttatacaatgcctagttaagcatatattaattacatactatttgtttttgaaaatcagtgtaggcaattgaaagaatccttgctctggagccagagcaggcttaaattctgcctttgccactactgcataagactatggaaaactagtttgtttgttttttctgggtctcagttttagcttttcctggctgaaaaagtgaataatagtgctcccatgtgatagtaataaatgttagattgatttaatgaaatacatgtcaaacaccacgttaat

SEQ ID NO: 684858 - DNA, 657 bp, Homo sapiens
atttttatttttaaattttgagacggagattcactcttgttgtccaggctagagtgcaatggtgcgatctcagctcactgcaacctctgcctccttggttcaagtgattctcctgcctcagcctcctgagtagctgggattacaggcctggccaattttgtatttttagtagagacggggtttctgcatgttggtcaggctggtctcaaactcctgacctcaggcgatccgcccgcctctgcctcccaaagygctaggattacaggcatgagccaccgtgcccacctcggatatgactctttctagctctctctgaaaagccatgcacttgttctacttttagtatattggtatgcagaattgaagttacaatgtcacatatcttatacaatgcctagttaagcatatattaattacatactatttgtttttgaaaatcagtgtaggcaattgaaagaatccttgctctggagccagagcaggcttaaattctgcctttgccactactgcataagactatggaaaactagtttgtttgttttttctgggtctcagttttagcttttcctggctgaaaaagtgaataatagtgctcccatgtgatagtaataaatgttagattgatttaatgaaatacatgtcaaacaccacgttaat

SEQ ID NO: 684859 - DNA, 657 bp, Homo sapiens
atttttatttttaaattttgagacggagattcactcttgttgtccaggctagagtgcaatggtgcgatctcagctcactgcaacctctgcctccttggttcaagtgattctcctgcctcagcctcctgagtagctgggattacaggcctggccaattttgtatttttagtagagacggggtttctgcatgttggtcaggctggtctcaaactcctgacctcaggcgatccgcccgcctctgcctcccaaagcgctaggattacaggcrtgagccaccgtgcccacctcggatatgactctttctagctctctctgaaaagccatgcacttgttctacttttagtatattggtatgcagaattgaagttacaatgtcacatatcttatacaatgcctagttaagcatatattaattacatactatttgtttttgaaaatcagtgtaggcaattgaaagaatccttgctctggagccagagcaggcttaaattctgcctttgccactactgcataagactatggaaaactagtttgtttgttttttctgggtctcagttttagcttttcctggctgaaaaagtgaataatagtgctcccatgtgatagtaataaatgttagattgatttaatgaaatacatgtcaaacaccacgttaat

SEQ ID NO: 684860 - DNA, 657 bp, Homo sapiens
atttttatttttaaattttgagacggagattcactcttgttgtccaggctagagtgcaatggtgcgatctcagctcactgcaacctctgcctccttggttcaagtgattctcctgcctcagcctcctgagtagctgggattacaggcctggccaattttgtatttttagtagagacggggtttctgcatgttggtcaggctggtctcaaactcctgacctcaggcgatccgcccgcctctgcctcccaaagcgctaggattacaggcaygagccaccgtgcccacctcggatatgactctttctagctctctctgaaaagccatgcacttgttctacttttagtatattggtatgcagaattgaagttacaatgtcacatatcttatacaatgcctagttaagcatatattaattacatactatttgtttttgaaaatcagtgtaggcaattgaaagaatccttgctctggagccagagcaggcttaaattctgcctttgccactactgcataagactatggaaaactagtttgtttgttttttctgggtctcagttttagcttttcctggctgaaaaagtgaataatagtgctcccatgtgatagtaataaatgttagattgatttaatgaaatacatgtcaaacaccacgttaat

SEQ ID NO: 684861 - DNA, 602 bp, Homo sapiens
aatgtataagattatttcagggagtagcagctctttatttgtagtttactcctgacatcaaaccaattggcctggatgacataagacagaaaacctggaacaggttttccttaataatgacttttagtgattaattacattttactaagataactgcaggcttccctgaatcacacatctgtctttaattagtttaacctactatttttctaaaggataaagtgacttgtttgaagtcacatatatatttagtggattactggttttaggagtcctgtgttcctattttccagcctattgagatttagaatttaatgccctgttctctgttgtttatactaggaagtgtgaggtatttttccctaatttggttccgaaagtgtgttgaagaatactccagcaaaaagaagcagttatgatttatgttcacaataataaataactcccctttgaattatgggttttattgatagcagttacctaattttctgtcattttttgacagatggggaasagatggttattagcttcataaaaataatcatgaaattcagtattaaaatatttattggacttcattcagaagtctcaacaggataaat

SEQ ID NO: 684862 - DNA, 620 bp, Homo sapiens
tgtacgaataacamtattgcccttatcatttgttgcatgcttattaaatatcatagataaacatcatctaattttgccatacaagagctcaatgaagaacatatttccattcttagttgaagaaactaagatttatggtgtaaaaatcttccttaaatttacatgaaaaagagacattttgattcaggtccattgatctaaattactgcacagatttttgcgtcttcaaatctgttcattgcactattcttaagaaaaagatgtggaaaaaaatgtgtgaaaaaccttaaaatgtccaaagataaaaatatttaaataaatattttataccaaggtgcttagaacgataacaattaataggcaagatattcaaactgtaggaaaaattagacttcaaaagagcggagtagatgatcacgttttaaagagaaaaaatagagaaaactgggagaaaataatctgatatatcaacattaattttttcttggttatttataacttttttcttttaggttattgtaaggttctccactcttctgtattagtcatatattacctttgtacttaaagggaaaaaagatttattaaaatgttgagggttacacttctaaaattaaatg

SEQ ID NO: 684863 - DNA, 620 bp, Homo sapiens
tgtacgaataacaatattgcccttatcatttgttgcatgcttattaaatatcatagataaacatcatctaattttgccatacaagagctcaatgaagaacatatttccattcttagttgaagaaactaagatttatggtgtaaaaatcttccttaaatttacatgaaaaagagacattttgattcaggtccattgatctaaattactgcacagatttttgcgtcttcaaatctgttcattgcactattcttaagaaaaagatgtggaaaaaaatgtgtgaaaaaccttaaaatgtccaaagataaaaatatttaaataaatattttataccaagrtgcttagaacgataacaattaataggcaagatattcaaactgtaggaaaaattagacttcaaaagagcggagtagatgatcacgttttaaagagaaaaaatagagaaaactgggagaaaataatctgatatatcaacattaattttttcttggttatttataacttttttcttttaggttattgtaaggttctccactcttctgtattagtcatatattacctttgtacttaaagggaaaaaagatttattaaaatgttgagggttacacttctaaaattaaatg

SEQ ID NO: 684864 - DNA, 643 bp, Homo sapiens
aataagttaggaagttctagaaaaaaatagattctgaattaaaaatggaaagaactgaatagcactggaagcacacacaataacctggtagaaaatggtccaattctgagtccctcaggagaagaaaggctgagattttytccctgcttctgtgaataaagcctctcaatgatcttgcctgtaatacaattctaataaaatgtgatgaagaaaataataaattgtctgtcatatttctcctgaacaatggtggtagaaatgagaggtaatggaaaagaaaatgaaggtgaaggggaaagaagtagctgaaagttgctattggagataggcaagacaaaaaactatattggaaacatttgtcacactgcaactagtttctggcttttgaagaggcaagccctctctcactatgttgacacagaattatacctggagatgatgttagaccttgtttttagtgactggaaaaatcctcttgaaaattctatctggtacttaacaatagggtccattttaatgaagaaatggttggctaaaagattgccagaagtggtttaaattaaaagcggttcaaagatgattactaagcaaagacttacttacactttcaaatatggataaaaacatttctggaaaactcatc

SEQ ID NO: 684865 - DNA, 643 bp, Homo sapiens
aataagttaggaagttctagaaaaaaatagattctgaattaaaaatggaaagaactgaatagcactggaagcacacacaataacctggtagaaaatggtccaattctgagtccctcaggagaagaaaggctgagattttctccctgcttctgtgaataaagcctctcaatgatcttgcctgtaatacaattctaataaaatgtgatgaagaaaataataaattgtctgtcatatttctcctgaacaatggtggtagaaatgagaggtaatggaaaagaaaatgaaggtgaaggggaaagaagtagctgaaagttgctattggagataggcaagacaaaaaactatattggaaacatttgtcacactgcaactagtttctggcttttgaagaggcaagccctctctcactrtgttgacacagaattatacctggagatgatgttagaccttgtttttagtgactggaaaaatcctcttgaaaattctatctggtacttaacaatagggtccattttaatgaagaaatggttggctaaaagattgccagaagtggtttaaattaaaagcggttcaaagatgattactaagcaaagacttacttacactttcaaatatggataaaaacatttctggaaaactcatc

SEQ ID NO: 684866 - DNA, 643 bp, Homo sapiens
aataagttaggaagttctagaaaaaaatagattctgaattaaaaatggaaagaactgaatagcactggaagcacacacaataacctggtagaaaatggtccaattctgagtccctcaggagaagaaaggctgagattttctccctgcttctgtgaataaagcctctcaatgatcttgcctgtaatacaattctaataaaatgtgatgaagaaaataataaattgtctgtcatatttctcctgaacaatggtggtagaaatgagaggtaatggaaaagaaaatgaaggtgaaggggaaagaagtagctgaaagttgctattggagataggcaagacaaaaaactatattggaaacatttgtcacactgcaactagtttctggcttttgaagaggcaagccctctctcactatgttgacrcagaattatacctggagatgatgttagaccttgtttttagtgactggaaaaatcctcttgaaaattctatctggtacttaacaatagggtccattttaatgaagaaatggttggctaaaagattgccagaagtggtttaaattaaaagcggttcaaagatgattactaagcaaagacttacttacactttcaaatatggataaaaacatttctggaaaactcatc

SEQ ID NO: 684867 - DNA, 643 bp, Homo sapiens
aataagttaggaagttctagaaaaaaatagattctgaattaaaaatggaaagaactgaatagcactggaagcacacacaataacctggtagaaaatggtccaattctgagtccctcaggagaagaaaggctgagattttctccctgcttctgtgaataaagcctctcaatgatcttgcctgtaatacaattctaataaaatgtgatgaagaaaataataaattgtctgtcatatttctcctgaacaatggtggtagaaatgagaggtaatggaaaagaaaatgaaggtgaaggggaaagaagtagctgaaagttgctattggagataggcaagacaaaaaactatattggaaacatttgtcacactgcaactagtttctggcttttgaagaggcaagccctctctcactatgttgacacagaattatacctggagatgatgttagaccttgtttttagtgactggaaaaatcctcttgaaaattctatctggtacttaacaatagggtccattttaatgaagaaatggttggctaaaagattgccagaagtggtttaaattaaaagmggttcaaagatgattactaagcaaagacttacttacactttcaaatatggataaaaacatttctggaaaactcatc

SEQ ID NO: 684868 - DNA, 672 bp, Homo sapiens
tatgggggctgagaaaaccttgaaaaatatttactagagttaggatttcagagaactaacacggttattgtgattctgctgccttctaattctgaagcaaatgctttgaattgccattgtgcaatagattgattaaacttcagttttaatgtgacaactcattcagtaggtctaggcaacttggggagtaaatatttttttaatcggtaggctggtctttatttctattctcattgcctttgactacatcacactaaaagacgaatactattatacataacaggagagcatgtcatgaaaataaaatagaattccatgttaagagatcattatttatttaatgttgggaagtgattaaataaatcatagtctattgtttctaatgccagaycaaatgtacaaaaattatgtaaaaatcgaaaattataatgattcagaaaaagtagtcatctgaaaagctgagtacaaaaatatgaattgtttattcttattgcttatctaattttagtctgattctgcagaattatgaacatgaaaatgtaaaatataaggcatgtggttatttatggtgtactatgtggtactacgaaatagatcttacaagctatgggtaggtcacttgttctctccttagagtttttgcccaggttctgagactagtcttaatctaac

SEQ ID NO: 684869 - DNA, 605 bp, Homo sapiens
tatattcttataataaagtaagctaaagaaaatgttattaagaaaatcataaggagaagaaaatacatttacagcactgtactgtatgtattgataccgtaagtttccattgcctgttcacaagatgaataatctgtctgaaatggtggcaaccacagctgcagagctcaatctatggtacagatcaagcaagtcaactttttcttgtaatgtcatgacttttctctgtttcttgggagcaatttcagtgtcactaggggcactctatatggatctcatgatattattcaaggtttatggtattacactaaaaagaatgaaaaagtttgaaacattgcaagcattaccaaaatgtgacacagagayacaaagtgagcacatgcatttggagaaatggtgatgatagtcttgtttgatgcagggttgccacaaactttcattttgtaaaaaattcagtatccgcaaagcacaataaaacaaggtatgcttatactgggaagctctgttatttggtccatacacatacacaattgttatgtcttcctgataagttgatacttttatcattatgaaatgtccctccttatctctggtaataattttag

SEQ ID NO: 684870 - DNA, 1650 bp, Homo sapiens
ccaaacaactctggaaatgagctcttgctcaggaaggaaaaagyaaaaacacctttactattgagtcttttatgcagctattagcttggtacaaagaacatccccttaggaaaagagaaattcaagatgctgtctggattggaagaaatggaagaaagcagtggaagttccactctcacaagcagggcccacatcggcctccccttgggaagaggaaatacaatcagttttgtggcacagatgagctccaggcagagccaatttcacacacgctgattgcagcctgtaccttctgcctcaccctccgaatcagcctgaggctggcagaggtctgtgaactgggctgagatttttttgacctgttaggttttagcatatggcagaaacaatcaatactgcccaagaaccgaataaagcacggctgttcccaacagggaaaacaggcaagctgctctttcccagaaggagcactccttgccaagcctgcatgccctgaccatcttcctgcacagggcacttagatattcacctacttaggaaacacattccagcctctagccaccatcccacacctaaaaatcaaacagagacattcatctggctggggactgggagtttatagcagtgcctttcgggtgagttggtgagctcagctagtggtggcttactccactaattagcctgtggccagaaagccacttaggctaaggagcccttctctgctcacttctgtggccacagagtggtccctgggcctagccagtcagctggctggcagatgcttgccactaggagatgggaaatgggctgcagaagttctgaagctgaaaatgtcacctgaccagcctgggcaacatagcaagaccccatctctaaaaaaaaaaaagtttttaaaattagccaggctaatttttacacacctgtacacaggtgcatatctgcagtcccagctactcaggaggctgaggtgggaggatggcttgagcccaggagtttgaggctgcagtgagctatgatagcacaattgcactccagcctgggcaacagagagagaccctgtctcttaaaaagaaagaaaaggagagtgaagcctgcatctctccctcccctctccccttccaacagagcagttccacctatacctatttattaattgagcttcctatcattttgtttgaagaagggattcatcactgctaatactaatcgttcacgctgtgtgttggggtgcacgagtgcacacacgcccaccaggcaccatgccaggtgttccagatgccttggcttgatctcttcaaacaagtccaagagggagattctgttattatgtccatagcacagctgaggaaatgaaagtcaactctcttgtccaaggccacaaagccagtaagtgggaaagccaggacttgaacctaggtcccccagactctgcagcctttcttgcattgtcctctgggaagggccacaaccacctgagtgaagaaaaacaaagcccagtctttctctaaagcaactgtgctcaaccttgtctgcgtactggagtcatcaaggaagctgcgaccagcgcagacgctgggctgtcatctctggaggcactgatttgcttcatcgatctgagagcagcttgggcatagggatttgtttttttta

SEQ ID NO: 684871 - DNA, 1297 bp, Homo sapiens
ggggagtcctgcaactagacctttggatcttgtctttatttgaattttgtggattttttggcattaattttgactttaaaaaaaaaagcatgaaaatattatttttcttaaattgtgtgcctaacagtgagtcccaataaatacttcctttaggaaatacttaaaggagttaaacaacttttgacttgctgatccttctgcattgagggaggagacatctcagaagcatgccctttgaaaagtatcagaatactaggcatcctcctgtgcctcccacaacccccgcaaaaaagaatactagccctcccaaaggccggatgggatttctgcatcaaagagaagacatcaacggagagataacctagtcattcagaggccgcaggtgaggagagagggacagtggacagcaatgcccagagaaggcaatttgagtgcatgaccatcagcccatgccaagggcagcctgcagagttcctccctctgttgattcatttggctaggatgagttctagacctgaacacgtcctccccatcatacaggattacccactgttaccttggtaaattaacctgtttaaccttcggctccctggtctgtaagatagaactaatactatacccctcacagtgatgttttaaggataagtgaggtagaatatatataaagcactttacagagtgcctggtacattctaagtggtcaaaaaaaaaaaaaaagatagctattttcgccttactattagattttctaggtcaaggctgggcgcagtgcctcacacctataattctagcactttgggaggcaggggctggtggatcacttgaggtcaggagttcgagaccaccctggccaacatggtgaaaccccatctctactaaaaatacaaaattagctgagcgtggtggcacatgcctgtaattccagctacttgggaggttgaggcaggagaatcacttgaacctaggaagtcratgttgcagtgagctgagacggtgccattacactccagcctgggcaacaagagtgaaactccatctcaaaaaaaaaaaaaaaaattctaggtctgttcttgaagctagaacagaaaaagagattttctaggtctattcctgtctgagtcctcattgggaacgtttcactgctgactgataagtcaccagagtgtaggccaagccagtgagctttgatgcgtattaatataaaatctgggaaattgtccctaaaatgagtcagagttacggaaggaatggagaagcctggattccggtctcagcttcaggacttgttagctgtggg

SEQ ID NO: 684872 - DNA, 1297 bp, Homo sapiens
ggggagtcctgcaactagacctttggatcttgtctttatttgaattttgtggattttttggcattaattttgactttaaaaaaaaaagcatgaaaatattatttttcttaaattgtgtgcctaacagtgagtcccaataaatacttcctttaggaaatacttaaaggagttaaacaacttttgacttgctgatccttctgcattgagggaggagacatctcagaagcatgccctttgaaaagtatcagaatactaggcatcctcctgtgcctcccacaacccccgcaaaaaagaatactagccctcccaaaggccggatgggatttctgcatcaaagagaagacatcaacggagagataacctagtcattcagaggccgcaggtgaggagagagggacagtggacagcaatgcccagagaaggcaatttgagtgcatgaccatcagcccatgccaagggcagcctgcagagttcctccctctgttgattcatttggctaggatgagttctagacctgaacacgtcctccccatcatacaggattacccactgttaccttggtaaattaacctgtttaaccttcggctccctggtctgtaagatagaactaatactatacccctcacagtgatgttttaaggataagtgaggtagaatatatataaagcactttacagagtgcctggtacattctaagtggtcaaaaaaaaaaaaaaagatagctattttcgccttactattagattttctaggtcaaggctgggcgcagtgcctcacacctataattctagcactttgggaggcaggggctggtggatcacttgaggtcaggagttcgagaccaccctggccaacatggtgaaaccccatctctactaaaaatacaaaattagctgagcgtggtggcacatgcctgtaattccagctacttgggaggttgaggcaggagaatcacttgaacctaggaagtcgatgttgcagtgagctgagacggtgccattacactccagcctgggcaacaagagtgaaactccatctcaaaaaaaaaaaaaaaaattctaggtctgttcttgaagctagaacagaaaaagagattttctaggtctattcctgtctgagtcctcattgggaacgtttcactgctgactgataagtcaccagagygtaggccaagccagtgagctttgatgcgtattaatataaaatctgggaaattgtccctaaaatgagtcagagttacggaaggaatggagaagcctggattccggtctcagcttcaggacttgttagctgtggg

SEQ ID NO: 684873 - DNA, 632 bp, Homo sapiens
cctcccctgtggctcactctatatggccgatgccttcctttaaagagttcaaactgtagcaccttcatcacacctttggtttttgagctccaacagagcaaggtgattcaactttggaaatagaatgacagagagagactgggtgcagtggctcatgcctgtaatcccagcattttgggagaccaaggtgggaggactgcttgaatccaggagttcaagaccagcttgagcaacatagtgagacctcgtctctacaaaagacaaacaaaattagcaagcgtggtggtgcgtgcctgtagtcccrcctatttgggaggctgaggtgggagaatcatttgaacctgggaggtcgaggctgcagtgagtggagattgcaccactgcattccagcctgggtgacagagcaagaccctgtcacacacgtacacacacgcaaaaatgacagagaggcagaattctcctaagtggaaatgaaatacagaataccatgatttagttttcctgtagttctttccctaacgtttgacaatagctttccttttgggtgatcagtgtcctttggttttacctcatagccctgtgaggttgccgtgttgagtcttgttttcataccacattgacggtcctttcta

SEQ ID NO: 684874 - DNA, 1082 bp, Homo sapiens
gcaccaagatttttatttacccaccttcctgctttttatttttttttaacataaacattatggaccagattattctctttttgacccagggttgtgataggaattatcttgttacaaagtggtagcagatctatgcttgcttttatgtttttatggcccctctcaacctctggctatcaattctctgtcctttctcagttgtcccttaacagtctattctaactcctataaaacagagactaaaagtaccaacctcattgttatgaggtggaagagaaggcccagcactaagtcaggctctcaggaaaattcaaacaacagttcctctttgcccttcaatatagctgctgcttttctgtcatggrctgaggtaccactgaacctgtgaaccaagcacacaggtataagtccacagaccgggtgaatgcctagatggtaaagtatatgggctttgtgactccattaccaacttccaggctaaggaaggactgacttagtgagaagttccaagatcattgaattcatagttccctgtggctgtctcccttgtacccctatcatgaccaaggcttgaggaggggcctctcaattccccctgccacacttggaacagtatgagggatgcagcagaggccaaaaactgagtgaccagccccagggagtcaataggggacactgacaaaccaatcacaaagtgggtgccatttgctcttagggaggagaggcagggcctggacaaggacagcagttggaaggcgaagggcaggtctggctttcagtagtggtagtgatctggcttgaaggggccatcacgggacaagtacaggtaatgggcttgcagctcagtcagcttggtcaatttcacattcagcttgcccaggtgggcttcagccattgcctcattcagcttcttgggcaggaagagaaccataacctggtacttgtctgggtgggtctgcagctcagtctgcgccatcacttggttggtgaaggagttacttatcaagaagctgaggtggcccatggcacaacccaggttgaccagctgaccctcagctagcaggatgatgtggtgtgcattc

SEQ ID NO: 684875 - DNA, 2343 bp, Homo sapiens
gaaggaaagaaagaaagaaagaaagaaaagaaagaaagagggaaggaggaaaggaaggaaggaaggaaggaaagaaggaaggaaagaaagaaagaaaagaaagaaggcagttttatatggcttagccttggaaatcatacattgtcacttccatcatattctactggttgatgtagttacaaagttccatccaaggggaaggaacatagctcctacatcttgatggaggaaggtcagtatcacattgtaagagaagcacttgggataggatatgaattaggctatctttggaaagtacagattgcacatataccattcattaaaacctggagtattaagccttttaattttgaaacttctttctagtacattccagttactcccacagccatcccttgttattttccctcttgatactttaaaagttctcctagaatttgatgtctggtagtggaaaaaatgatgtaagaaagcagaagaaactgaataaaccaacacaaaccattttaactaactacaattcaatcctgctgccatcaagcgatgatttaaagactaaagttctagttcctctagcactgaaacatctccatgcgtatcttggaatcatgactcctgggatgtcatgatgatctcaggctagtggacagttgtctacaaaatccccaaatagcataccatttggttgaatgaaagacttactttccatgaaagtttttgatgtagtcaaactgccatggccatggtgtattacttgagaatcctcctcccagtgattctgaaatatgtggtaggtctccatcaacttgcttttctactatcttacatttatcacagctacatattttgaaagctaaatagaattatatgtattttgagaaataagacatcaccttcctttttcattctttgattcttctaaattcaaataaatatttattgagaaccccacaacatgccaggtccttgttaaatgcttgtgcatttaagggagagaacagcaagaaatgaaatctcaaatatgcctatacagcaggccttgcccccaaatcacttacagacttgtagaagacaggtaagaaaatcaacaagtaccatataagagtaaacagaccacctgtacctgtgtccctgatcagtctgtgcttatcattgcaccccagcacttgatatagggcctggcatacagtgaacacttgggaaaggtttgctaaagtgacgtgtcaaaggaattaaaaagcaagagttatggcatgggagacttcctggaggaagggacattgggtagggcgtgagctctgtccacccagttgtgggttggctatggatttcatatcagttagacttcaaatcttgtttgttgatatcttagatttgtaaaccaaaagctatctgagacaggtctcaatcaatttagaagttgattttgccaatgttaaggacagtacctgggagaaaaaaaacccacaaaatcacagaaatagtgtgtggtctgtgcctgtctccaaagatgacttggaggccttcaatatttaaaggagaaaagtgggctggaggggaaagcaggaaggtatggtcatccacatgttgcaagagaaaaggagcaggtaggggaacagtcaattatgtattcacctcgcactttacaaaagatcagctgaacatagartagctacctgtggggatatttaaccttttatctgtacatatctgcttaggaacaaaagcaaaggcagttgcttacatgactcagctttcagcttaattttttccttttggcaaagtgaattggggtcccatgtttttattttcctttcacagactatagttagttttgcactaactatagccagcatccctcccccattaacccactatgagacaagccttccagccttgctgcctgcttttggaagatcttgcctactgtgtatgccctactgggtatataagtttcctgagtattttgtttttttcccatttatagtggctctcatatttcatgtgctacacagcatcaggcaattagggggcaatgaagtctgtcagataaaggccaactgtaataaagaaagcctaatctatcaagctggtaatttgctgaatcacctctcctattcttttttgtgcctgttcaccataggattatgtaaacttgggccccctgggagtgaagcttatgagtgtggagagcaagaaaatgcccattcattttcaagagaaggaaattccagtcaaactctataaagatgtcaggagcccagaaagccacatcacatataagatgatgaagtcttttctctaagacggaaagctgcaaaggaaacacaacttttccttata

SEQ ID NO: 684876 - DNA, 1096 bp, Homo sapiens
tgggaaactgaggaaaggagctttcccsgtgccaaaacgcagttcccattttagaactggttagactaaggaacaacattctacaccacctccctcacttaacagaggaggaagcagagaccaagagagggaaacaaagttgcccgaggtaacacagcgagtgggccaagtagagactggaacccgagtgcgcacctccgagtcgctgccgggcagggagcgcgcctcgccgtctctcttgtcttctggcccccagccctcggcctggcggtgcaaaccgcgcagccccgggcgcggcgcgttaccttcccccgggcaaggcgttgcgagccttcactctcccgacggacgctggcggcacggcccgggtgtcgcccggcactgtcaacgcagagcggcgtgcgcgagtccctccccgctacccccgcccccggcgggcggtgcggtggggccggtcccgggtgctcgggccaatggcgcttcgcccgctccccgccccggcccgccccggcctcctcgcccggcacacagcgcctgccagcccctgccctctccccttccctcccttcgccctccgcccccgcctgctgcttctctccggttcctagcctccttctcaagtgtaccttgccccgaaacaacctgttttctgtgcaaataaagcagcactgttgttattgttattattatttttatcacggcgcgttagggggccttggagcccgagagtgtggagcactaggagcctctgcactccgagaagggacagccaccgcgcagggaaaggggcgcggagggtatggagcccggtcatggggtaacttgctttaaccctcgggacgtcaatttcctcacatgtgaaatagaagaaggggggaaaaaagttgttgagaggactaaatgaagtgatgctttaaaatacaataatacctagagaaaggtgagggcgtcatgcactgcctgagctacttactggggtatgcacagaggactggtaagctcctggaagacgctgtgtggcagggaggcagacaatgcaatacagtaaatacaatattgtggtcgggcgcggtggctcacacctgtaatcccagca

SEQ ID NO: 684877 - DNA, 1096 bp, Homo sapiens
tgggaaactgaggaaaggagctttccccgtgccaaaacgcagttcccattttagaactggttagactaaggaacaacattctacaccacctccctcacttaacagaggaggaagcagagaccaagagagggaaacaaagttgcccgaggtaacacagcgagtgggccaagtagagactggaacccgagtgcgcacctccgagtcgctgccgggcagggagcgcgcctcgccgtctctcttgtcttctggcccccagccctcggcctggcggtgcaaaccgcgcagccccgggcgcggcgcgttaccttcccccgggcaaggcgttgcgagccttcactctcccgacggacgctggcggcacggcccgggtgtcgcccggcactgtcaacgcagagcggcgtgcgcgagtccctccccgctacccccgcccccggcgggcggtgcggtggggccggtcccgggtgctcgggccaatggcgcttcgcccgctccccgccccggcccgccccggcctcctcgcccggcacacarcgcctgccagcccctgccctctccccttccctcccttcgccctccgcccccgcctgctgcttctctccggttcctagcctccttctcaagtgtaccttgccccgaaacaacctgttttctgtgcaaataaagcagcactgttgttattgttattattatttttatcacggcgcgttagggggccttggagcccgagagtgtggagcactaggagcctctgcactccgagaagggacagccaccgcgcagggaaaggggcgcggagggtatggagcccggtcatggggtaacttgctttaaccctcgggacgtcaatttcctcacatgtgaaatagaagaaggggggaaaaaagttgttgagaggactaaatgaagtgatgctttaaaatacaataatacctagagaaaggtgagggcgtcatgcactgcctgagctacttactggggtatgcacagaggactggtaagctcctggaagacgctgtgtggcagggaggcagacaatgcaatacagtaaatacaatattgtggtcgggcgcggtggctcacacctgtaatcccagca

SEQ ID NO: 684878 - DNA, 1096 bp, Homo sapiens
tgggaaactgaggaaaggagctttccccgtgccaaaacgcagttcccattttagaactggttagactaaggaacaacattctacaccacctccctcacttaacagaggaggaagcagagaccaagagagggaaacaaagttgcccgaggtaacacagcgagtgggccaagtagagactggaacccgagtgcgcacctccgagtcgctgccgggcagggagcgcgcctcgccgtctctcttgtcttctggcccccagccctcggcctggcggtgcaaaccgcgcagccccgggcgcggcgcgttaccttcccccgggcaaggcgttgcgagccttcactctcccgacggacgctggcggcacggcccgggtgtcgcccggcactgtcaacgcagagcggcgtgcgcgagtccctccccgctacccccgcccccggcgggcggtgcggtggggccggtcccgggtgctcgggccaatggcgcttcgcccgctccccgccccggcccgccccggcctcctcgcccggcacacagcgcctgccagcccctgccctctccccttccctcccttcgccctccgcccccgcctgctgcttctctccggttcctagcctccttctcaagtgtaccttgccccgaaacaacctgttttctgtgcaaataaagcagcactgttgttattgttattattatttttatcacggcgcgttagggggccttggagcccgagagtgtggagcactaggagcctctgcactccgagaagggacagccaccgcgcagggaaaggggcgcggagggtatggagyccggtcatggggtaacttgctttaaccctcgggacgtcaatttcctcacatgtgaaatagaagaaggggggaaaaaagttgttgagaggactaaatgaagtgatgctttaaaatacaataatacctagagaaaggtgagggcgtcatgcactgcctgagctacttactggggtatgcacagaggactggtaagctcctggaagacgctgtgtggcagggaggcagacaatgcaatacagtaaatacaatattgtggtcgggcgcggtggctcacacctgtaatcccagca

SEQ ID NO: 684879 - DNA, 651 bp, Homo sapiens
tgcatatatctatatttaagaaatacatactgatctatgatcacgttttaaatgtttcagggtggatgctggtgtggaagagcacrtaatgggaagtaggaatgaaagattaagccatattaaaataattatttttctttcaacaggtcaataaggcaattgtgctgtgacctgatgagttgattaccttagtactgtacagcagacacgcaaaagaaaaaaaaaggatatttatataagatagatgcaattcctttatgtttgatgaaataagcgctccaaggctattgttgtttaagtgcctatttaccctttgtattttcaacaaacattgatgatttcacaagccctggccctgattctcatcacacacacacacacacacacacacgcacacgcacatacacacacaccccctaataactacatacaaagtgttttggcatttttttctcaaaacattattaacatccagaatcaaaagtttagttgctgatgtaactataaatttgcatcttaatatagttttgttttttgtgggttctatattatttgtgagataaattgaaatggagtcatagactattttgctaattatatttgcaattttgtgacatagcagattatttattcaaaaatattaaatctcta

SEQ ID NO: 684880 - DNA, 910 bp, Homo sapiens
tcaagtgacatatcatcaatacatttatgtatattacttttgtgagtggaaccttttcaatttctcattttacatcttgtgtcagcatttaccccatataatttacatgctggaattattagtttctcaggagctgaatggcatttccttttctagtcatttagctccgtatctaaaaattttgctttttgagacttttcactaaatatctttaaaaaaggcatttctctgttacttttgagagtctaatggctgtataaagcaatcagatatttcacttgtcaaatgcagttttttatggctatttgtctctttaatattgctgaaataactgcttattttaaagctacttgccaggtatgacaccaggtggaatagacagtcttggattactggtcatgtaaatccatggatcaatcacttttcttgtaatggctgattttgcgtttgtgtgtcttgaagtgcccatgctgtgaaatgactcagaaaagtgttatctttcatcattaattttataagarttagttataggcctagaatgtttctctgatgttgtgcctcaccaccccacacccatatcactgttgcttgattcttcaaagagaaaataaattaattgcaataataaaaaattatgtttaaaaaatccagttcaaataattaaagacttctgaatggatatttttccaaaagtgaaataactgacattcttgtggcatctactgtaaattcagctaaaaagttaactattaagataaaatgaatttattttactattgtcgatatgaccacaatgttttataaaccacaatatagtgctaaaaacaatattttcctattcaataagaaattctagggaggggaggcagagcgagatagcagaatagaaagctccaccaatcatctccca

SEQ ID NO: 684881 - DNA, 910 bp, Homo sapiens
tcaagtgacatatcatcaatacatttatgtatattacttttgtgagtggaaccttttcaatttctcattttacatcttgtgtcagcatttaccccatataatttacatgctggaattattagtttctcaggagctgaatggcatttccttttctagtcatttagctccgtatctaaaaattttgctttttgagacttttcactaaatatctttaaaaaaggcatttctctgttacttttgagagtctaatggctgtataaagcaatcagatatttcacttgtcaaatgcagttttttatggctatttgtctctttaatattgctgaaataactgcttattttaaagctacttgccaggtatgacaccaggtggaatagacagtcttggattactggtcatgtaaatccatggatcaatcacttttcttgtaatggctgattttgcgtttgtgtgtcttgaagtgcccatgctgtgaaatgactcagaaaagtgttatctttcatcattaattttataagaattagttataggcctagaatgtttctctgatgttgtgcctcaccaccccacacccatatcactgttgcttgattcttcaaagagaaaataaattaattgcaataataaaaaattatgtttaaaaaatccagttcaaataattaaagacttctgaatggatatttttccaaaagtgaaataactgacattcttgtggcatctactgtaaattcagctaaaaagttaactattaagataaaatgaatttattttactattgtcgatatgaccacaatgttttataaaccacaatatagtgytaaaaacaatattttcctattcaataagaaattctagggaggggaggcagagcgagatagcagaatagaaagctccaccaatcatctccca

SEQ ID NO: 684882 - DNA, 1490 bp, Homo sapiens
aaaaaaaaaaaaaaaraaaaaaaaaagaattgtactgtgatattaggagcaaatagaggccactgaaagattttaaacagaagtttggcaaaaattggttttccatatgaaacataacataatacttgaggccaggagtttcagaccagcttgggcaacacagtgagacactgtgtacaaaaatcatttttaaaaaattagctgggcatggtggcacacacctgtaatcccagctacttgggaggctgaggtagaagaatcacttgagcccaggaagttgaggctgcaatgagctatgattctgtcaccgcactccagcctggagaacagagcaagaccctgtctcaaaacaaaacacatacgaaaagaaaataacaaaaaagaacataaaattgaattcccaacttacaccataaatgaaaataaacttcagatggacgaaagagagaataataagaaacaaacatactagctacaataatataagcttactatttatgagttaccattctacaggcatctcactgtattagctcatttaatcttcaaaacaactttaatgagttaaataattattctcatggtaatcaatgatatcacactgaagcatagaatagttaacaaatttgtccagattttagtggcaaagatgagatttgaactcaggtaattttatttccaagcctgagttcttaaaattctgctgtgggagatatttattatggctttattatgtatggtttagaactgaaatatgcaatgcacaaaagcacaaatcatagaggaaaacactgatctgtttgactccataaatttataaaatgtctttataaaggtttaagtgtatgcatcagtgtaagaagcaacatatctaaggacagcaatatctattttgtttacttccatattctcatttacctacaagtgtgcctgcccataatagggcctcattaatatatgttgaagggatggatggtggataaacagatagatgaatagcatgtaggtttactcacagccaacctaccaggcattgtactgatgacacaaaggtggatcagacagaccccccccgccaacccctctggaactcacagccttgtaggcgatgcaggcaacatttgtacatatgatggcaaggagttaaggggcttgcatccgaggcacttgaagttcgcaaggggggatgctgagatcagaggctgggagatcagttcagatgggccaatgaaggcttgaccagggcagaggaaatggggagaaaaaatgctaattttagacatcagtaggtggtgtaacaaagggatctggctactcataagatgtacagaattaggggcatagagatgaaaagacaactcttgggtctctggatagaagatgatgatattaatgaactacagatatagaaggagaaggttgaagagaggtaggcagtgatttcagattggactcagaatgtacatctttccatttctacaactagttat

SEQ ID NO: 684883 - DNA, 654 bp, Homo sapiens
ttcccacctatgagtgagaacatgcggtgtttggtttttttgtccttgcgatagtttgctgagaatgatggtttccagcttcatccatgtccctacaaaggacatgaactcatcattttttatggctgcatagtattccatggtgtataygtgccacattttcttaatccagtctatcattgttggacatttgggttggttccaagttaaaaaccttgaaaaaagtatgcctatgcatttcttatcggaattacaaattttaattaaatattatataaaacaatagaatgcatgtatgaaaagagttgccttttcttaaaaacaaaattgctttataaagtctatcaagtgtggctcactaaaaatgtcattagtgtaggtgtgggtgggacaactacaacacattatagagggtgttctgcaatcatatttcttcaaaaagtacttttcagtttttcctccactttcaagaatcccaagctagactcatggacaatgagttatgtgtgatttgtgggaatatcacaacgggaacccaatcagctaacccaccctcaaaagaaggtagcccagccaagcacagtggctcacacctataatcccagtgctttgggaggccgaggcaggaggatcacttaggctcaggagtttgag

SEQ ID NO: 684884 - DNA, 1524 bp, Homo sapiens
aattctgagttgatggtagttttttgttgttgtttagtttgtcttggcacttaaaagatattgtcctgctttcctctagtctccacagtgtctgataagaaatctgctgtcattagaattgtttctttcctacaattatcatgtcatttttttctgttttcttttaagaatttattatttgtatttaattttcagaatttcaatcacagcatatatcatttctttgggtttatcctttttagagtttgctcagtttcttgaatctgtgagtttgtgtatcttgacaaatgtagaaaattttaagcccttatttcttcatctactttttcagctatgccttctttcttctctccttctgagactccaaatgataactattttgttatagtctcacatgtccttaaggctctgttcattttttttttctcagtctattttctctattttctgatttggtaatttctattgttttatcttctggttcactgattcttttctgttattgagccatccactgagctttttatttcagattatattattcagatgaaataaatcaactttctaatccaatccctgcagtgtttatatgacttttttggggcctcttgttacgttgaaaacccctgttcataacagattagaattaggcttattattgcttaatcctaactaggttcctagactgccagtgcttatgtgaacattctaggatactgctaattctagttgacattaccttaacaaattctggggagtcatctttctgatagtggaacaaagatcctatttaattaaccacattgcctctaccttaaataagcccactttttctaatttgatcctctgtcaatcatcttcacaaaggtaaggaagatgaaggccagaaagggaaaggaggagaaagaaaggaaaaaacccttgtaaaacttggtagtactaagtcttctctcaataaaagcatctacttcctttaacctttacctggaacctctattacttgcactttttgctttttgatcttcttttcattaaacaagacaataacaagaagggcaacaacaacaaaatcatgggggtattacttgatctgaattacaatattagctcttaaactcaaaaacaaaatctgctgaagtatttatggaagtatgctctgtttgttatttagaccctctttgtaataatttcacttattaaacttccagtggggccatgttttattctttgattcgggagattgccggatcatcttttaggatcactaactaaagaaaatggaatagctccatatatatttgtctccttgaaaacatcagagtattaaggcaaatactgctgctgcctatagcccaagttgcccctgactcactgtagtatctctgggaaggtacttgccctcattttccttcagcatctctacctgcaaaacaaaaaaatattagaacytcccctacttcactggactgtggaagaaaagtagagcaaagtgtttcaatgttctgtgaaagacagatttgttca

SEQ ID NO: 684885 - DNA, 1524 bp, Homo sapiens
aattctgagttgatggtagttttttgttgttgtttagtttgtcttggcacttaaaagatattgtcctgctttcctctagtctccacagtgtctgataagaaatctgctgtcattagaattgtttctttcctacaattatcatgtcatttttttctgttttcttttaagaatttattatttgtatttaattttcagaatttcaatcacagcatatatcatttctttgggtttatcctttttagagtttgctcagtttcttgaatctgtgagtttgtgtatcttgacaaatgtagaaaattttaagcccttatttcttcatctactttttcagctatgccttctttcttctctccttctgagactccaaatgataactattttgttatagtctcacatgtccttaaggctctgttcattttttttttctcagtctattttctctattttctgatttggtaatttctattgttttatcttctggttcactgattcttttctgttattgagccatccactgagctttttatttcagattatattattcagatgaaataaatcaactttctaatccaatccctgcagtgtttatatgacttttttggggcctcttgttacgttgaaaacccctgttcataacagattagaattaggcttattattgcttaatcctaactaggttcctagactgccagtgcttatgtgaacattctaggatactgctaattctagttgacattaccttaacaaattctggggagtcatctttctgatagtggaacaaagatcctatttaattaaccacattgcctctaccttaaataagcccactttttctaatttgatcctctgtcaatcatcttcacaaaggtaaggaagatgaaggccagaaagggaaaggaggagaaagaaaggaaaaaacccttgtaaaacttggtagtactaagtcttctctcaataaaagcatctacttcctttaacctttacctggaacctctattacttgcactttttgctttttgatcttcttttcattaaacaagacaataacaagaagggcaacaacaacaaaatcatgggggtattacttgatctgaattacaatattagctcttaaactcaaaaacaaaatctgctgaagtatttatggaagtatgctctgtttgttatttagaccctctttgtaataatttcacttattaaacttccagtggggccatgttttattctttgattcgggagattgccggatcatcttttaggatcactaactaaagaaaatggaatagctccatatatatttgtctccttgaaaacatcagagtattaaggcaaatactgctgctgcctatagcccaagttgcccctgactcactgtagtatctctgggaaggtacttgccctcattttccttcagcatctctacctgcaaaacaaaaaaatattagaactwcccctacttcactggactgtggaagaaaagtagagcaaagtgtttcaatgttctgtgaaagacagatttgttca

SEQ ID NO: 684886 - DNA, 1861 bp, Homo sapiens
taattaaagtaattagtttcaaacgtgtatcttattaatctttatatacctcacagttactagcactcttttagtagactgaattacatgaaagtgctgatgtttgacagttctgacccttaaaatggaaattccacataatctaacataataatttgatgctgtcacagagccagtttggcagtgatttcaagccagggtcaaaatctggtaagtgtggacatgaaatcacttaaagtttgtattttattttgaaaattagagctcgggctggtaatctaaatttggtgaagtgtcatccatttcttaagasacataggctgcagctggtgagcatatatcagctttctaagtgcgtcctaaggagtctcgtttttaacttccttccttccttcctccctccctccctctctccctccctccctcccttccttcctccctccttccctccctccctcccttctttccttccttcctaaaggaatccaggtggtaaataattgataaatagatgtgctacgtaatcatgaataccactactcaggcataacaggaatattgtccctttttatctagaagaccagtaatattacttttcttttaactgacaagaggaatcattgcaaatagttattccaaattccaaatctttgcacaatttatgagaaataatacatgaaacaaatgttgttaagtaatctttacaatgtaagttagtaaggcaggataatttttaaaaacccactttcatcatgagatcatcagtcaatgcactgctttctagggcattaaaaatactgatacgtcaatttaaacagtattaacaattctaaaagagttaattttatttccaaagtgcctatctttagaataggttttatttaaatcaaattctttttcttctcttctgagataagattgaggaagactgatttaaatacatatatatttaatatataaaaataaatataaaatataaatatataaaaatatatttatattataatatatagtcaataaataaaggtgtgtatatatatatatatgtatatatatatatttgccttatttttactcagaaaagaaaaccacccaaggtgtgttggtttgtcttaatgtggtcactctaagtcaacataatctcatctaactttattttagcaattgaaatgaaatcagactcattcatctaaacaaatgcctgacatacagaacattggaattacatatagttgttactgatacctggtggaaccatgaaaaaatcgtgttatttctgtgttttccatctgtttaatgtcgttgataatatttgtaagataagaacatcttgaagacagaaacacgatcatacttctgttacttgtcttcgcctgaaacattctgcttggcattccctcaatttaagaatatgcatttggcccggcgcagtggctcaagcctgtaatcccagcactttgggaggccgaggcgggtggatcacctgaggccagaggtttgagaccagcctaaccaacatggagaaacctcatctctactaaaaatacaaaattagcctggtgtggtggtgcatgcctgtaatcccagctactcaggaggctgaggtgggagaatctcttgaacccaggaggtgaagtttgcagtgagccgagatggcgccattgcactccagcctggcgacagagagagactccatctcaaaaaaaaaagcatttatttctattttttctatttcttctgtatcttctgctttacgcatttaattccattacgactttaaaacttcatttctctctgctttgcttttgtcataagggtattgtagtgaacaaccttgcattgttcaaaattatgctgaata

SEQ ID NO: 684887 - DNA, 3245 bp, Homo sapiens
aatgtatactggaatttaaattattctctttcctaagtattttctgtttcctcaaggaatgtttttttcattaggttcttcctccccaccttctttctggggcataaggctggaagacaatagaggctcattttttaaaaagaaaaatagttgttttcaaaccttaagttgaccttactgctaatgaacaaacctagcttcccaggcttaccctgtgctcttgttatgaaccagtcagatggtttacttgctgatgctgagagcaagttctgccctctccagccttcttcactagcctaatagccctgaaacgcccttgtccttcctcccaatctgcttaagccctgaccacccttcagagtaaaccctctggcatgaagagcttcacgacaacacctagacccgaatatttttctctggcttatctaataacatgggtcatgggttagtttgctaatacagagagacaagactgaaaagaaaagcctgtgccagtgagtgaatttagtgatttaactccatctggagagaatttgttcaggctagaaactagggcctgaagccagtgaatgaaagatggaacacaaggttcccagagggcattccgctttcagtcaacctattttgctttctccttccactcagttacttccacctcagttccccacttgctctagtggcctctgtctcccccactctcctgaattaactgcagttaggaaatgatgacttytttgacagatacattggcaatatttctattctaacaattgtctactctagagacatcaataagggaaatcagagaaagtgccaaaataaaatttaaaaaagggtaagaggcagtgggaaatggaaaatgggaagcctcacttcaaaaagaagcccaaggtgttcctgctagatgagatacaccaaatccagtattctgccatcaaaatttgcttcataggagttggtttagcagtcaccttgagctctgctttcagagagctctctccattggttcctcctgttttcttggtcttccccagtatttatgtgtagagaaagctatagtccctcttccccagatgttttgatctgtatctgcctgaatcaaaattcacctgcccctcccttttttttttccccacttcctatggtctacccacttcaactctttatcacctgcaacattggaaatctcactgtatagttctttcttcagatcagtgtttagatgttggcaacaatgatgaagatagtatgattgaagaagacattttactttgtattgtgcatttattatggggcaggcaatgtgttaagtgtttgatcaactttatttaatcctcatagcactataggaggaaatgaaagcacagagaagtcatatagtttttcccatggtctcagagctggtggtggtagagctgagcatttaatgaccaagtccaatgctcttaaccatggtgttacaacaatagggctgctccaagaattgattttgggggatatctttctttttactattctcacttcagaaaagtgccagttttacccttcttgttttcttcttcttctaaaacaaaaacaaaaacaaaacaaaaaacaaaacccataattcagttttcttcacttcacatgagccttttaaattaaacatatatttttttagcagaccaagaaattttgtgtttgtggccttagataaatgccaggcataatttatccttgcaagaaaacgcactgccttcctccagtatttcttttcctttttaaaaaaaagttttggccaggcacagtggctcacgcctgtaatcccagcactttgggaggctgaggcgggcggatcacgaggtcaggagatcgagcccatcctagctaacacggtgaaaccccgtctctactaaaaatacaaaaaaaatagctgggcgtggtggcgggtgcctctagtcccagctactcgggaggctgaggcaggagaatggcgtgaacctaggtggtgagccgagatcgtgccactgcactccagcctgggcaacagagcgagattccgtctcaaaataaaaaataaaaaaaaaatttatggaatgcttcacgtatttgtgcgtcagggcccatgctaatctctgtatcgtttcagtttagtgtatgtgctgatgaagtgagcacagtatagtacatttttaaagagtttagtaattttttttaaaccgactctgccagattgctcagtataaaggtaatattaacctatatagaattatctggttatccagatgcctttgtcatgaataggaaacacatctgcaatttggtattgagacttaaattgcagcagatagaaatatgatctgttcccaacacaggcagggtctctgtaaggcaagagcaaatgactttggctcccacagcaggttctctgcataaacattcagggatctcctaatatgactcagtaacaaatcagaagagaaacaatgagaaagaataagaagggatgtttaactgcttaaaacctggaagcaaatatatatatatataaaaaagaaaacatattatgaataataataacaatgctgactactatgtattaagtgctgattaactgtcaggagctttgctaaacatattatgtgttaacttattaaatcctcacagtaacccaataggctgggaaatattatttcgtttccatttctcaaatgaggaaaccaaggcttcaagggcaatttgcctggctgggtgcagtgactcacgcctgtaatcccaacactttcgcaggtggatcacctgaggtcaggagtttgagaccagcctggcaagcatggtgaaaccccatctctactaaaaatacaaaaattagctgggcgtggtggcgcatacctgtaatcccagctactctggaggcttgaacccaggagaatcactggaacccaggaggcggagatagcagtgagccgagatcatgccactgcactccagcttgggtgacagagtgagaccctgtctcaaaaaaaaaaaaaaaaaaaagcaaagcaacttgcttaaggccacacaattagtaaagttagtaaaacaggtttcaaacccaggcagtctaactcaaaatactacacacttgatcacggcattactgtctctcagcaaaggtgattatatacattaatcaacactacatatgttgcatgtgttaagattcaatctcattccaattaccagtaggaagaaagggtccatggcatttcactgtgatggga

SEQ ID NO: 684888 - DNA, 590 bp, Homo sapiens
aataaataaataaataaaataaaaataaaaatcttagtagccttagccaaagctctttgtgcctggcattagtgtctactagcttatcagtttttgttctttatatatttgtgtgtcccttctgtctccagctacctagaatgtaagtttctcaagaaaagggatcttttggcttttattggttatttctttgtgtgtatatcttttgataatatctggttttgtgctctgaaatggataatattagatcttcagtagatgatagaaattgttcaataagagtgattattgagtatttttaaatattatatctctcagttcaatttgttatgaaactttatgcattggtttcaaacatacggaaatatggggagagtgagctcatccaccaaagggcaatttaattttttagaatctttagaatttatttattttaaaatttctcagtgactcttttgagcataaagttttaaaatatttgtcattcttcaaagtaaatgataatgaaattctatctgttttggacttgayctgctaagaaaagcattcaaagagaaaatttgactgcaaaaataaactattaagtagca

SEQ ID NO: 684889 - DNA, 1102 bp, Homo sapiens
gacgattatttgattcaatctcataactagaaaaactgttttttttcctggactatatgcctctaaaaatggaattctattaaatagttcctcagtggtcagaaaaactcatcactaaatgttttccctcactgctatgccttatgttgcataccctaaatygaatttgacaattagagtaaaatccttgttttgagtaacttaatcctactttcctgtcaccattgcagtctgagaccctgtattagaaatgcatcattccttttcatagcttctacatctttctacccaggacatttatttgattgcttctgtaatcaggaacatgtcattaacaatgtcctttggcatgctccgtctctgtactatttattaccagtcctatgtcagctttcttctccctaagaaggcaacagggccaaatcctttgtccttctcctatctctatctaatctttttctgatcaagcttgatttcatacctaaccaccacctatccctgaataaatgagactcactgtaaaatttatttgcttttaaatacatgtattattaccttgtcatacgatctactaatttcaaatatttttatttttagtttttaggaaaataataaaaatcagtagctccttagactgttcaccatggtaaaggtaaccaaattttatttaactacagccttgtgcctgccattgaaaaaaaattaactaaattttgtgattataaaattataaaagttatgtatccacatgttaatcaatacagaaacattgtattacctctttttaatccagaggaaacttgatttatgtagatccctgcagatatattctattaataatatttttgtattcacactatgtttcttttataaataaactaccattcatactgctctgctctttgttacttaacagtacatcataaaggtctttccatttcaagcacacagatacgcttcatctttgcaaagtctacgtggggtttcagtggatgcttctatcaatttacttacatagtacagggcagttccttgtttgcctgactccaaagctgatgaacataatacctagaaaaaccagtgtccactcattaaatttgac

SEQ ID NO: 684890 - DNA, 606 bp, Homo sapiens
gttcaaaaatgagcctggatatgtaaattgtagtgactttgtgaggggctcatcgtatcatgtcagttccctttacgccatcatgggaagaacggcatggtcagacttggactgtgggatggtaacaataaaggtagcttgtggaatagattcaaataaaggagagcctggaactgggaggagaggcatcattagaaaaatgttgcagtgattaatgaaagattagcttcttcaaatggtaatgacagtgggggttgaaatgagaacagcattagggaaaataaaaatctgagatcagagacacattttgtgcaaaawaaaaacaactgtctaatgtggaatgaaagaagaatccatcatcattttgagatttctaatttgagtaacttagtgggtggtagagccataatccagaagaggaagctcagatgtgtcagggaaacatactaaagcataaatattcattgaatttccattttctctctcttttcccttctttccccaatctctatgacagttgttgctgttatgattattaccatcatcatcactgtagacttagaaacctaattggcttttctaaattgggacatatttcatataaca

SEQ ID NO: 684891 - DNA, 623 bp, Homo sapiens
aaagcaaaccggccatttgttttccagccaatctgatttacgtgtaattcataacagagtaatgaggcttctcacttcatacccgtttccaagtctctgttcttgctgaaggacaaaagtatttctagaagaatatccaatatatattagcaaatttgcagaaaaaaagcaagtggttgaatattccacttttacttaatgaatacattaagtaaaaaatatattatctttattcctcttatattaatatatattatatataatgtgttacatattttatatatttcctattatttatataagcatatatatttcttatttgtataatatacacatatacagaaatatatatacacacatatttcttatttacataataaatatacrtgtgtatatgtatatatatatagagagagagaaagatgttgatatatgaaataatgattaacaatatttacctctgggtcactggattatggtgaaatcaagatttttacctgaatttttgttacatgtatgcattattttacaatcaagatataatgcacttataaaaataaaaatcaaactcagataccacatgctcacaaataatgcattctttttcaatactgtcgtgcatg

SEQ ID NO: 684892 - DNA, 623 bp, Homo sapiens
aaagcaaaccggccatttgttttccagccaatctgatttacgtgtaattcataacagagtaatgaggcttctcacttcatacccgtttccaagtctctgttcttgctgaaggacaaaagtatttctagaagaatatccaatatatattagcaaatttgcagaaaaaaagcaagtggttgaatattccacttttacttaatgaatacattaagtaaaaaatatattatctttattcctcttatattaatatatattatatataatgtgttacatattttatatatttcctattatttatataagcatatatatttcttatttgtataatatacacatatacagaaatatatatacacacatatttcttatttacataataaatatacgtgtgtatatgtatatatatatakagagagagaaagatgttgatatatgaaataatgattaacaatatttacctctgggtcactggattatggtgaaatcaagatttttacctgaatttttgttacatgtatgcattattttacaatcaagatataatgcacttataaaaataaaaatcaaactcagataccacatgctcacaaataatgcattctttttcaatactgtcgtgcatg

SEQ ID NO: 684893 - DNA, 623 bp, Homo sapiens
aaagcaaaccggccatttgttttccagccaatctgatttacgtgtaattcataacagagtaatgaggcttctcacttcatacccgtttccaagtctctgttcttgctgaaggacaaaagtatttctagaagaatatccaatatatattagcaaatttgcagaaaaaaagcaagtggttgaatattccacttttacttaatgaatacattaagtaaaaaatatattatctttattcctcttatattaatatatattatatataatgtgttacatattttatatatttcctattatttatataagcatatatatttcttatttgtataatatacacatatacagaaatatatatacacacatatttcttatttacataataaatatacgtgtgtatatgtatatatatatagagagagagaaagatgttgatatatgaaataatgattaacaatatttacctctgggtcactggattatggtgaaatcaagatttttacctgaatttttgttacaygtatgcattattttacaatcaagatataatgcacttataaaaataaaaatcaaactcagataccacatgctcacaaataatgcattctttttcaatactgtcgtgcatg

SEQ ID NO: 684894 - DNA, 622 bp, Homo sapiens
ttctcaccaagtcaggatgcacaagatccaggaaccacttaacaaagcactctggttgctccttggtgtagggggtgtgctgcacagggggagattccatacatctgtactgcccagattcctcagagccagcagagggaaagactaagtctactgatctacaggaaccacctcactgttactgttttatgtgtttcttgcagacatgttttttctcattacctgttttactatcataatttttgtttaactttgttgtgacatgstgtgatttttaaaattttgttttgcatacttcctataatataatgtaatcatcttgaagtatattgtaaccatcttgaaaactggagattatataaaacaccttaaagttaaaacagtatcttttaatctcataataacattaattaaatacaaaagctatactgctatattttccagtttgttataggtattacaaattatgttatcttattttgtatctattaacagatttgtgcagatttatgttttttttatatctatagaagaacttcaaaggttttatgtaccatcattatgacagtaaaacattctatgtgtgtctttatatttatatttaatagagtgctttatttta

SEQ ID NO: 684895 - DNA, 1540 bp, Homo sapiens
cacaaacgtgtatatacacacacatatatacacacatatataatactaaaaaagaaaaagaaatataaacaaaagaaagcaaaacaaaatagaaagtgtaacaaatatgatgaaaaacaaagataagcatttatcctatcgagagacttaaataggctaaactcagaaaggatcagaggacaaatctcaaccttatgagcgaacgtaggagtaaacctaagacacagtgagtcacacggcgttcccgtccacgaggcacgggtgcctcaccaccagcatgctggtgggtgatctagctcccaaatccaactttagaatctactttctcaaactccttttgcaggtcagattctccaggaagtgaatgctgaggtagagatttgtatgcaggaaattctgacgcgagggcccacgggatyggcacctgtggggaagtgaaggcagcagggcagagagagaaggatctgcagcacagttaccgcggaggcttcggctgtggagctgggctgggccctcagagctgtatcctacgggggcacgggacaaaggctttgtacccatgcattgaccagtcattggggagggagagaaggtgaccacggggtccagttgtcttcaggcaaggacatttcccagaggtattgtcttccagaggctggaggacgagtgctgagttctgggggggatcttctggctggtgtgccacagctccactacatcttgttctgagaatttaaatggcttgtatttttcttctagtgatcacctttataattataatttcatataatctacttaattccattccttcagaccaacactgtctaacacgaatgtgatagaatttaacattttctagtaaccacattaaaaaggtaaaaagacacaagtaaaattaattgtaatatgttatttaatacaaatatctgtaaagtattatctttcccatgtgtaatcaatataaaattattgagatatttacactctgttttccatactgctttcaatctctggtgtgtgtttcacacttataggacatcacaattcaaattagccacattttacttgcccgcgaaccacatgtggctacaagactgcacagcacagctttagatgctgacactgtttctatctattgactctagtgtttaaaaaaaatgacattaggatacttctgctttgccctattccccctctcctacataacagaatcctagttaattacattgattttcttcctgtttaacattatgctcttaaatatacttacatttctattattggaataatccatttaaaataatttttttgatggggaatgtgtataactgtaccacttcctattatctctgctcccctcactttttgttaaccataccctttctagtttcaagatttataacatctacatttgtagccactcttcttagatttgatttaatgccagtcctcaaggtgaatggactcagctctcagcatcagttctcttgctgtggcttctccattttctctcagttggctgaaagtcattcttaaatag

SEQ ID NO: 684896 - DNA, 1540 bp, Homo sapiens
cacaaacgtgtatatacacacacatatatacacacatatataatactaaaaaagaaaaagaaatataaacaaaagaaagcaaaacaaaatagaaagtgtaacaaatatgatgaaaaacaaagataagcatttatcctatcgagagacttaaataggctaaactcagaaaggatcagaggacaaatctcaaccttatgagcgaacgtaggagtaaacctaagacacagtgagtcacacggcgttcccgtccacgaggcacgggtgcctcaccaccagcatgctggtgggtgatctagctcccaaatccaactttagaatctactttctcaaactccttttgcaggtcagattctccaggaagtgaatgctgaggtagagatttgtatgcaggaaattctgacgcgagggcccacgggatcggcacctgtggggaagtgaaggcagcagggcagagagagaaggatctgcagcacagttaccgcggaggcttcggctgtggagctgggctgggccctcagagctgtatcctacgggggcacgggacaaaggctttgtacccatgcattgaccagtcattggggagggagagaaggtgaccacggggtccagttgtcttcaggcaaggacatttcccagaggtattgtcttccagaggctggaggacgagtgctgagttctgggggggatcttctggctggtgtgccacagctccactacatcttgttctgagaatttaaatggcttgtatttttcttctagtgatcacctttataattayaatttcatataatctacttaattccattccttcagaccaacactgtctaacacgaatgtgatagaatttaacattttctagtaaccacattaaaaaggtaaaaagacacaagtaaaattaattgtaatatgttatttaatacaaatatctgtaaagtattatctttcccatgtgtaatcaatataaaattattgagatatttacactctgttttccatactgctttcaatctctggtgtgtgtttcacacttataggacatcacaattcaaattagccacattttacttgcccgcgaaccacatgtggctacaagactgcacagcacagctttagatgctgacactgtttctatctattgactctagtgtttaaaaaaaatgacattaggatacttctgctttgccctattccccctctcctacataacagaatcctagttaattacattgattttcttcctgtttaacattatgctcttaaatatacttacatttctattattggaataatccatttaaaataatttttttgatggggaatgtgtataactgtaccacttcctattatctctgctcccctcactttttgttaaccataccctttctagtttcaagatttataacatctacatttgtagccactcttcttagatttgatttaatgccagtcctcaaggtgaatggactcagctctcagcatcagttctcttgctgtggcttctccattttctctcagttggctgaaagtcattcttaaatag

SEQ ID NO: 684897 - DNA, 2862 bp, Homo sapiens
tatggatacggcagaagaaaacatgaggatttcacagatttaaggtacaaaaagtcactgggttctctaagaagtctgggattcttctgctggaaaaataagtttgttgagaaaaaatgagttggaggaagctgttattgaagtcaagcagaattgtttttactaatctgcttattacccactctgtagtgtggaaacaaattattcatgcacaaggtcctcttactgttcctagaatgcagtggaaagagaacagattagttttcctccctcagaacacaatccctagaaacaacctacctcagatgagatattgcctaattattttcaaaagacagtgaaacatcatggatgtaaatgtttgctgcaaaataaatacatgctagaaacagaagcatctgggtcacagctatattagagctacctgtgttcccctgtcactgacattaaaacaaaaatgtccaatacaatcattcacagcgtgggagaggggaagttgaaggatggaaaggccaggcataaaaggatttcagaatttccgtccataaggaagtagctttgtgcactgtctgttactgtgtgcaaggtgaaatttgaagaatgaaaacgtgcagtaacaagggctcctttgtccaactcacctctccagataccaagtttcagacatgttgcattttaattgaaaggttgatataattttttttaaagaacacttgcggtgtttgaagtgacaaaggctgctgtgacaaaaaagcagggaaagggaatttttttttaaaagcaaacaacaacaacaaaaaccccacagaaaagcaaacaacaaacaaacaaaaaacagaggaagaagtcgaacaccctgggctgtgactacttccaggaaggggctacaagaggcagttggaaattctatttgttttgcaactgtgggttttccggcccgcttcctttctaaagtatattactctgcttttggttcatgaagttatccatttctgttttctggaacagctatgtattttctttatctatcatctatctatctatttaccatctatcttttctacctttcgctatcaagagcttgggtcaagcaggatagaattccagtgtatgttcactctaccatttaaaacaagagctcttgtaggcattctccatcacatcataaacctgagctttctaaaacagggtgtggcaaactaccatgcatggaccatgtctgacacagtctgcgtttgtaagtaaagttgtaatgggacacagccaatacatgtgttacataatgtctctggctattttcatggtataatggaagagctgagtcattgagagagagaccatatggcttggaaaacttaaaatatttaacatttagccccttgcagaaaatacttgctgactcttgtttaaaagatctctgtttagaatgctacctattgagttctggatagaatcacaactctttaccacaatcaacaccgcttcagccctgcttctatatccagcctcatctatttctgctcctcctcattttccttctggccatgctgatggattgtcagcttcccagatgtgtgagaatctctcctcccttcctaacattctcatgctctccctctgcctctcaagaacttcctgccccatctctcatgacaaatcctttctacattctttaagatgcagcccttttgctccttccttaaggatgtcttgtctggctctattttgggtgacgtgctccttctgcatctcccagagccagcctgtgtgtgtcagctacaacatttctttgcatctctgtgtcatatatcaccaaatctgcctaagcttgcatgagtcactgcatgacaacttcagactccaccagcattgtccccactaaccacaaggcttagacattcgtccagtatgctcggggttgtggggtggtagcagtaactggctggtgaccatcatttcttacatcagaatcaaatctgtagatctctgccattcataagtatttggagtttaaaattagcataaagattttccttaaaataagaagaaaggccttgagtaggcttttggaacataggatgtttccactggttcatttctgtgttcaatattcccacatgaatctgaacacgactctgctcttagtagctatgtgaccctgggaaagtcactcaatctccctcagctaaattttgttgtgtgagtaatgaggagagagttgtgatttgtatttagtgaataataacaaacaaaaggcatttagctttctggaacctggtatgtagtagaacctcatgaaatactagctctgttgataaaactagactgaaagaagctttcaaagtcaacaacagtttgaggcagtgaaggacgtagaggagaagctgctgctgcagyctgtagctcctggaagcccgttttgtccatgatttagcaggaatgcattacccttccatgaggaggcacagcccacagaaaccaaggccattctttgaagaaaaacatgtcttaatagggtttacattatgtaacagtgtaatacaaataataatttattattagtaataatataaaattatttacagtaccgtaaccctaactctaacccctaatcctaaccctaacccctaaccctaatcctaacccaaaccctaaccctaacccaaccctaaccctaacccaaccctaacccaaacctgaccctagcccctaaacctaaccctaacccctaactcctaaccctaacccctaaccctaaccctaaccttaacccctaacccctatccctaaccctaacccctaaccccataaccccaagcctaagacccaaccccaagccccaacccctgaccctgaccctga

SEQ ID NO: 684898 - DNA, 603 bp, Homo sapiens
cagggaggcccgccagaggagccgagaggtttggacaaagtacaccccacccccagcccgccgccggctaggtacccctgacgcaacctcccctgcacccagccaaaacccagtcccgttggctccctgacatccgtggcagccaaaagattcggtgctagaaggcactttccccaggagcggaggaaccggttggccctcaagaatcagagaggaagtgcaggtgggatgcaacaccgcctttcctagaaggccaatgtcaggagcggtgggcttgcctccgcctcttcctggaccgagcgtgcagccatcacttgggccatggagaccgagagagcttccctgtcccacacaggtatggaagcccagagctccaggatcaccacagctgcccagtcatccagaaagaggtgtggagagggaaacaatcatgacgcggaccgccacgaggtttctccctgatggacggggaagtcttstttgtggaagacactgagccacgctaagaagccgccaggcttctcagagacggggcagacacagcaagagggaggtcagagcagaggccagagcccaggcaggatacgggggggccatgccacc

SEQ ID NO: 684899 - DNA, 1602 bp, Homo sapiens
caaaacccagtcccgttggctccctgacatccgtggcagccaaaagattcggtgctagaaggcactttccccaggagcggaggaaccggttggccctcaagaatcagagaggaagtgcaggtggatgcaacaccgcctttcctagaaggccaatgtcaggagcggtgggcttgcctccgcctcttcctggaccgagcgtgcagccatcacttgggccatggagaccgagagagcttccctgtcccacacaggtatggaagcccagagctccaggatcaccacagctgcccaatcatccagaaagaggtgtggagagggaaacaatcatgacgcggaccgccacgaggtttctccctgatggacggggaagtcttgtttgtggaagacactgagccacgctaagaagccgccaggcttctcagagacggggcagacacagcaagagggaggtcagagcagaggccagagcacaggcaggatacggggggaccatgccaccaccaccggcatccggggaggactgtcaaacgggtgactcggccaggaaggccagcctttgagagacagacatgcttgccgccccatccccttgccggcttccttctccgtccctgcgtcgagctgtggctacatttctcgatgagggcagagggcgacaggcgtgacaaccaccttcttgaagctctgcgggcaccctcctgcgggtggacaatgagcgcctgggaggccgttgtccttggttggggagcgctcgtctggatccagcctagcaaagaggctgctccggatggggaggggatgaaaaccctgcgggtccgacgcccatgcccacgttgcccaggccttcacagacccccaaactggaaccgccgggacgacgactgccaaccggccacacgactcaggcwgagacgcggggagacgctgaccagaagaaaggccgacgtgcaagaaacccaccctccggcgcacagggcccatgtgtcccaaggcgcacgcacacacagacggacagagacagaaagagagggcgaccgaaagagcgagaagggagagagagagagagagagagagagagagagagagagagagagagagagaggtaagagagagacagaagtcggcacacagacacgcactgcgcgcgcacacacacagacacacacacagacgcatccccccaacacacacacacacacccataacgaacacacacgtacagcagggaacacccacccgcagcagcccctgaagctgccgggttctgctctccgcgactaagagccaccggtgagagagcagcccacgggcacacaggcggacctgtgctcgtcatcacaagggctccacttttggggagactcacccgcacaccgtccgcgcacgcctgaggctgggatgccgcgctgcctcgccggcgatctgtctgagttttcttcctcctggggtttcttcctgctggtggaccctccgcgaatcccggcctccggagaccgtcctggtaactgccctggccaggactggtctcagcccagactcagacgcacgatcacacagggctcctacttcgccaagtgtcagggacccatccccgggcaacgg

SEQ ID NO: 684900 - DNA, 1602 bp, Homo sapiens
caaaacccagtcccgttggctccctgacatccgtggcagccaaaagattcggtgctagaaggcactttccccaggagcggaggaaccggttggccctcaagaatcagagaggaagtgcaggtggatgcaacaccgcctttcctagaaggccaatgtcaggagcggtgggcttgcctccgcctcttcctggaccgagcgtgcagccatcacttgggccatggagaccgagagagcttccctgtcccacacaggtatggaagcccagagctccaggatcaccacagctgcccaatcatccagaaagaggtgtggagagggaaacaatcatgacgcggaccgccacgaggtttctccctgatggacggggaagtcttgtttgtggaagacactgagccacgctaagaagccgccaggcttctcagagacggggcagacacagcaagagggaggtcagagcagaggccagagcacaggcaggatacggggggaccatgccaccaccaccggcatccggggaggactgtcaaacgggtgactcggccaggaaggccagcctttgagagacagacatgcttgccgccccatccccttgccggcttccttctccgtccctgcgtcgagctgtggctacatttctcgatgagggcagagggcgacaggcgtgacaaccaccttcttgaagctctgcgggcaccctcctgcgggtggacaatgagcgcctgggaggccgttgtccttggttggggagcgctcgtctggatccagcctagcaaagaggctgctccggatggggaggggatgaaaaccctgcgggtccgacgcccatgcccacgttgcccaggccttcacagacccccaaactggaaccgccgggacgacgactgccaaccggccacacgactcaggcagagacgcggggagacgctgaccagaagaaaggccgacgtgcaagaaacccaccctccggcgcacagggcccatgtgtcccaaggcgcacgcacacacagacggacagagacagaaagagagggcgaccgaaagagcgagaagggagagagagagagagagagagagagagagagagagagagagagagagagasgtaagagagagacagaagtcggcacacagacacgcactgcgcgcgcacacacacagacacacacacagacgcatccccccaacacacacacacacacccataacgaacacacacgtacagcagggaacacccacccgcagcagcccctgaagctgccgggttctgctctccgcgactaagagccaccggtgagagagcagcccacgggcacacaggcggacctgtgctcgtcatcacaagggctccacttttggggagactcacccgcacaccgtccgcgcacgcctgaggctgggatgccgcgctgcctcgccggcgatctgtctgagttttcttcctcctggggtttcttcctgctggtggaccctccgcgaatcccggcctccggagaccgtcctggtaactgccctggccaggactggtctcagcccagactcagacgcacgatcacacagggctcctacttcgccaagtgtcagggacccatccccgggcaacgg

SEQ ID NO: 684901 - DNA, 2187 bp, Homo sapiens
ttccgggagtttgcctcaagccaatcttgttctccctgaaaacggccttggggttccccatcctggtacaccctcctactctaggggacacagggccgatgttgcccccaaaccggcagtcccaggagcgcatcgcttctccctgaactgcttctgccccaacctggcatctgcttggggaagggcaccccagggtggagacttgcatggtgagctcagctcaccttcaggtgaaggtcagcgcacactggccacccgggaccacattttccagaatcctttggcggtcccgcgatgctctcgtggtcagcagctctcattgggttgcagaggagaaacttgtccgtgtcactggggcatcttaacagtcggctcctaagcttggttgtgtgcgctgtgcagatgtgagaggcacaccgtgtgggcgaacccaactgcttgcctgcctctctagctccaaaactacaatccccagaggcctctgcggtcacttccactacccaccctacacaccttctgtgtgtcgcgttaatgtcagaagcacttctgtttggtggccccggctggttaggctggttggcacccagggaggcacccaggtcttccccacacctctgcacctcattacctgaccggcttctggatccgcagcgtgcatctgcagtctgtgagtcccctataggcactcagtatgcccctctgcgtgtccctctgttactcatggggacacagtctgggagccgtagacctgtctcagaactagggcgccctcctgtgggcacctccaggccattttcctttcactggagcccaccgggttagagacagaccctcactctgttgcttggggacaaaggcttcactccctggcccgagcttggggctgagctagagggttcggggtcatcctgggcccctctggatgggaattggctgccctgttaatttctgtgacatccccgaccctaacagtgggtctctggagcagactgcgcttcaccccatgggaagggggtttccacctgagagtcaaaaaagaggtgagaattctctgtaattccatcttgactgtcaacaggatggattctgttaccatttcttgccctggaggctgccttgttggtattggggaaagttcattcctagtcctggaaaagtggctcattccaactggagtcctccctcagcattcctttctgctgcatccatcctgcagtcattcatgttgttaattgtaaacaaacacacatggaacagtttaaataaaactacacagatgtgtgtgcttaattgttcagtgatgtggatgaagggcagggacagcaragatgcctgtgatttcaagggcttggggaggactcgtacaagtagagctgtctcagctgcccctgaccggtttggtaccttggagattcgggggaaggcattgcactcggaggcagaaggaagcatagtctgaggctgggctcttgctacagggtaggaaggattatggtggccaagagccttcttaaggttgatttttaaatatgcataggtgaagatacagactagctgttcacacatagaataaggagaagctttatagagtgtgacctaaattttacatcacagaacactttcaccttccggcagttgggacatttcacccaaaatttgaaattccctcctactctgaaaatgaatctggcctaactctgcactgatgaattttttttttttttttgagacagttttgtgcttgttacccaggctagagtgcagtggtgcaatctacactcaccgcaacctctgccacacgggttcaaccgattctcctgcctcagcctcccaaatagctgggatttacaggcatatgccaccacaccgcgctaactgtctggtacttttttttagtagacgcggagtttcatcatgttggttaggctggtgtgatcccctgacctcaagtgatccatccgcctcagcctcccaaattgctgggattaaagatgtgagacacctcactttgccagtatgcattgttcttagtgtcagccgctgaaactgctacttctgcgttacgcgactacgagccaccggtgagagagcagcccacgggcacacaggcggacctgtgctcgtcatcacaagggctccacttttggggagactcacccgcacaccgtccgcgcacgcctgaggctg

SEQ ID NO: 684902 - DNA, 2187 bp, Homo sapiens
ttccgggagtttgcctcaagccaatcttgttctccctgaaaacggccttggggttccccatcctggtacaccctcctactctaggggacacagggccgatgttgcccccaaaccggcagtcccaggagcgcatcgcttctccctgaactgcttctgccccaacctggcatctgcttggggaagggcaccccagggtggagacttgcatggtgagctcagctcaccttcaggtgaaggtcagcgcacactggccacccgggaccacattttccagaatcctttggcggtcccgcgatgctctcgtggtcagcagctctcattgggttgcagaggagaaacttgtccgtgtcactggggcatcttaacagtcggctcctaagcttggttgtgtgcgctgtgcagatgtgagaggcacaccgtgtgggcgaacccaactgcttgcctgcctctctagctccaaaactacaatccccagaggcctctgcggtcacttccactacccaccctacacaccttctgtgtgtcgcgttaatgtcagaagcacttctgtttggtggccccggctggttaggctggttggcacccagggaggcacccaggtcttccccacacctctgcacctcattacctgaccggcttctggatccgcagcgtgcatctgcagtctgtgagtcccctataggcactcagtatgcccctctgcgtgtccctctgttactcatggggacacagtctgggagccgtagacctgtctcagaactagggcgccctcctgtgggcacctccaggccattttcctttcactggagcccaccgggttagagacagaccctcactctgttgcttggggacaaaggcttcactccctggcccgagcttggggctgagctagagggttcggggtcatcctgggcccctctggatgggaattggctgccctgttaatttctgtgacatccccgaccctaacagtgggtctctggagcagactgcgcttcaccccatgggaagggggtttccacctgagagtcaaaaaagaggtgagaattctctgtaattccatcttgactgtcaacaggatggattctgttaccatttcttgccctggaggctgccttgttggtattggggaaagttcattcctagtcctggaaaagtggctcattccaactggagtcctccctcagcattcctttctgctgcatccatcctgcagtcattcatgttgttaattgtaaacaaacacacatggaacagtttaaataaaactacacagatgtgtgtgcttaattgttcagtgatgtggatgaagggcagggacagcagaratgcctgtgatttcaagggcttggggaggactcgtacaagtagagctgtctcagctgcccctgaccggtttggtaccttggagattcgggggaaggcattgcactcggaggcagaaggaagcatagtctgaggctgggctcttgctacagggtaggaaggattatggtggccaagagccttcttaaggttgatttttaaatatgcataggtgaagatacagactagctgttcacacatagaataaggagaagctttatagagtgtgacctaaattttacatcacagaacactttcaccttccggcagttgggacatttcacccaaaatttgaaattccctcctactctgaaaatgaatctggcctaactctgcactgatgaattttttttttttttttgagacagttttgtgcttgttacccaggctagagtgcagtggtgcaatctacactcaccgcaacctctgccacacgggttcaaccgattctcctgcctcagcctcccaaatagctgggatttacaggcatatgccaccacaccgcgctaactgtctggtacttttttttagtagacgcggagtttcatcatgttggttaggctggtgtgatcccctgacctcaagtgatccatccgcctcagcctcccaaattgctgggattaaagatgtgagacacctcactttgccagtatgcattgttcttagtgtcagccgctgaaactgctacttctgcgttacgcgactacgagccaccggtgagagagcagcccacgggcacacaggcggacctgtgctcgtcatcacaagggctccacttttggggagactcacccgcacaccgtccgcgcacgcctgaggctg

SEQ ID NO: 684903 - DNA, 1328 bp, Homo sapiens
taaaaaccaaagctataatatggcccataaagtcatttaaaaaacaactataatttatcatctgttatttagcctacttgaggaagatattccattatctagttaaaaaaaaaaaaaaaaagcaggccgggcacagtggctcacacctgtaatcccagcactctggggaggccaaggcgggcggatcacaaggtcaggagatcgagaccatcctggctaacacagtgaaaccccatctttactaaaaatatcaaaaattagccgggcatggtggtgggcgcctgtagtcctagctactcgggaggctaaggcaggagaatggcgtgaacccaggaggcagaggttgcagtgagccaagatcgtgccaatgcactccaacctgggcgacagaccgagactccatctcaaaaaaaaaacaaaaaaaaaagcagtcaagtaaattaatttttctgggaagatacatgctactaatatgctttaacatttttttgccttcatttaatccaacacttattccctatttagagataacattacaattcagagaattataaaaatattggtgctggggaagactttaaaaaattctttaagtcacctccagaagaaaaatctaaggcctagagaggttaaggaatttgtccaccacagttcacagtgaaaccctaatggttccaagtctaatgatctatcacaaaatattataatttactgactagaaaatttgattttacttttttagaaaaaggaagaaaagattcatggcacaaaaaatatgtaatttagtgttttgctgattttttaattaaaaaattttctaaactcacaaattccaaatctaaagtaaatctgaagcagctcaaatatagtaaacagtcttagcaaaactggtggtattctcacatataattttaaagccataaagtcaaatagcaataacctgtggagtttctctttttaaaaactgatcaaccaatatttatccattttactgaatagatttctgtaaagatttcaaaaattaatgattaacacttaaaatgatttttttaaaaaaggatatttatttcatgtataaactgaactgaaaagattgatgacaatcactgcagaacaccttaccgtaatattgagaagagaaaaacactctggattttcagggtccccacaccttaaatctgacatgtaatcttcagcagaattttccaattcctcatggctgcaattttccagcatatccacagggaatgccatcctctttaacaaacaacatggaacaaacaattcagaataygaaacgccatcttcctttactcacagaaaataaa

SEQ ID NO: 684904 - DNA, 619 bp, Homo sapiens
aaatataaccatgggctgccattatatagcagagtatctcagcaatttggaaaaatggcagcccctgaaccacaggctctccaattctgtgcttttgggcctctccaactctgcacttggagctatggcctcattaacctgcttgtgctactctcttgcaaactcaggtgggcttatttacccagattcagtacaattcttacctctcattggcagcaggcccatgggaagaaggyacaagagacagtagtcttatctaacttcaaagcatatttactaaataaatgaatgactgaataaaagtttgtataaataaaccaaacactggtgctaggaggaagagctgccacagatgaacaagaacatgctgctagataaaaagtaacagatgtcctttcaagaggcagatagtggggaagaccctcaaaaagaatatgctgaatggatgactgaaagtacaccgagaacggcaagtagttggatttaccaagagagttaaggtatataacggcaaatggtggtggaagtactaggaaaataaattaaggacagaacatagcaggccaagaatcccagattaaagaatttagacttcacttggtatacaagcagcaggcca

SEQ ID NO: 684905 - DNA, 593 bp, Homo sapiens
tctccggtgcaagacacagagggatgctgggcgtctgtagtgcaagacacagagggatgctgggcgtctstagtgcaagtcacagagggatgctgggcatctctagtgcaagactgtgttaattctctctctaaccacacccaacttccactctataaaagtggcctgaggataaaggtcccacctggctcacactttatggcagcaaatacaatgtcactaaggaatcaatgactagtaaagcctgtgagatgggccagtggaggaacggtaacatttatcaaatcagtttgtaaaaactactttatttgcccaaactaaacaacgggggaatttgtaaacaaatagattggaggctcaagtggtgacaagagtgcgaatgctcttggcggccatcgtgaatggtgcagcccctccagagactgccaaaaggcaactccaaaatacacatgtccaaggtgtcacctaggtgcatgaaaccaggttttgcattgactgtgtgggttttctccatcgtagccttttaaaagactgtctgagacctctgaatgtctttctaatgagcgtccatattaattttaataaatcagtaa

SEQ ID NO: 684906 - DNA, 593 bp, Homo sapiens
tctccggtgcaagacacagagggatgctgggcgtctgtagtgcaagacacagagggatgctgggcgtctctagtgcaagtcacagagggatgctgggcatctctagtgcaagactgtgttaattctctctctaaccacacccaacttccactctataaaagtggcctgaggataaaggtcccacctggctcacactttatggcagcaaatacaatgtcactaaggaatcaatgactagtaaagcctgtgagatgggccagtggaggaacggtaacatttatcaaatcagtttgtaaaaactactttatttgcccaaactaaacaacgggggaatttgtaaacaaatagattggaggctcaagtggtgacaagagtgcraatgctcttggcggccatcgtgaatggtgcagcccctccagagactgccaaaaggcaactccaaaatacacatgtccaaggtgtcacctaggtgcatgaaaccaggttttgcattgactgtgtgggttttctccatcgtagccttttaaaagactgtctgagacctctgaatgtctttctaatgagcgtccatattaattttaataaatcagtaa

SEQ ID NO: 684907 - DNA, 593 bp, Homo sapiens
tctccggtgcaagacacagagggatgctgggcgtctgtagtgcaagacacagagggatgctgggcgtctctagtgcaagtcacagagggatgctgggcatctctagtgcaagactgtgttaattctctctctaaccacacccaacttccactctataaaagtggcctgaggataaaggtcccacctggctcacactttatggcagcaaatacaatgtcactaaggaatcaatgactagtaaagcctgtgagatgggccagtggaggaacggtaacatttatcaaatcagtttgtaaaaactactttatttgcccaaactaaacaacgggggaatttgtaaacaaatagattggaggctcaagtggtgacaagagtgcgaatrctcttggcggccatcgtgaatggtgcagcccctccagagactgccaaaaggcaactccaaaatacacatgtccaaggtgtcacctaggtgcatgaaaccaggttttgcattgactgtgtgggttttctccatcgtagccttttaaaagactgtctgagacctctgaatgtctttctaatgagcgtccatattaattttaataaatcagtaa

SEQ ID NO: 684908 - DNA, 575 bp, Homo sapiens
gtataatatatggccggatcaggcaggtctgtatatacagagaagagtctctaagctacagagacaaggttcaggacagtaggtacaagaggtcaccatttgtgtaaaagagtgtagagggtgaatctctttgctgaatgaatgaatgaatgaatgaaggtactgctggtgttccaagtacacagaatcctgttatctgttcctccctgaaacctggaccaggaaaagctgaattctccttactagcagcagcaggtctgcctccactgtgaaaactaggagagccactggtttccctctttgccctgggggctggggagctcaagctacactctgagttcaactgtagtggctctcctaggaaaycatttcaggaatcattttctcttcttgcccttttgttgttgttttgacttttactatatattaatggcttgggatcttaccatgtctgtgaggccatagattagaataacacaaatcagttactgtgtgacagacagcttacatttcttacatcatttaatcttcccagcaagcctgcaaggtgggcataattattcccattttatgca

SEQ ID NO: 684909 - DNA, 604 bp, Homo sapiens
ttattgctaaaacaraagtagtgaaggtcaaagaatgcaaaatcctaggaaacacaatttttttccaaaggctgtttaatatgcctttgatatagattactttattgacaatggttcttttgtctttctgaaaactacatctgcacaacaactaggtcaccttgaatttcaagtacaacattgcctataaatttaatttaacatcatattatccataattaccatgaacaggaggcaggtgtgacccttatggttaagctagagggaccaaggacaggataggttaatagacttgctcaaggctccagggtctgagttaactacaggctctacatgagccacaagtatgacctggctattaaaatattattacaatcacatgcttctttaaagagtagtacttccaaatcaaaggaggtaccagttccattgctggatagtacactcttcactccaactctgaggaactttattttagcgttagatggcatctttcatttcatagttggaattgaaagcatccatagagggcaatgagaaaagcaagcaatctgaaattgacgccccaggaactctgaatcagggaactctgagttgcagagaa

SEQ ID NO: 684910 - DNA, 2011 bp, Homo sapiens
tttaaaagctacccatgcagttaaaggcgtcacaggacatgaagtctgcaattatttctggaatgttgacgttcgcaatgactgggaaagtaagctgtcattattaatatattttaatctattattttgaatttaatatcaaatccaacctagttttctgcatctcctacatagtttacaaagtcaacgtagaaagtatttggaaaatcatatagaggactagcaatacatttatgtagagcttttcagtgtatgaaatgcttcctagtatgtaatttgatccaataacctcagtaatcctacagtgataggtaggtattattgcttattttacatacaaataaagtaaaattcagataggcaaagtgacttgtcaaaggcaacaagagctatatggtggagaagccaagactgaaattgaagatttctgtttcatcatctactctttcctaaactgtttccgtggtaaatcctaggtgaatccttttgtgattactttagaattattttatttttttagacagagtttcgctcttgtcacacaggctggagtgcagtggtatgatctcagctcgctgcaacctttacctccccagttcaagtgattcttctgcctcagcctcccaagtaactgggattacaggcgcacaccatcacgcccagctaatttttgtatttttagtagagacggggttttgccgtgttggtcaggctggtctcgaactcctgacctcaggtgttccacctgccttggcctcccaaagtgctgggattacagatgtgagccactgcacccagcctagagttattcttagtgtgtattccccttagacacaaaatttcctaagtatagatacttctcaacatcatcagatgtttatcattggcagtttgacatctctttttcacagaaatagccacctaagattagatataacaatttatttaacatcaataaattggggaaaagggaagggttttagtgttagggaattatttgtgcctgagtgatgcagtggtgattagaattgctttcttgctgtggaagatagataattgggccaaagaaaatgaggcttcctggtgatcagacctcacatccctaatctgtaaccataatactaagtattagctaccttccatttggatgtaacctagatagggcaggatcctgttcaatttaccatactgtccattcgtacttgactttcaacataagtgaattgatcacattctaggaaaagataatatatctttttattattctcttcatttcagcaactatagaaaactttcatgtggtggaaacattagctgataatgcaatcatcatttatcaaacacacaaggtaaagatctcttcattcatcctaaaaggatttcaatgtagttcaaactcagacatatagattctctaaagtaaaattggggaggttattaaaagccacaaaaatccaaagactttattaaataatgattcatgaatgtcatgtatttaaaaggtatatcaacttgttcagaacagaaatatgtgcaggcaagaatctgagagatacaatctagaaatagagtgcttgataaagatcaacggttagttccctttgtgcactttttatttttaaagagacagggtcttgctgtatttcccaggctagtctcaaactcctgagctcaagtgatcctcctgcctcagcctctcaagtaattggaactactggtgtatgccacactcttagctttctttatacacagtttaagtctaraaaagagccttctgaaatactgaaatccatttaaatacctttctagtatctagtttctataagaggtaaatgatagttaccaaatatgaaagtgaattatagcttcctgtgacaacaacaataagggtaatggctagcatggtattagcctatgttaagactaatagatataaaagtaaatggattatctgaaagcaaagaaaaatcacagagcgtgacttgagaggttagtcatacaccagagcata

SEQ ID NO: 684911 - DNA, 680 bp, Homo sapiens
cacttktctaagtgcttttgatatattaactccttttattaaaagtccactgaggagaacaatagtagaatctgcattttacaaaggatgaagctacagaaacagagatgttaggtaatttgcctaattccacatagcttggaagtagcagagccagaatataaactttgaaatgtggctcccaagcatatgccctaaaccactccactgtcttatcttttgtattagcataatgtgcactattttgtattagtacatatcgtatgattgtttaattttctgatgcttcattacaaaagacttttcataatatcagtgaagagttgtacttgtttccctttacagctcccagctgtgttcaaatttgtattttccagccttgggcagttttctttctctttgtcctgcacagtgtttttttgttttgttatgtaattttaaatttcaggataatttttttagactagcttattgcaaatgataattgaccacacatagctgttggcagatatgatgactgactatcactcctgccaaaggtcagtagatatccactgagggccttactctatgataggcaaagggttaggccctcaaggcagagagttaaataggaaaatatatacaaacaaacccttcctagataacatggtcagtgttctgagtgaggtatacacagg

SEQ ID NO: 684912 - DNA, 680 bp, Homo sapiens
cacttgtctaagtgcttttgatatattaactccttttattaaaagtccactgaggagaacaatagtagaatctgcattttacaaaggatgaagctacagaaacagagatgttaggtaatttgcctaawtccacatagcttggaagtagcagagccagaatataaactttgaaatgtggctcccaagcatatgccctaaaccactccactgtcttatcttttgtattagcataatgtgcactattttgtattagtacatatcgtatgattgtttaattttctgatgcttcattacaaaagacttttcataatatcagtgaagagttgtacttgtttccctttacagctcccagctgtgttcaaatttgtattttccagccttgggcagttttctttctctttgtcctgcacagtgtttttttgttttgttatgtaattttaaatttcaggataatttttttagactagcttattgcaaatgataattgaccacacatagctgttggcagatatgatgactgactatcactcctgccaaaggtcagtagatatccactgagggccttactctatgataggcaaagggttaggccctcaaggcagagagttaaataggaaaatatatacaaacaaacccttcctagataacatggtcagtgttctgagtgaggtatacacagg

SEQ ID NO: 684913 - DNA, 680 bp, Homo sapiens
cacttgtctaagtgcttttgatatattaactccttttattaaaagtccactgaggagaacaatagtagaatctgcattttacaaaggatgaagctacagaaacagagatgttaggtaatttgcctaattccacatagcttggaagtagcagagccagaatataaactttgaaatgtggctcccaagcatatgccctaaaccactccactgtcttatcttttgtattagcataatgtgcactattttgtattagtacatatcgtatgattgtttaattttctgatgcttcattacaaaagacttttcataatatcagtgaagagttgtacttgtttccctttacagctcccagctgtgttcaaatttgtattttccagccttgggcagttttctttctctttgtcctgcacagtgtttttttgttttgttatgtaattttaaatttcaggataatttttttagactagcttattgcaaatgataattgascacacatagctgttggcagatatgatgactgactatcactcctgccaaaggtcagtagatatccactgagggccttactctatgataggcaaagggttaggccctcaaggcagagagttaaataggaaaatatatacaaacaaacccttcctagataacatggtcagtgttctgagtgaggtatacacagg

SEQ ID NO: 684914 - DNA, 607 bp, Homo sapiens
ggggctggcagagaagcaagaggcacaactgattatgaaagtaaacatgagaaattaaaggaagaaaattaagatgattggttaaaagaaagagaatagatatggaaacaaagaacaggattaaaaaaggctttacaaagtatataagaatgacaattttttaaaaaagttaagtaactctaatgcaggctgacacattacatttatgtagtacctaatttctgaattatctttayttagtacaattacataattttgtgaccattatattctattatctttgtgagcacctactaaatgccatgactatgcaaagtgctttgcatgaactatttctaatcttcataataaccctattttctccatttcatagatgaggagataggatcagaggggattaataactcatccaaagccaagtaaccagttagtgtggaactctgttctaaaccccggtactctctgcctgtactgcctctcatcttatttgatacaaagaagaaccttgtgagataagcagagcagatattgtcacacttgtcttactgatgagaaaaatcagggtcaaaaagatcacaggaaaatgttcaaaggaaacaggcaaaaa

SEQ ID NO: 684915 - DNA, 607 bp, Homo sapiens
ggggctggcagagaagcaagaggcacaactgattatgaaagtaaacatgagaaattaaaggaagaaaattaagatgattggttaaaagaaagagaatagatatggaaacaaagaacaggattaaaaaaggctttacaaagtatataagaatgacaattttttaaaaaagttaagtaactctaatgcaggctgacacattacatttatgtagtacctaatttctgaattatctttacttagtacaattacataattttgtgaccattatattctattatctttgtgagcacctactaaatgccatgactatgcaaagtgctttgcatgaactatttctaatcttcataataaccctattttctccatttcatagatgaggagataggatcagaggggattaataactcatccaaagccaagtaaccagttagtgtggaactctgttctaaaccccggtactctctgcctgtactgcctctcatcttatttgatacaaagaagaaccttgtgagataagcagagcagatattgtcacacttgtcttamtgatgagaaaaatcagggtcaaaaagatcacaggaaaatgttcaaaggaaacaggcaaaaa

SEQ ID NO: 684916 - DNA, 643 bp, Homo sapiens
tcagtaagtgatgcttattgctctgtgctgtagtccttttacagttaatattattggccccacatctgtctcaaacatatattttgatactgtttctaataatgctgtaatatgtgaatcacctaaaggaaaacaagttcatgagaaactttgttatagtcttctaagatagaaaagccttgcaggcagattggtgagactagaagctaggattcaaacatttggtcaccygccaggtaccgaagataaatataaacagaacatcttcccaattctgaagggacctgcatccagtagaggagactgacatgatgcaactataatgtaagcccctcccacacatataacccaaatcgtgaagtaacacatcctgggtacctagagaggtgaaaaatgatttccagctatgcatttgatggaggtgacatttgagattgctcttaataaaacattgaagaaatatataagttttaaaaaggctaactatgaaatctactaagaagaagagaattctcaattttttcaagtggttcagccccacattccctgaagtgatcaacggaactctaattgcccaagatattccttagaaagaggattccattattacataaatttaagagaaggtatacggtgtatatct

SEQ ID NO: 684917 - DNA, 1178 bp, Homo sapiens
cattgtatatttatttttggttttctgtaattgcagagtgaagctagcttgattctatgatgccattttggaaccagaaggcctctttttctttctttctttctttaagacagttttctgtacctcaccatctacctggtatacttttctccaagcaacaggtcttcattgtttttgggtgactgcccragttacatcagtgatcttcatgggctgactccaaacactcaggccagtgattttcttctcctgaccagaaaattctcatcctgaccagcaggtcagttttgactttttttagtaactaggtaggagagcagatcaatagctaatataaggaaatccctgatttcaattcagatttctaattcagccactgggcttttctctttataagtggtgttcaccatagccctgaggagtgaaatgtacaacatctttatctgtcataaaaggtaaagtaaatttcatattgttaagatttatggaacttaataaagtaaaattgtctttcttctgaatatcagaacccatggatagataatgacaggagttagacagataatgatcaaaatggcatactttttccagctgcttggaaagcttatctttagatctttactaaatatcaagagttgaatcaaagatgagtagggatttggagagaggccttgtatgatgtctgggtattattctacttgattatttctggtagtcattcctggccatggtagtgttctgacatatatgtactgagctgttctctggaagatcccaacttgacttttctctctgcagctctctcccctctggtattgttttgtgaattctgtctgccttgttttctctgaaatctgaatccattctcctccatttagggagaaggcctggccagatgtggctaccttctccatgagctctattatgaaaatgttatccagtcagtaataaatgttctgcactgactggtgtccagtatttagaaacaatttttttttcatagattctgtcttctttatttttagttgtttaaagtaggaaggtaaatctgctctattacttcctcatggccacagattgaacttccttttcttcatttttaaagcattttacagaagtaatattgacttgtaaataataaactgcatatatgtaaagtatacaatttgaagctgggc

SEQ ID NO: 684918 - DNA, 639 bp, Homo sapiens
taaaaagaaagaaaaaaatgaaaaaagcttttcacttataatacattttaataatttccacgtaagagtagttcaaaatagcagataaaagcccaatttacttcctttttcttttcttttatttttttcatagggacatagaggaaacaacccaatatacttctcaggaagtggagctctacatcggctaaactaaatgaaaacatgatagacatttgctaacagttacgttgaaaataataaatatccacactgagtagtcccatttaggattcctttcatatctcatttatcttattcrcgcttcatgatgtaatcctctcttaaactagatatttttcagggccatgaaatcaaaaaacttccaagagaccttgcttagtggtcaaattagtcattttataatagttgtacttttatcattttactctcaaagtatgtgtttcatgttatgtgaagcataattacattttcaattaaatatttatccaaccccatgagccaatttatgaattcaaggatgtgactacatccaaggaaagcatcagtactattttcagccatcctcaagtctcccaaagaccccatctatagagaagttgagtagccctgtctgtacaggaattcaagtcaggctct

SEQ ID NO: 684919 - DNA, 588 bp, Homo sapiens
tatgacatgtgctagaaaatatgaaattatgatcctaattttatgaagtaaagtgtttacgtatgcattttatgtatatrcttataatgttctttatgattatactatataatgagctctgcttcttttactctttgttgtatttttctcataactaggtaatattagaaaaaacatttttaaggctactggattattaacaaagtaggagtaccatcatttattttaacaatttctctattattggctattgaggttgttcccagtctttcactcttagaaatagcaccgtgatcaatgtctttatgtaaattcctagaaatagagacactaggtcaaagagtataagtgttttgttttgttttgttttgttttgtttgagacaaggtctctatagcccaggctggaatgcagtggtataatcatggctcactgcaacctcaacctccctggctcaagtgatcctcccaccttaacctcctaagtagctgggactacaggtgtgccccaccatgcctggttaattttttgtgttttttgtagagacggggttttgccatgttgcccagactggtctaaaactcctgg

SEQ ID NO: 684920 - DNA, 622 bp, Homo sapiens
caaggcccacttctattcctggtgccatacaagctgaaacattctgtgactctccatcaaatgaagcatgagcagtaaacacaacaatccaagtcttttgccaatgatatcgtggctctctctagtctcattttcccttgtttgtatcctaagcttcatccaacgtagacacattcttcttaaatatgtccttgattttcctccctccacagtatttcttctacctgttccacctccctttccacttgcagagtcctcaatcttctcctttaggacccatctgaaatgtctactccttaatgaaaacttttctgatctctctaatggcatgagatttctctatcctaaatactcattagccctttctttatatttcattgtactagatccagctatttaactgtaaatatttttttatcatccctaagaagtaaaaaaaaaaaaaaaaaaaaaaaaacttsgtgagggtaggaatgccttaatttagaaccagtagaatattacaaaaaatacatagcatgtgggagagactatgggagatacgaaagccaggaaaggaaagatacaaatggaatttaaactttatcttatgggcatcagacaactattcttgaacagaaaa

SEQ ID NO: 684921 - DNA, 628 bp, Homo sapiens
atatcttatattctaaattgtatattatttagaaatatgctatttctaaactgaaatgtctgatatttctaactgatatatatatctatatatgatatgatatatgattatatatatgttatctatatgatatataatatatgatatatatttctaactgatataacaatgtatctcagttcttagagatatgtaaattatattttaatagtagcctacaaagatgatacaagaagataagaaataaatatacttttatatataaaatagttcaacagcaagattcttatttagaataattttctacagttttatttagggtagtttctatacagaaaaaatacatattttatctcctktctgtgctaggctctggagatgcaatggtgcctccctcccttcctggagcttaccaagcaaaacaaattcactaaataaaattattcctaattgtgttttaagtccagtgaagagaacacaggagggaccgagttaaacagtgtgtttgtgtatgtctgtgtatgggtgtgtgtctgtgtctgtgtgtctctttgtggctgtgtgtcctagagatgtactttagttggagtggtcagggaagttgagaactgaaagaaccagtcaaaca

SEQ ID NO: 684922 - DNA, 1547 bp, Homo sapiens
gtgtgtgtgtgtgtgtgtgttactaatttctaactgtaccagctcctgaattaatatttggcaacatcaatattccttgtataatgaagaagcatggtccaagagacttggatgtgacctctctaaacatcaacttacagctgcaaaataaggaataagttgtaattattccttatttgtaacaactaccttacagtgttgttttgaagattagaagagaatatatagatgaagtacccagtggacagtaggtattgaataaatgttagtttccttccaccttctctggcttatgtaacaaaattactcattctactagtcactcagactttagttaatcattagctaaagagtaacaatgcaggattttttttttaataaattggctaggattggttttatgcctggatggaataggcacttgccatttcatcacaattcaaaattcctcctgaaggcctgaaggcctgaaatgtttaccattggaaactaatcccactgtatggttactattatttattatatctattaacttataaaatattaaaatataaagtaaatattaccctactgatgcattagccactcaacataaatgagtttcttggagattaataaagcagtacatcagtatgtcccaaacaatggctaaaaggaaacctagtaaccaccccgaccccaaacttgttttgttaggccagtcagatttttttttttcattttgaattagcatcacgattgaaagtggaaagatctcacatataacttcacatttctctgtacaattgagaaacgttggctatgttggctctctgaatagcagctacctcctttcaaggtttgtatttacaatatttcccacccccatgagtccttattatcctgacactgaggacaaatatgagttgctgtccatcagcattccaaagctgtttttttttttgttttttttttcttacacttagcctacttcactccctaacaccaccagcctgatttctgagggggcctgaggtaggaggaggagaatggagagcactttctctgagagccgccattttaacagatcattaaagacacgatattcacatgacggttgcttactctctgatgaaaactacaaaaacagaatacacagggaaggtaatctgaaggtgatacctttttcctatgatccttggccttataaccactaatcaagcctgagggccgaagttcctgcctcatctctgcctgatgttacgaactaggcaggctagcagaggcaacaggcaacctgggcacctgaagagctacctggataacctagaagaacagtaggaggttaaagatgaggacaagtctatcaaaacaaaagcctgtcaagaccagaaagagaaagtcacacttttgactttacagtttgtgctgggctgacacaaaggcctcagttaacaccaaatacaacttccatagacttcaagtttccctcatatttttcctgggtcactattccagagttgagaaactgaactacatctaatattttrttaaaataaaattgaaga

SEQ ID NO: 684923 - DNA, 1799 bp, Homo sapiens
ttaactactcaatcaagcctttgaaaagattttagaatacctatatgtctatttgtacatctatctatccatttgtaaggttcaaacctgtcttaagactgtattactgaaatgtaataaatagagctagatgaactcacataaaatcatgacaggaaatctttttttatagttaagtaatatcttcagctcttgtttatacatggttgacttggagtgagttttctcagtgttgcaacctggggcagttaataagggccaaatggggacagaaatcctgctcaagaggaaaggggagatttcttaattacttccagtgcccaggaagagttatgaaaactggagaatggaagataagatggtcacctcacgtgaagatgaatggcttcttggaggcagagagaagatggtttctctttggtttcatttgtgtaagttggtaatacattattttcagaataattttcaaaataatgtcatataccactgcagtgatttctagaaaccacagcttcagttagctatcttttgaacacattcatggctctgctgactttgcaactctggaaattcattcgcacaagaaagtgtctttgaaggggatattggaaacctctggttacataatgtaatatgggaagaagaatgcaaagctgtttgttaaatacatattttttggcctcaggaaagtttgttagaagtaggattttatgtaccaagttgattgaagtttttttttcactggcaataagcaatgtttaagtgtttagcttgtcttagaatttctaacattaattttgaattcagttctcttcggttgttcaktcgttcattctttctttttcatgtattcctcaagcatgcctatcacactgttcccttggatagaacaaagaagaccatcctagaccattgggcttttgaggaactcaatgtgcagtatgtttgccaataaatgatttatcataatatatatatgaataataataaaagggtttgacgtacacatttaataccagaaaaattagcacagcaaatcaagagggaaatgaaaatacaaattaatcctaaagcatgtactagcttggagatttttgaaggccaaaaaaatttttattttgaattccccagtgcaactggagtatgtttggtgggtattcaactgatgcttgttgaattaattcaacacaataaaacgttaaaaggcaacaggccataaattgctgtctcgtatgcttgttgttgggacatattgaattcagaatgttttgacagaaggttaagctctgtatcattcttctgtttccattctccatctattttcagctattttcattacattacccacatctctcaagagttcaattctttctgcttttgtttcattattctagacaggtttttgtgctttagaaatgctcagcagagtactttttaattcactgtttttcaagtaagattaattttcacatttcccacaggtttagtctttaatctgctatattataggactagaaaaacatagcaacaatgagtagatgaggttttgaatttcaagacgcggagccaagttgatggtacaacagaagggaaaaatatatctttctcacacacagaaacatcagtaatgtgttttgtggaaacttttaggtagctagatcccaaatttaaaccaaaaacaaaaaagtaagcaagctagggaatctatgaataagtaagcagaggaaatcaggctcttccattctcagtgggtttgtctgatctatatatttcctccaattttaggcccaaatttcccc

SEQ ID NO: 684924 - DNA, 1799 bp, Homo sapiens
ttaactactcaatcaagcctttgaaaagattttagaatacctatatgtctatttgtacatctatctatccatttgtaaggttcaaacctgtcttaagactgtattactgaaatgtaataaatagagctagatgaactcacataaaatcatgacaggaaatctttttttatagttaagtaatatcttcagctcttgtttatacatggttgacttggagtgagttttctcagtgttgcaacctggggcagttaataagggccaaatggggacagaaatcctgctcaagaggaaaggggagatttcttaattacttccagtgcccaggaagagttatgaaaactggagaatggaagataagatggtcacctcacgtgaagatgaatggcttcttggaggcagagagaagatggtttctctttggtttcatttgtgtaagttggtaatacattattttcagaataattttcaaaataatgtcatataccactgcagtgatttctagaaaccacagcttcagttagctatcttttgaacacattcatggctctgctgactttgcaactctggaaattcattcgcacaagaaagtgtctttgaaggggatattggaaacctctggttacataatgtaatatgggaagaagaatgcaaagctgtttgttaaatacatattttttggcctcaggaaagtttgttagaagtaggattttatgtaccaagttgattgaagtttttttttcactggcaataagcaatgtttaagtgtttagcttgtcttagaatttctaacattaattttgaattcagttctcttcggttgttcagtcgttcattctttctttttcatgtattcctcaagcatgcctatcacactgttcccttggatagaacaaagaagaccatcctagaccaytgggcttttgaggaactcaatgtgcagtatgtttgccaataaatgatttatcataatatatatatgaataataataaaagggtttgacgtacacatttaataccagaaaaattagcacagcaaatcaagagggaaatgaaaatacaaattaatcctaaagcatgtactagcttggagatttttgaaggccaaaaaaatttttattttgaattccccagtgcaactggagtatgtttggtgggtattcaactgatgcttgttgaattaattcaacacaataaaacgttaaaaggcaacaggccataaattgctgtctcgtatgcttgttgttgggacatattgaattcagaatgttttgacagaaggttaagctctgtatcattcttctgtttccattctccatctattttcagctattttcattacattacccacatctctcaagagttcaattctttctgcttttgtttcattattctagacaggtttttgtgctttagaaatgctcagcagagtactttttaattcactgtttttcaagtaagattaattttcacatttcccacaggtttagtctttaatctgctatattataggactagaaaaacatagcaacaatgagtagatgaggttttgaatttcaagacgcggagccaagttgatggtacaacagaagggaaaaatatatctttctcacacacagaaacatcagtaatgtgttttgtggaaacttttaggtagctagatcccaaatttaaaccaaaaacaaaaaagtaagcaagctagggaatctatgaataagtaagcagaggaaatcaggctcttccattctcagtgggtttgtctgatctatatatttcctccaattttaggcccaaatttcccc

SEQ ID NO: 684925 - DNA, 1799 bp, Homo sapiens
ttaactactcaatcaagcctttgaaaagattttagaatacctatatgtctatttgtacatctatctatccatttgtaaggttcaaacctgtcttaagactgtattactgaaatgtaataaatagagctagatgaactcacataaaatcatgacaggaaatctttttttatagttaagtaatatcttcagctcttgtttatacatggttgacttggagtgagttttctcagtgttgcaacctggggcagttaataagggccaaatggggacagaaatcctgctcaagaggaaaggggagatttcttaattacttccagtgcccaggaagagttatgaaaactggagaatggaagataagatggtcacctcacgtgaagatgaatggcttcttggaggcagagagaagatggtttctctttggtttcatttgtgtaagttggtaatacattattttcagaataattttcaaaataatgtcatataccactgcagtgatttctagaaaccacagcttcagttagctatcttttgaacacattcatggctctgctgactttgcaactctggaaattcattcgcacaagaaagtgtctttgaaggggatattggaaacctctggttacataatgtaatatgggaagaagaatgcaaagctgtttgttaaatacatattttttggcctcaggaaagtttgttagaagtaggattttatgtaccaagttgattgaagtttttttttcactggcaataagcaatgtttaagtgtttagcttgtcttagaatttctaacattaattttgaattcagttctcttcggttgttcagtcgttcattctttctttttcatgtattcctcaagcatgcctatcacactgttcccttggatagaacaaagaagaccatcctagaccattgggcttttgaggaacycaatgtgcagtatgtttgccaataaatgatttatcataatatatatatgaataataataaaagggtttgacgtacacatttaataccagaaaaattagcacagcaaatcaagagggaaatgaaaatacaaattaatcctaaagcatgtactagcttggagatttttgaaggccaaaaaaatttttattttgaattccccagtgcaactggagtatgtttggtgggtattcaactgatgcttgttgaattaattcaacacaataaaacgttaaaaggcaacaggccataaattgctgtctcgtatgcttgttgttgggacatattgaattcagaatgttttgacagaaggttaagctctgtatcattcttctgtttccattctccatctattttcagctattttcattacattacccacatctctcaagagttcaattctttctgcttttgtttcattattctagacaggtttttgtgctttagaaatgctcagcagagtactttttaattcactgtttttcaagtaagattaattttcacatttcccacaggtttagtctttaatctgctatattataggactagaaaaacatagcaacaatgagtagatgaggttttgaatttcaagacgcggagccaagttgatggtacaacagaagggaaaaatatatctttctcacacacagaaacatcagtaatgtgttttgtggaaacttttaggtagctagatcccaaatttaaaccaaaaacaaaaaagtaagcaagctagggaatctatgaataagtaagcagaggaaatcaggctcttccattctcagtgggtttgtctgatctatatatttcctccaattttaggcccaaatttcccc

SEQ ID NO: 684926 - DNA, 366 bp, Homo sapiens
ttgggtatttaggtttttctgtagtaaatgggtattggatccctttggaagatggcatagtttattgtaattctgttatggttttgcgaattcgagcctagaaagagttatcttaacatctgtttcactgtggttagttcsttaatccacctgccttcatcctggctcagaactaaaaaggttaaagtatgcagtaagatttttgtgctgccacttggaagtagtattaattagtagctgctctatcaagcattcttttgcttagcagtaagcaaacttaggagattttattacaatgctgtttttttaggttttattttattataatgcctttttaaaaaaaattaggctaataagaaaaatctt

SEQ ID NO: 684927 - DNA, 338 bp, Homo sapiens
tgctaactgcggtaaytattggggacataggagttaacaaagtcaagtccctgtccccaagtagacgataaagtgggaagactgaacattatatatgcaaccatttaggggaagcttctgtacacattgttttgcatggaataggttttcatttgaagaatatttgagtgctttctataaacaatgttaatccctgggttaaacaaaaaatagacacattacacttaccatcaaaaaggtcatctactgggaaaacataaataattataatatggaatgataattactgtgatggtatttacatagtgtgctgtagaaacacaaaggaagggaaccta

SEQ ID NO: 684928 - DNA, 2053 bp, Homo sapiens
attagaatatttgtttcattataataaaaattcatagctgttaggaacagataaagatgttctagaggtattgactgggcccaggaatcatacagcagctttttttttttttttttttagtgccggtcatgggtcaggmactctcctaggcacagagttgcaaagatagatacctaagagcctactgggatgctatagagttctcataatttgggaacaaatatatctttataaaaatgaaaattatcctcaggcaaaatgaatgtttcctggcacgttgtattgattggttttagcttctctttaacataacagctttttctttctcattttcctcttctcatttaaaaccaaggaacatactccctgctggcttgtgtagtcctccatctccaaaacctctcacagtgcttgccacacatgcatcctgcagctcttgctttccagtcccccctcccacgtccagacagaatctccatctgtgcactccctcccaacacgagcagtggaagaggcctttcatctcctatccacagctcattctatcaccctgaacttaccccatcctgtcctgtctcctctgtgattttgcttcaccaattttctcctctctctcttataacttcaaactttcctgctccttcttccaaaaaaaaaaaaaatgttcgagtctgtctttttctaaatggaatttttggacctctttaatgctccctctagctactgacctatttcttttctttgtcctttctcctcaaaatttcataaaacagttgtcttaaattcactgcctttgcttcctaatcttccattcactcctcaatccattgcaatttggcttctacctccctgaatttgctgcaactgacttctgtccatggggatgcttctacttagagtgcagtttctcttaaggcctccaccataaaactttctctcaacctcccagttgggttgggtgcccctctgtggcctccatgggcatatctttttcagggtgattactactccagtcctttcatgaaactctaagacttttaaaagcatctttttgtgtctaacccctaggcaagtgtctaatgaggtaaacattcagtacatgtttgtttattgaatgtatcaataaatgaaatgaatggaagactcccaaatctacatctatagcccagttcttttgcacatgcttttgaaacatacagacaactgtgtatcaaatatgttttatcaaaatctcatactcaagatagacaacactgaaagcatcatcttctcctgaaaactcatttgactactgatgttaatatcaccatcattaatttcttcagacaagaaaaaaattcagagtcttagactcttctctttctcccacccacttacttgaatcattcactaactcacacaagtttatccttctaaatcaatttcaaaaccatcctctcttctattcttactgccattgccttaacttaaacatacatcatctcacacctgaacaattttaatagcttcctaagaggtcactcagcagccattatcttcccttctaattcattatccactcttccttgtcaattctaattttaaaactcagatttgactcgtttattcaaaaactatttactgagtacctacataactctggatactttctaaggcactaaggatacagaagtgacccaaaccaaccaagcctttgccctcaaggagcttacccctactgagatatgatcatatttctgccctctaaattagctttcaccagacaattgactgcataagaaagaaattttaaaatgatacacaaggtccgtcaccatccaactaggtagttctcaacttacggtgtgcatttgaatcacacttgggttcttattaaaaatgtgtctttatgatttccttcttaagagagtctgattctgtcagccaggggtggagcctctgcatctttaattagactcccaagtgattctgatacaggcagctcatgagtcacaccttgagaaacacttctctattttgtctaccttttcaacctctcctcctgccacttctc

SEQ ID NO: 684929 - DNA, 2053 bp, Homo sapiens
attagaatatttgtttcattataataaaaattcatagctgttaggaacagataaagatgttctagaggtattgactgggcccaggaatcatacagcagctttttttttttttttttttagtgccggtcatgggtcaggcactctcctaggcacagagttgcaaagatagatacctaagagcctactgggatgctatagagttctcataatttgggaacaaatrtatctttataaaaatgaaaattatcctcaggcaaaatgaatgtttcctggcacgttgtattgattggttttagcttctctttaacataacagctttttctttctcattttcctcttctcatttaaaaccaaggaacatactccctgctggcttgtgtagtcctccatctccaaaacctctcacagtgcttgccacacatgcatcctgcagctcttgctttccagtcccccctcccacgtccagacagaatctccatctgtgcactccctcccaacacgagcagtggaagaggcctttcatctcctatccacagctcattctatcaccctgaacttaccccatcctgtcctgtctcctctgtgattttgcttcaccaattttctcctctctctcttataacttcaaactttcctgctccttcttccaaaaaaaaaaaaaatgttcgagtctgtctttttctaaatggaatttttggacctctttaatgctccctctagctactgacctatttcttttctttgtcctttctcctcaaaatttcataaaacagttgtcttaaattcactgcctttgcttcctaatcttccattcactcctcaatccattgcaatttggcttctacctccctgaatttgctgcaactgacttctgtccatggggatgcttctacttagagtgcagtttctcttaaggcctccaccataaaactttctctcaacctcccagttgggttgggtgcccctctgtggcctccatgggcatatctttttcagggtgattactactccagtcctttcatgaaactctaagacttttaaaagcatctttttgtgtctaacccctaggcaagtgtctaatgaggtaaacattcagtacatgtttgtttattgaatgtatcaataaatgaaatgaatggaagactcccaaatctacatctatagcccagttcttttgcacatgcttttgaaacatacagacaactgtgtatcaaatatgttttatcaaaatctcatactcaagatagacaacactgaaagcatcatcttctcctgaaaactcatttgactactgatgttaatatcaccatcattaatttcttcagacaagaaaaaaattcagagtcttagactcttctctttctcccacccacttacttgaatcattcactaactcacacaagtttatccttctaaatcaatttcaaaaccatcctctcttctattcttactgccattgccttaacttaaacatacatcatctcacacctgaacaattttaatagcttcctaagaggtcactcagcagccattatcttcccttctaattcattatccactcttccttgtcaattctaattttaaaactcagatttgactcgtttattcaaaaactatttactgagtacctacataactctggatactttctaaggcactaaggatacagaagtgacccaaaccaaccaagcctttgccctcaaggagcttacccctactgagatatgatcatatttctgccctctaaattagctttcaccagacaattgactgcataagaaagaaattttaaaatgatacacaaggtccgtcaccatccaactaggtagttctcaacttacggtgtgcatttgaatcacacttgggttcttattaaaaatgtgtctttatgatttccttcttaagagagtctgattctgtcagccaggggtggagcctctgcatctttaattagactcccaagtgattctgatacaggcagctcatgagtcacaccttgagaaacacttctctattttgtctaccttttcaacctctcctcctgccacttctc

SEQ ID NO: 684930 - DNA, 2053 bp, Homo sapiens
attagaatatttgtttcattataataaaaattcatagctgttaggaacagataaagatgttctagaggtattgactgggcccaggaatcatacagcagctttttttttttttttttttagtgccggtcatgggtcaggcactctcctaggcacagagttgcaaagatagatacctaagagcctactgggatgctatagagttctcataatttgggaacaaatatatctttataaaaatgaaaattatcctcaggcaaaatgaatgtttcctggcacgttgtattgattggttttagcttctctttaacataacagctttttctttctcattttcctcttctcatttaaaaccaaggaacatactccctgctggcttgtgtagtcctccatctccaaaacctctcacagtgcttgccacacatgcatcctgcagctcttgctttccagtccyccctcccacgtccagacagaatctccatctgtgcactccctcccaacacgagcagtggaagaggcctttcatctcctatccacagctcattctatcaccctgaacttaccccatcctgtcctgtctcctctgtgattttgcttcaccaattttctcctctctctcttataacttcaaactttcctgctccttcttccaaaaaaaaaaaaaatgttcgagtctgtctttttctaaatggaatttttggacctctttaatgctccctctagctactgacctatttcttttctttgtcctttctcctcaaaatttcataaaacagttgtcttaaattcactgcctttgcttcctaatcttccattcactcctcaatccattgcaatttggcttctacctccctgaatttgctgcaactgacttctgtccatggggatgcttctacttagagtgcagtttctcttaaggcctccaccataaaactttctctcaacctcccagttgggttgggtgcccctctgtggcctccatgggcatatctttttcagggtgattactactccagtcctttcatgaaactctaagacttttaaaagcatctttttgtgtctaacccctaggcaagtgtctaatgaggtaaacattcagtacatgtttgtttattgaatgtatcaataaatgaaatgaatggaagactcccaaatctacatctatagcccagttcttttgcacatgcttttgaaacatacagacaactgtgtatcaaatatgttttatcaaaatctcatactcaagatagacaacactgaaagcatcatcttctcctgaaaactcatttgactactgatgttaatatcaccatcattaatttcttcagacaagaaaaaaattcagagtcttagactcttctctttctcccacccacttacttgaatcattcactaactcacacaagtttatccttctaaatcaatttcaaaaccatcctctcttctattcttactgccattgccttaacttaaacatacatcatctcacacctgaacaattttaatagcttcctaagaggtcactcagcagccattatcttcccttctaattcattatccactcttccttgtcaattctaattttaaaactcagatttgactcgtttattcaaaaactatttactgagtacctacataactctggatactttctaaggcactaaggatacagaagtgacccaaaccaaccaagcctttgccctcaaggagcttacccctactgagatatgatcatatttctgccctctaaattagctttcaccagacaattgactgcataagaaagaaattttaaaatgatacacaaggtccgtcaccatccaactaggtagttctcaacttacggtgtgcatttgaatcacacttgggttcttattaaaaatgtgtctttatgatttccttcttaagagagtctgattctgtcagccaggggtggagcctctgcatctttaattagactcccaagtgattctgatacaggcagctcatgagtcacaccttgagaaacacttctctattttgtctaccttttcaacctctcctcctgccacttctc

SEQ ID NO: 684931 - DNA, 2721 bp, Homo sapiens
tgccttacatgaagaaagtgtttttaggaagttctccaaatagaactggttcctgcaatgaattcttatgggccctggctccaatctgtgtcccgaacccaacattgcacagatgaaatgactgctgtggggacagtggcatgagaaagtgtcattcaggcatttgagaagttctatgactgaagaaggtccttttctcactgcctctcttcctaagttaaggtaagtcctaaagtgaccatgaagggagcagagggtgtgatctggcacatgctgggaaggatgtgtgatagcagacaaaggcagaagcatgggccagagagttttgaacagtctggtgagcacagaatgaagagaagtcatggggcatggagaagggagggggggaagttgggagtagcagaaatgacagaagagggctttagattctaaggtcacatgttctgtggaaccccaatgagagacatcagatgtcaggcatgatcttgaaatcccaggaatggccctataagagacactgccctaccccattcctcaaggctgcacaagtgccagggaaggcctggatgcctccccttaacttgaatgcttagaccccaaaacaaaggaggtcaccatctgacatggtttggctgtgtccccacccaaatctcatcttgaattgtaactcccacaattccacatgtcgagggaggaacctggtgggaagtggttgaatcatggagacaggtctttcccctgctgttctcgtgatagtgattgagtctcatgagatctgatggtttttaaaatgggagttgccctgcacaagctctctgcctgccaccatgcacgtaagatgtgacttgctcctctttgccttctgccatgcttgtgaggcctccccagccatgtggaactgtaagtccattaaacctctttcttttgtaaattgcccagtgtctggtatgcctttatcaacagcatgaaaacggactaatacaccatccaatgcaggaagaaggccatggccctttcaatgtccagagttccaaccacaggggtgattggggctgcttccaagcaggagtgttaaagcttccttccctttaggccagggtttctcaacttggcactactgatgatttgagctgaataatcctttgttggaaagggggttgtcctgtgctttataggatgtttagcagcatccctggcttctacctactgcatgcccctagaaatagccctttcctcagtgtgacaacaaaaatgtttccagacatttccaagtgtccctgaggggcaaaagtgcccccagttgagaaccactgctcctagccaatgtgggggcaaaatttacacatccctaagctgtagcttcactcagaacattctagaattttccctagtttcttgacctgtttttctagatctcaatctctcagcctctctgaacaacaaaccccatctgaatgatgactcttgtgcagcatgaggctgttgctgccggctgagtccaccacttggaatcccgttaataggactttttttttttttttttgtaaattgaaaactctttgagcattgtgcatagagcaggaaggtatagggtattcgagaagagtttgtataaggagttccactggaaatcatacaggttttggtcccagcaatctgattttgcattatctttctgccatgtaatatctgtgtgaccgtcaacaacttatttaatctcttagacctgtgttagtattagtaaattgtgaattaaaaagataattctcactctgtctcaatgagatgttgtgaggggagtattaatgtatgtacagggatttacacatagcagatactcaatggacaaacagcagtgatgagtgaggagatacattgggagtagtatttgagattgataaaagcccagacagactgcagacaggagccaaggaggaaaatatagctatatatctgctccaggttattataaaaatattattataagtccaaatgcttattagtatcttgctttcatatgttcaagaggcaacatatgaagaaacacaaggcctggccatgctgtccagaagtggcagaaaaccgagtggatatgtgcagtgaggggggcaggtattatgtatgtggggtttttgagaaagcgagatttgagttctgcatttgacttgtttaaaataagcacagaagggtctggaaagacactcctctaccctttctgtttcccctgagggaggacaaaagctgagaagcacttgtgaagatcacagcccaggggyacaggctgactataagactgtgagctaatcatagatttacagaatgcttcgcctctccccacaccctaccaccacattagcagggctcctgtgttacgacagattacaacagaaagccctgtaaggcccagattctatttcagaaagattctctagggaatcccaaaggcaaggcgggtagacagaaataagcacactgcagaaaattctagcctctggcacctacatctatggaaacagtaaacatgtcctaactccatgcaataataaatataaacacaaacataaaaacctcacactaaaggcctatttgcctcagatccttttacccaatatattccatttggctttaaacaaaatattacagggtgtgataaaaggcaatagagttccagtagatggagtgctcctggagggcttctctaaagagctgaccctgagctga

SEQ ID NO: 684932 - DNA, 590 bp, Homo sapiens
tacttactgaaaaacgagtagcaggaactctgtattggacctggaggcagaattttcttaaactgtaatgactgatactaggagtcaaaagatactagaatgtaaaccacaagatggacagcctcctgtaaaacagtatagcaagccaggatcttttcagggttgggctagagctaaatcttggcatcyctaccctttaggccaggatttcctgatttctgaattttaattctggcagcatcatgcccacctagaaaaactgatcgaaagtaaggaagttcaagaaataggtgtcatttttctaataaatggatatacatgggtcaaaaccttttctttgtggtctgtctcgggttgataaacttggtaaaactgaagagaaaagcctctcagtgcatgtttattgattcctaaagaaacttttcttatgggctccatctctttgcgaaagtgttccaggccatctccctatggcctctatgttcagtcactgaaagtgtctcacagaatttagagatataaagaactttatttctattccaggatattctgattacaataatttgcagaaaccactagggttggaattt

SEQ ID NO: 684933 - DNA, 985 bp, Homo sapiens
tttctccgggaacccttctctggtctttccagacacaacgaacccggccggctgctgtggcctacgctagaggcatctgggcaagaaaggattaacggtaataactgcccacggccaccagggggcatgctacccgggacggctcaagggctgtgcaacgtggggcttttgtctagttggaaccccaagcacaaagtgacattgcagtggtgtacctggagccctggaccatggggcagcagtcagaagtcagtaggcactgtcctaggcagacagacaggaatgcagccccaccagcctctgcagtctttcacagagcacccgtagagacccagggcctcccgcttccctgaggaggggctgaagcagcaatgcagccggtcaggagcttgtctagatttttcagcagagagggaggtttcaagcacatcttgcttcttcacagagtccccagcccagggggctttgatagggtaaagcctacctgcaattagaatcacgattctggcccagagtgggctagagcagcccagcggacccctccccaagtcccctcccaaggatgctcctggctctccaggcgataaccacacctaatttgtactttttattatttatttttttagttttttgagatggagtctcgctctgtgtccaggctggagtgcaatggcgtgatctcggctcactgcaamttccgcctcccgggttcaagtgattctcctgcctcagcttcccgagtagctgggattacagccacgcgccaccacgtctggctaatttttgtatttttagtagagactgggtttcacctgttggccaggctggtcacgaactcctgacctcaagtgatgcctgcttcggcctcccaaagtgctgggattacagatgtgagccaccgcgcccggcccaccagatgtgtacttctgaggggcctttgtccccttacttgtctgctacctccaccaggtgggagcccttcaag

SEQ ID NO: 684934 - DNA, 985 bp, Homo sapiens
tttctccgggaacccttctctggtctttccagacacaacgaacccggccggctgctgtggcctacgctagaggcatctgggcaagaaaggattaacggtaataactgcccacggccaccagggggcatgctacccgggacggctcaagggctgtgcaacgtggggcttttgtctagttggaaccccaagcacaaagtgacattgcagtggtgtacctggagccctggaccatggggcagcagtcagaagtcagtaggcactgtcctaggcagacagacaggaatgcagccccaccagcctctgcagtctttcacagagcacccgtagagacccagggcctcccgcttccctgaggaggggctgaagcagcaatgcagccggtcaggagcttgtctagatttttcagcagagagggaggtttcaagcacatcttgcttcttcacagagtccccagcccagggggctttgatagggtaaagcctacctgcaattagaatcacgattctggcccagagtgggctagagcagcccagcggacccctccccaagtcccctcccaaggatgctcctggctctccaggcgataaccacacctaatttgtactttttattatttatttttttagttttttgagatggagtctcgctctgtgtccaggctggagtgcaatggcgtgatctcggctcactgcaaattccgcctcccgggttcaagtgattctcctgcctcagcttcccgagtagctgggattacagccacgcgccaccacgtctggctaatttttgtatttttagtagagactgggtttcacctgttggccaggctggtcacgaactcctgacctcaagtgatgcctgcttcggcctcccaaagtgctgggattacagatgtgagccaccgcgcccggcccaccrgatgtgtacttctgaggggcctttgtccccttacttgtctgctacctccaccaggtgggagcccttcaag

SEQ ID NO: 684935 - DNA, 1489 bp, Homo sapiens
tgcatttccacttttatttttaagagcaaagtccagtttaagcaacctgcagtggaaatttgataatcaattatttacatttttaacctgttctccagcgaagtctctgatggcaagcaaaagcagtcaatctctaaaatgccagcttctattcctatcatttccttaaatatagagaccatttatgagaactagggagggaattgggaatgtaggtgtgtgtgctgtgtgtgaggttggtgggagggactggggttgctgaaatggtgtagacagttggtccactccatagacttcctttatcagtggagatgctgctgtctaaattgatcagcggtttccatgacagcaaatctagataatttgtcttccacagcccttgctgtggatttaaggatttaaggatttaaggatcaaattattttaaaaattacctagttttctattccaaagttatcacctcacatactagttgttagaaagtagagacagtttctttatgaaaaaatattgaaactgctttcccacagaaatattagcatgtcaaattttatgcatacctactcctcagagatttttttttcaaaccacacctgcacagaattgaattttaaagtgagtgttttgttgctgaagctttttacaaaggtagacaatgtttattatttgtaaagagaataaagcaggcaaactatacagaaatattgaaatggaagacatttctaaaaattttggcatttccttatacattcccatggctactttatgaatcattatccctgtgaattagatcaaaccagcctgcttccagctcatctaaactcctataagctgtagttcattatgctattcagaaatacaatcacatagttaattagaatgttaggtggacacatgagcctgacaattctaaatattattattatttctaggtattttatgtcatctaatgcatttaggacatataggacatgtattctgcaaaataattgatgaggagacaatctaagacaacatactgyacctggtaaactcctcttaccaggagttcttctatatagtatgagtcaaagtttcattaaaacaacaatctgcatgtttcagaacaagtctggaaaaccgtgggaagaacaatctggctaccgtgtggtcatataacctgcaggaaatagactattcatatgcacatgtttgttcttagatctcagacctttggcaaaaaacacaggagcatttgaatgtagttttctgtgtgtcactcagattttcttcaatatctgatatctggtgtcatgcaggagtcctagagcaagaaaattgcaagaagaagcccaaaagagcatgtgaaatcacaaacaacacaaatatagattaaaaaaacaacaaaacaataaaataaaaaaatctaaaagattaccaaaaggaagaaaaacgaaaaaagtacagatggaagatataattaataatagaaatatggtggatttaaatt

SEQ ID NO: 684936 - DNA, 571 bp, Homo sapiens
ttcaggtggagaaaatgatttaaggaaatctttctatgctaatagtaaaaaaccaaaggaggaaagcttattacagtttaatagctgaaagactgatctggggtttctgattattggtaacagcaaagggcaaggaagcaaagtggcaacaactttcactcattcaaarcttggctttgccagttaagtggctctcagcttcagttaacttacccgtaaaacagggttgatgatatttgtatctaccttaaagaaatgttgtcaggccgggcgcggtggctcacccctgtaatcctagtactttgggaggccgaggcgggcggatcacctgaggtcaggagttcgagaccagcctgaccaacatggagaaaccccgtctctactaaaaatacaaaattagccgggtgtggtggcacatgcctgtattcccagctactcgggaggctgaggcaggaaaatcgcttgaagctgggaggcagagcttgtggtgagccaagattgtgcaccattgctctccagcctgggcaacaagagcgaaactctgtctcaaaaaaaaatacagaaagaaaga

SEQ ID NO: 684937 - DNA, 571 bp, Homo sapiens
ttcaggtggagaaaatgatttaaggaaatctttctatgctaatagtaaaaaaccaaaggaggaaagcttattacagtttaatagctgaaagactgatctggggtttctgattattggtaacagcaaagggcaaggaagcaaagtggcaacaactttcactcattcaaagcttggctttgccagttaagtggctctcagcttcagttaacttacccgtaaaacagggttgatgatatttgtatctaccttaaagaaatgttgtcaggccgggcrcggtggctcacccctgtaatcctagtactttgggaggccgaggcgggcggatcacctgaggtcaggagttcgagaccagcctgaccaacatggagaaaccccgtctctactaaaaatacaaaattagccgggtgtggtggcacatgcctgtattcccagctactcgggaggctgaggcaggaaaatcgcttgaagctgggaggcagagcttgtggtgagccaagattgtgcaccattgctctccagcctgggcaacaagagcgaaactctgtctcaaaaaaaaatacagaaagaaaga

SEQ ID NO: 684938 - DNA, 571 bp, Homo sapiens
ttcaggtggagaaaatgatttaaggaaatctttctatgctaatagtaaaaaaccaaaggaggaaagcttattacagtttaatagctgaaagactgatctggggtttctgattattggtaacagcaaagggcaaggaagcaaagtggcaacaactttcactcattcaaagcttggctttgccagttaagtggctctcagcttcagttaacttacccgtaaaacagggttgatgatatttgtatctaccttaaagaaatgttgtcaggccgggcgcggtggctcacccctgtaatcctagtactttgggaggccgaggcgggcggatcacctgaggtcaggagttcgagaccagcctgaccaacatggagaaaccccgtctctactaaaaatacaaaattagccgggtgtggtggcacatgcctgtattcccagctactcgggaggctgaggcaggaaaatcgcttgaarctgggaggcagagcttgtggtgagccaagattgtgcaccattgctctccagcctgggcaacaagagcgaaactctgtctcaaaaaaaaatacagaaagaaaga

SEQ ID NO: 684939 - DNA, 635 bp, Homo sapiens
atttttaggaaaacacatacacttatttttgttggttagcaatgtgtttcctattattattagaattaagtcattctaattagctgccttgaagggtaatctgctttgctgagcatttaataaacactgagtgacactttcccaggtctctcacttacgcaaaatataataacctcttagtctctacatctttatgagtctctgacgtgaataaccaggtagtataaataatcaagatgcttttattattaactgctgcctgtaaaactaactttcatctccctgayttaaatctttttctcccaaactccccacactgtttcccaagcatggctaaacttgccaaacccattagacattgtaaatattggacttccgtctacatctattctttagaactagaaaggtgttcctatctccctgatgcatttttacttccttctttgcccttctgctggtgctgctgaagttctcaaaacccattaaagtcctaaatgtgatgacaccactactgaggcagtcagaagcatgcccttagtcttattaagcttttatttccactgcattatgaaaaaaatgctcaacattattaatgatcagagaactgcaaatatgaacttcagggagatatcatc

SEQ ID NO: 684940 - DNA, 863 bp, Homo sapiens
tattcaaattgatgtttggctagtattgcctagatctacttttaatgaacaaatgtgaatttgaaagctttgtatgaggtttaaaggaataggaagcattcaccaccagaaaagattaaaacaaggaggaaatttcttaaattgcagcaaaggacacgaaggtttggccaataggaaactgctttcaaagcaatcagtaggccaacccagtgtaaggtaattagatagtctatcrgtctataaaagcttagatgaattctagctgttagtagccatatccccaaatctagattctatggttcccatttcccctaagtatttaaaagattaaaaatttacgtgtagtaacacatacatttttcctttttgttttcctccattcccttcaacctaaaaatgtgttaaccataatctattccttcgacaacaaatatttattaaggcccctttctgcatgactctaggctctgggaattaattaggtacatcattgaattctgttaacaaaccactttctagagcatttatatatatatattcatgggatacaaatgcagttttgctacatggatatattgctttttggtgaatttttaagtataaaataccaatgaaatttctctttacttttcagtagccaaattacataaatatttatgcatattgtatctcatagccatttttttgatccccaatgtctgcctttaataatgtccctgtggaagtagcgctcatatttggaccggctcccatctgcagtctacagccagattcgtctttctgaagcttagctccagggatcagccctttcctactcatagatgagctctggcttcccactgacagcaaaactaaagtcatgt

SEQ ID NO: 684941 - DNA, 643 bp, Homo sapiens
aggggctttttcccctactctcagcactcaatccattctgctgctctgtgaagaaggtgcctgtttctcctttgccttgggccatgattgtaagtaagtaagtttcctgaggcctctccagccctatatagaactgttgagtcaattaaatctctttcctttataaattacccagtcttggctatttcttcttcatagtagtatgacaatggattaatatagtgccctaatgtgaaattattcctcctaaaattatctttcagaaagaggcaatagtcttttattcaatgactataaaatcttttacataatgaggggctacatttgttataccacaagctttttttttttttttwaaaaaaaaaaagcaaatcataaatatacacacaacacaaataaaatggccatctccctaatatatgcagataggtatttggatgttaggataaaacttctgaaacagcagcacaaagagatccaaagaagtgctgtatcgcaaacaacttgggtggaaatgaatatactaaacctgatactgaagtgaactgtggaaagaaagactaaagcagtgataagagtgacttatctgaaaggtagatgtagacattgaataacattctattatgaatatgaaattagagaa

SEQ ID NO: 684942 - DNA, 643 bp, Homo sapiens
aggggctttttcccctactctcagcactcaatccattctgctgctctgtgaagaaggtgcctgtttctcctttgccttgggccatgattgtaagtaagtaagtttcctgaggcctctccagccctatatagaactgttgagtcaattaaatctctttcctttataaattacccagtcttggctatttcttcttcatagtagtatgacaatggattaatatagtgccctaatgtgaaattattcctcctaaaattatctttcagaaagaggcaatagtcttttattcaatgactataaaatcttttacataatgaggggctacatttgttataccacaagctttttttttttttttaaaaaaaaaaaagcaaatcataaatatacacacaacacaaataaaatggccatctccctaatatatgcagataggtatttggatgttaggataaaacttctgaaacagcagcacaaagagatccaaagaagtgctgtatckcaaacaacttgggtggaaatgaatatactaaacctgatactgaagtgaactgtggaaagaaagactaaagcagtgataagagtgacttatctgaaaggtagatgtagacattgaataacattctattatgaatatgaaattagagaa

SEQ ID NO: 684943 - DNA, 595 bp, Homo sapiens
accgggttccaggtcttttttctgattctaggaaagttttacagagagctctcaacagcactgaggaacacaggaaatctgtgtcaacgaagccgtcacaatctctacgattcaccagactggagacctggaagccaccttggaacacagttggtgggaacagccattttcccagactccaacagcctcgaaaacccaggcaatctcctctgcgtcactaggtggcaatcctgtgtcattaatgagaagaaagaatgactttttgttttgttttgagacggagtttcactcttgttgcccaggctggagtgcaatggtacgatctcggctcaccgcaacctccacctcctgggttcaagcgattctcctgcctcagcctcctaagtagttgggactacaggcatgcaccaccatgcccrgctaatcttgtatttttagtagagatggggtttctccatgttggtcaggctggtcttgaactcctgacctcaactgatccacctgcctcagcttcccaaagtgctgggattacaggcgtgagccaccgcatccggccaggaatgactttcaaagaaactgccagaaatttgattaa

SEQ ID NO: 684944 - DNA, 1203 bp, Homo sapiens
tgtccagacccagtgatgccctcagatgacttgtagaccaacagtgtgcagaagggtagatttttaaaaggttaaaaaaaaaaaaaaaaaaaaagaccagccaggtgcagtggctcacatctgtactcccagcactttgggaggccgaggtgggcagatcatctgagatcaggagttccagaccagcctggccaacatggtgaaacaccatctctattaaaaatacaaaaattagctaggtgtggtggcatttgcccgtaatcccagctactagggagactgagggaggacaattgcttgaacctgggaggcagagagtgcagtgagccgagatcgtgtcactgcactccaatccgacagggcgagactctgtctcaaaaaaaaaaaaaaaaaaaaaaaaaaaaaaaaagatgactgcagccccaacagtcaccttgaccttgattataacctcatgagagaccctgaagtagaaatgcaaaacgaggctgtttgttcctgagtgcctgattcacagaaactgagatgtttgatgtgtaaaccactaagttttggggttacaacgtgaaaactattgtataacaacagataaagctttggggagagactgggcttttttttttttttaaagagacggagtcttgctctgtcaccaaaactgagtgcagtggcgcaatctcagttcactgcaacctctgcctcccaggttcaagcgattctcctgcctcaacttcccaagtagctgggactataggcatgcacaacatccagctaattttggtaaatttttttartagagatggggtttggacaggctgggctcaaactcctgacctcaggtgatccacctgcctcagcctcccaaagtgctgcgattacagggtgtgagccaccacgcccaacattgtatatacttcttaagaaaatatctatgactgagaaaaaatgacatattaaatattgtgacatgtgaagttttcaaaaaatatacatatatatactggccggccacagtgatgtggtggcacgcgcctgtgatcccaactactctggaggctgaggcacgagaatcacttgaactcaggatgtagaggtttcagtgacctgagatcgtaccactgcactccagcctaggcaaaagatggagactttgtctcaaaaacaacaacaacaacaacaaatatacatatatatataacaaca

SEQ ID NO: 684945 - DNA, 630 bp, Homo sapiens
aagagctgtatatacaattcaagatcagtggttggatcttcctactagaccagtctgttgaaagaagttggtaattaatggagtttgcacaggtatgagaaatctatagtaacacccacaagcctaatctaaatttaattgtggtgaacgaataattattaaacacctgcatacccaaaccttatacctgaataaaaagacaagtgttttccacaaatataggaaaagtacaagagaaaggatcttgtgaaagagtgtcatagaaagagaaataatatatgacctcctccctcaaagttatttataatcwaatagcagaggaaagtatttatatataactataagacaagctaaataggtatccttaaaaaggtatagtcacaggaaaatgttatatctgaagtggttcattctaaaagtatgctgaattcttagcggtaggtaataggacaagctagttatagatgagccaaaggcaatataactgttcttttgactcttgagagtgaaaagccaaaagtatgatttctagtttccaaaaaggcatagtgaactggactaaaagaaacatcaatttcctgtttgtcagttatggaatgaaaaatcagagtggaaatttcactttttaaa

SEQ ID NO: 684946 - DNA, 630 bp, Homo sapiens
aagagctgtatatacaattcaagatcagtggttggatcttcctactagaccagtctgttgaaagaagttggtaattaatggagtttgcacaggtatgagaaatctatagtaacacccacaagcctaatctaaatttaattgtggtgaacgaataattattaaacacctgcatacccaaaccttatacctgaataaaaagacaagtgttttccacaaatataggaaaagtacaagagaaaggatcttgtgaaagagtgtcatagaaagagaaataatatatgacctcctccctcaaagttatttataatcaaatagcagaggaaagtatttatatataactataagacaagctaaataggtatccttaaaaaggtatagtcacaggaaaatgttatatctgaagtggttcattctaaaagtatgctgaattcttagcggtaggtaataggacaagctagttatagatgagccaaaggcaatataactgttcttttgactcttgagagtgaaaagccaaaagtatgatttctagtttccaaaaaggcatagtgaactggactaaaagaaacatcaatttcctgkttgtcagttatggaatgaaaaatcagagtggaaatttcactttttaaa

SEQ ID NO: 684947 - DNA, 1247 bp, Homo sapiens
tatcactgtcttccacttccacatcctgtcccactcagaggtcttcagggacaatagcatacacggagctgtcatgtcctatgctaacaataccttcttctggaatacttcctcaaagatctgcctgaggttgttttacagttaattttttaaaatataagtagaaagtattcactttaaaacaacattaaaaacaatagtatagcaaatacataagccagtaacatagtcatttattatcattatcaagtgttatgtattgtacataattgtgctatgcttttatatgatgagactggcagcacagtaagtttgtttacatcaacatcatcacaaatgcatgagtgatgcatcgcactatgatattatgatggctatgacattgctaggtgataaaaatttttcacctacattataatcctctggggccaccatcatatattctatccccattattgactaaaatgtcactatctcataattatataggcaatcttttccttctctgttaatttctcatcttatttaatgacaaggcttcccacaccagatgctaataccaatatttttaatttatccttttccccatcatattgtgtcaagtctaagtgctaataattctaactctcttctcatcttcactaactcttccttagggcttaggtacctataatacctcatctgaactactattgaataagctattaattgtcttaaaattataacagcaaatccaatcatgacatatctctgtgtttaaacgttttcaatcagcctggcattggctaaagtctaaaacctgtgccttttgtagtcaacaagcttgtctatgacttgaatcctgacagccggtctctcttaaagtcctctccttactcatgcctgaggttacagtcatgcaaaatgattccttkgctaatcacattcagtgtgtttaattgcactgctccccttggatacatcagttccaattggttaatgggttccaagtcttgtatcaaatatccttctccctatgaagcttttcctgactccccatcatccttccttaagggtcctgtggcacattgaacacaaaagtaatgacttcaagactgtaagcattttgacagtgtgcactgagttcatcatgctttccccagctcttactgcaatgctaaatagaagacattaaggccaaataaatattattgaatgaataaacaagtttcagatgttcctagagaacaaaggggaaacaactagtc

SEQ ID NO: 684948 - DNA, 606 bp, Homo sapiens
atttgcactcccttgttcattgcataattattcataataggcaagttatggagaaacaacttaatgtccattgatggatgaatgaatagatataatgtcgcatatgcatataataaaaatactatttagctttaaaaaagaaaagaaattttgtcttataatagaagttaggtgaacctcagtgacattctgctaagtgaaatgctaagtagaagtaaaatggtagtctccagagggcaggaagagggtctgaaaaagtactggggatgtgcttttcaatggacataaagtttcagtaatacaagatgaaaatttctagagatctgctatacaacattatacttatagttaacaatactgtactatwcatttctaattttgctaagagggtagatcttatatatttaaaaattccacaatttttaaaatgtaaaatattagtgaaaaaaggtataacctctatttgtattaagcatgagacagctggtgaggtcatgttaattatagacaaactaaaattactaaaaatagttacagacataaaaagggtaattgtatataatattaaaaggatcagtccatgaagaatacttaataatactaaac

SEQ ID NO: 684949 - DNA, 922 bp, Homo sapiens
ccatcagaccctgggcaaatttgagtttcagtttcccccagttaaattagcctattgtttatatttatttacataatttgtatgaaagatgtttataacttttaaagcccattacaaatataaatgattggaagttttctgtagtgagtagtaatcgcattttataaactcaaattatttccctttaattcctatcttgtaagattgttagaaacattatgtctgtcattttatttatattttccctttttataagattgtgtctaagttctaggaactcatgcatggttagtaacttggttgaaaagaatactcataagtattttggggggatcctataatataggctaacaactattgaggattggggctttttttagtcctctgttggtttatgtagatactgctagtcatccctcaatttcattccaaaatcccctacatgtccagggtttggggtgctccttctctgttctactaattcttagatactctgccatgttttaaagctctctcaccaatactacaatttagtataattctgatgttctcacaccttgctaacatgtacaagcctgtggaatgacagactgagcagaaatgtttctacagatccactaaagtctgagatttcattactctctacaataaaaataattcttttccagtctcatgggaaggaatttttagtttcttacctgaattctcccatgtctattgcctaaaactcagatttcttttttaggaatgagctaaagcgtagactgtaaagtcagactggcttgaatacctacatamccacttactagctttgcacttgttattttactactctgcaacttgctttcttacttgacaaatagaaatgattatagcatctacctcacagaatttgatatgtccaaatataaccagaatcttg

SEQ ID NO: 684950 - DNA, 542 bp, Homo sapiens
cgaccttccggaatttcaccattcccaattcttctgcacgaccttctggaatttcaccattcccaattcttctgcacgaccttccggaatttcaccattcccaattcttctgcacgaccttctggaatttcaccattcccaattcttctgcactgctcttatgttcaggtggctacactttcacttttttccccgaatgcacacacatgtataaatgtgtgactgtgttaacacattcataaaaagcttccrcacgcctacgcctgccaggcactgactgcattattcatcatttataataatcataaacctgacgatcagctgttgttggagtgagaataggttcccactccttgtgttccgaggtggaagtctctgcaatggggcagcattcctattctctctgccttggagagctcttccctgcagttggccccatccatggagctggtgttgagggaggcgcgctttcccaatcctccgtaccacaggtcgtacagggacagacagaggaggctgtggttttgctgctctgctggact

SEQ ID NO: 684951 - DNA, 625 bp, Homo sapiens
tgtaaatttttaaaagtttatatctaaccctatttacaatttatgaaattattttaagctttttgaactacatatacaattaaatagggttaattttctcaaacattgcaagcacttaagaaagtagttagttattgaaaaaactaaggtcttactaagcccttgagaacaaatatgctaactcaaacataaatttagtatttaggctgggcaccatggctcatgcctgtaaacccaacactttgggaggctgaggcaggtggatcacctgatgtcaggagttccagatcagcctgaccaacgtagtgaaactccttctctactaaatacaaaaaaaattagctgggcatagtggtgtacatctgtaatcccagctacttgagaggctgaggcaggtgaattgcttgaacccgggaggtggaggttgtagtgagctgagattgcaccattgcactgcagcctgggcaacaaaagtgaaactccgtctcaagaagaaaaaaaaaawagtatttaaaatgttcaaacatcttaaaaaactatcagaatgcacataaaatcaatgattttaaaatgtttgttaattatcttgtatacttcaaaataagtaagtattgttttttgtttg

SEQ ID NO: 684952 - DNA, 1995 bp, Homo sapiens
tggctcatcgtgagtccccatggagtagccatttttatcaaatttagggctcccaaatttgaacacctacacgaattaagcagttaacttactgggtgaggtcgactgagtttaaacaatgagtggtgaggtttgcggtagatgacgagggctcaccccctctgaaggaggcagttcctactcagctgtagccagttattagtatgtattaagacaaacccartgttgccacatcttttttttctcaagacaaactcgagatctgtacttgtgtgtgaaattttctgacacatgatgccagtcaaaccaggatgtactcttatctatatatgtataatgtctgttagagttgcaaagtgaaattttactttcagaggtatatgaatccatcctaaccagaaagtacccaaatttgttccaaataaccattttaaaaattaaatttatgtcaattatatctattttagaaactgctattctctaaggtacagtttggttttaaaatggttgtatatttttaaattatagtaatccttgactcatttactgatttgtctttaatattttgaaacaggaattcagtaatggaatcctcagggctaatgcactcatgtttttaagaacatgaatattcacttttcaaagaatagaatgtttaaaaattatttggtgtagtattttttctctgtaacatttaaacatcatattttccccataagctgtaagctgatgattaactcagcaaacactagttactgtgtgctagccaatatggtgatacaaagataaaaatagctgggcatgatggctcatgcctttaattccagcactttgggtggctgaggtgggaggatcacttgagtccaggagttcgagaccagcctgggcaacacagtgagaccccatctctaaaacagataataaataaaactctggcttctatagactagagaatgcaactaactttttctttgcaattaacttgcttagttaaattcattacctttttttaattctccagacttgttaagtaccttctttttaatagctggcatttgtatatataaacacttacttaattggtgagcttatcacatttcattgattatcaacatctgtaccaaaaaataccacgtaaggaccagtaattaagaaattaaaacacaatatataagccattatttttggaattttttaaaattaaaatttgtatgaaagcatatttcctcatggtttctctcttcccacttatggttaattggtaattcactgtacatgttcttataagtcattatatgaattattttttatggtaaaatctgaatagaagattaaaaccattacattgattgatgaggtaatattggtatttaaaataatgtacgtgggccaggcacagtggctcacacctataatcccagcactttgggggggccgaggtgggtagatcacttgagcttaggattttgagaccagcctggacagcattttgaaatctcatctctacaaaaaatacaaaaattagccgagtgtggtggcacatgcctatggtcccagctacttgggagactgaggtgggatgatcgctggagcctgggaagtcgaggctgccatgagccatgatggtgccactgcactctggcctgggtgacagagaaagatcctgtcacaaaaaataaaataatatacttgatacttttcaggataaagaattgttctcaggactttaagaagactgctgatcagctaactactggtttagaacgttcagcctccacagacaagactcttttgaactcatcagctgtaatgttggtatgaaacatattggtcatgaagtacgatgaaggcaaacgtttgactttgtctctagtagctcaactttcttctcctataattatagattcttttggaagtttatacgtaacaagttaacccaccctcttacttgaatctcttttgttctatgcttagacagttctcttttcttccaag

SEQ ID NO: 684953 - DNA, 2008 bp, Homo sapiens
ttttgtcaaaattcatttaactgtggacctaaaacaggtgactttttactgtatataagttatacttcaataaccctcactttaaaaagaaaggagaagattcaatccaaaaaaaattttttttttttaaatggagtctcgctctgtcacccaggctgaagtgcagtgatgtgatcttggctcactgcagcttgcgcctcccaggttcaagcaattctcctgcctcagcctcccaagtagctgggattataggcacctgccaccatgccccrctaattttttgtatttttagtagagatggggtttcaccttgttggccaggatggtctcaaactcctgacctcatgatccgcctgcctgagcctcccaaagtgctgggattacaggcgtgagccactgtgcccggcccagttcaacattaatttgaatgtttattctcatttcttttccgctctcatttgagacctatagtggaaaagctcctgattctagctcctccagcatgggagtgagcaggaaagcatgtccacagatcattaatactagtatgagtcactgcaggcctctatggggtgtcactacttctttggcttatgctgacaggcatcacatgtgggtgctatctgaatactggctttcttttttctttttttttttttagacagagtcttgctctgtcagacactctggagtgcagtgacacaatctcagctcactgcaacctccgcctcctgggttcaagtgattcttctgcctcagcctcccgagtagctgggactataggcacgcacgccaccacgcccagctaatttttttatttttagtagagatggggttacaacatattggacaggctggtctcaaactcctctcaagtgatccgcccatctcagcctcctccagggccactcccactgcacaagtccctgttgtgcaagaattctttgtcttgacctcaaaaccctcccacctgtcttgccaccactctattcttctgtttctgggtcaccctaaccactagcctgtcctgggtgagtattagcacaatggctcaagcctggttatcattcaaagtatccacttgaatccaggaaaatcaacatttctacaaatggaaatgtaagctactctaccactatgcttattctccatcctgccatttctcttcccaattcctttctcaatcaggcacaaggggcttcctaagcagaaataagacggcagtctcctttccttagaagcactctcaaggagcctttctcttggtttctgggttccttagtaatggagggaaaagtcactctagtcctcattaatgactccagttattttctattttttctggtccaggacagggaaaattctcaggtctacagtctaagctcatctccaatggggaatgatatgccagtttcccttcttgtgattacaatgttacataagaacatgaactaacaatgaaagtttacatatctacttaccctatttcataagatgctaggccctctttaactagctggtcattaatactagtagtagtcatttcaggagcaccaagagaatcgaaaagctcaactaagagcacattatcttccagaatttctgtaaaaccattaagaaagtttggggaaagaaatatgtcacaaaatatagtaaatgaggcaatttttttttttggagacagagtctcactctgtcgcccaggctggagtgcagtggcacgatctcagctcactgcaacctctgcctcctgggttcaagtgattctcctgcctgagcctcccgagtagctgggactacagacactgtcgcgccaccacgcccggctaattttttttgtatttttagtagagacggggtttcaccatgttggccaggctggtcttgaactcctgacctcaaatgatctgcccaccttggccttccaaagtgctgggattacaggcctgagccaccgcacccagcctaaatgaggcaatttttttaaaaattggaaacttaatttctt

SEQ ID NO: 684954 - DNA, 2466 bp, Homo sapiens
tttgctgagaatgatggtttccagcttcatccatgtccctgcaaaggacatgaactcatccttttttacggctgcatgatttactayagatcttaattgctacttgagaataatctttacaaaatgcttaccaatattagcataatgtttcttttcttgtgtgtttgtagatagttcatacatgtctccataagcacgagcaaatcgccacataaactctatttcatctctaaactgaaaagaaaagatggagttgcctgttaaattaacttggtaacttgtctattctattcttgttttctactgcaactttttaaaaacttaggcaggtaaactggtatttatagattattgaatctatgtatatgcatatttcgtgtgaaacatttttaatccaaatactcatggctaagaaatatgacctaatgtagtgttacatttggatcttaaaaccaattaatattatccagacactagctccatctatgcagagaagagatttgataggcaccaaaatctagaaattcttcctgagctgtggcatccttttcttcttttcctttccaagttatctattatcaatataatgagcatctcagttaatatctgtaaattgaaaatgcatatactcaaaagagcagtcactttttttactcaaattacctaaatataatcctggagagctatcaagttttagacaatgtgtttagagttgctaaatcctcagacaaatagagatttatttctccatgggacactgcaaacttttaatttttaattttattttattttattttattttttttagtggtggtggtaagagctctggacaggcttttcttattcagacccaacactaaacactgcaaaatcaacaaatgaccattggtagaaatagctttgaatacccatatctgtctcaaaatatttgttaaatatataaattagtaaaaaaaaaaaatcaaataaaagtaaatctgcgtaattatagctctggttctcatttttatgaccttagagtctaataaacttttacatttacttttttaaaattttatgcatcttaaataaaaaataaattttaaaaaattttagtcattttatagagaaattttacatcaatcatcaaaatgtgggaaccatgacacaattattatagttataactgaaacagatggcagattaaattaaaaaatggaactatacgaagtgctattgttatgtctcttaccttttctttgtggtcacgaagtagttcaaaactctccgacttgccagactcactcatacgtaaatgatctaccttctgaagaaggacatctaaatttaattcctctacacgtgtgttaaatgccttagggactggaaaactctgttcttctgtgtcagtattagctgtaatatacctaaaatcgcagaaataatcatcaactcctttgaaagttaagtataatagccagagcattccttttaaaatgcaagtcaaatcatgcccctcttatgcttgaaactctgcagtggcacgtgctttcactcagaaaaagctccagtcctaacagaagtctacaagtccctgcgcaatttgcccacgatctcgttacctctttgatctcatttcctactactcttcttattcaaatacacacaggtcacctagctgctccttcaatattctaatcacgtgcctacctcggaacctccacttgctgttccctttaatgaaacgccgtttccttagacagccacataactcacgccctcacctccttcaagtctctgctccaatttcattttctcaatgtggcccatccagaccactctaatacctcaatccccacattcccttcatctctaacctccctcataatgcttttttcttttcccatagcatgtattaccttctaacatactgtataatttactaatctactacatgtgctgtttgtcagtatcctccccaggagaatgcaagctccctgatggtaggttcattaactgatgtatcaagtgcctagaacagcactattcactgaatttgctgaatggatgatacagttgtaggaactcagcaggcactcaaaactgtgtgtgtaaactcacaaaaacacatatttatagttcaagatgatctaagtttaaactttaacgtggtttttaaaaattaatactattgcctacatttcatttttgccagcaaacaatacaaacaacttatttttattaattcagactctgcctgttctaaaaaggttttaaggaggtatacaaggatatataacatataagagaataaattagaaatagtgaaaaaagacaaaggccaaatgtgaatgaagtcaatataaaaaacacacaaattttagatagctatacctttgctacaaaggacacaaatgttcttcattttctagcatgcaatgcaatcagcttcacaacttgcagctcccgttagatagaaacaaacaa

SEQ ID NO: 684955 - DNA, 885 bp, Homo sapiens
cattggaaaggcaaatctgtttttgaaacataattaaaagcacagaatactaaccacactagatgcaacaatcattcaggttttgaaaaatcaacaatgatgttacagtttcatgaaaataaagagagaaatttagaattaaaactgtagaggttcataatttattcaaaccaaaatatctggtaggaaaataaaacagaaaggaaaaaaatcacattaagtaggaactggaaacaaattttattattaacagaaggtctttctttctacatttgtccataaaataaaaattgagatgtaaaataggtgagggcgaaactctaaaaatagagatgaacagcaaagattaagtagtccataatggaatttagactaaaatagtcttaaatccttactttagggtaaaagtcatatttcagtttagactcaactgatcagtattgataatatagaagtttctctctcagatgtgtgaagaaaccatatttaaacaaattttacatagtacacaataataacaagagccatcacaaacatgtggtgtgtaagttttgttttctatcttgaaataaaccaaaattggtaggcaatataggtttaattataaattttaaaaatctttcattatggaaaattcaaacatttaataaagacaagacaacagtaaactgaaccccaatctacccatcagctagcttcagcactaatmatttcttgttttacatatattcctctccaatattgcattattttgaagctaatcccagacgtcattatatctgtaaatactgcaatgtgtatctctaaaagataagcactctttaaaaacataaccataggccaggtgaagaggctcacacctataatcccagcactttgaaaggt

SEQ ID NO: 684956 - DNA, 1040 bp, Homo sapiens
ggccacagcctcattttaattatcaatattctccagtatctcctatcttcagtaggcttcctccacctcccgggttcaagtgatttcccctgcctcagcctcccgagtgctgggactacaggtgcgtgccaccacgccagctactttttgtattttagtagagatggggtttcaccatgttggcccggatggtcttgatctcctgacctcgtgatctgcccgccttggcctgccaaagtgctgggattataagggtgagccaccgtgcccggctggcttcctctttttttagagctcttcaggtggtcattgtgaatcagcaacctgcactcagatgtgataaacacacaatacagtttctccccagactttccttgtaagaacaacctcacaaatcttaaagaactcatgtgagtgagactatgctctgaacctcacagaatgtcatctttagagccaggcatagtggattgaatccgtgtttgtgttgccttgggtttcacagtacccagaactttcccttacatcaaatggctgaatttgataaagaatggcattcagccaaaggatgaatgcataccttgctggttttttaaatgacagttaaatgagaatatgtctgtttgctaaaagcctagactgataattaacatattaatcaactttttttggccacagacttttcccttcctgtctttgcatgagtaaaattaatttagcttttaaattacacttccacttcttttgcatatagttcattattgccttttatcacattttatctgttcttaagatacacrtgaagtcaatgaaaaatctgcctcagaataaagtagtattttatttcatagactggcctttaggttcttgtacttgcctaattaactgttactttaaaaacataaacattagggtcaggcacggtgactcatgactgtaatcccagcactttgggaggccagcgtgggcggattgcttgaatccaggagttggggaccagcctgggctacatgccaaaaccttgtctctacaaaaattac

SEQ ID NO: 684957 - DNA, 1040 bp, Homo sapiens
ggccacagcctcattttaattatcaatattctccagtatctcctatcttcagtaggcttcctccacctcccgggttcaagtgatttcccctgcctcagcctcccgagtgctgggactacaggtgcgtgccaccacgccagctactttttgtattttagtagagatggggtttcaccatgttggcccggatggtcttgatctcctgacctcgtgatctgcccgccttggcctgccaaagtgctgggattataagggtgagccaccgtgcccggctggcttcctctttttttagagctcttcaggtggtcattgtgaatcagcaacctgcactcagatgtgataaacacacaatacagtttctccccagactttccttgtaagaacaacctcacaaatcttaaagaactcatgtgagtgagactatgctctgaacctcacagaatgtcatctttagagccaggcatagtggattgaatccgtgtttgtgttgccttgggtttcacagtacccagaactttcccttacatcaaatggctgaatttgataaagaatggcattcagccaaaggatgaatgcataccttgctggttttttaaatgacagttaaatgagaatatgtctgtttgctaaaagcctagactgataattaacatattaatcaactttttttggccacagacttttcccttcctgtctttgcatgagtaaaattaatttagcttttaaattacacttccacttcttttgcatatagttcattattgccttttatcacattttatctgttcttaagatacacgtgaagtcaatgaaaaatctgcctcagaataaagtagtattttatttcatagactggcctttaggttctygtacttgcctaattaactgttactttaaaaacataaacattagggtcaggcacggtgactcatgactgtaatcccagcactttgggaggccagcgtgggcggattgcttgaatccaggagttggggaccagcctgggctacatgccaaaaccttgtctctacaaaaattac

SEQ ID NO: 684958 - DNA, 632 bp, Homo sapiens
cctctgtttcttatggtctaaatacttgcagagatggatagtttggtccatgggtagtcctttcaagagattatagttggtgttgaagatcctcaagaactataggccttggtggagtttttctagagctgttgagccattcaggtcatggttctgttgttaacactgaccccgcagattattgcagaaggatgattgtcttccctcatcgactttccatgctgtttgtaccttattttttcttgatagccgtttatagttaggatgttaagaatacaggttgagtacccatccctaatccaaaagtccacaatccaaaatggttcaaaatctaaaactttttgagcattgacatgatttcacaagtggattttttttttttttttttttttttgagacagagtcttgccgtgttgctgaggctggtgtgtagtggcacaatctcgggtcactgcaacctctgcctcctgggttcaagagattcccctgcctcagcctcccgagtagctgggattacaggcacccaccaccacgcttggctaatttttgtatttttggtagagayggtttcaccacgttggccaggctgatttcaaactcctggcctcaagtgatccgcctgcctctgcctc

SEQ ID NO: 684959 - DNA, 637 bp, Homo sapiens
gtgaggcaccatgcctggcaatgatggaatgttctacatcatgtctccaatagtcactagctccgtgtggctaccgagcatttgaaactggtcagtgcaactaagaaactgaatgtttaattccacctggtttaaacaaacatcagtttagccacatgttgctactgtgttgatcagcgtaagtctagagcagagatcatcaaactttctgttaaagggccagataataaatgtgttaggctttgtagaccatactgtctgtcagaactacccagctctgtcgttgtggtgtgacagcagctatagacactgtgtaaaggaatgagtgtggctgtgttccagtaaaactttatttacaaatacaagtggccagcccatgggctgtagtttgctgacccctagtctaaagcatggaaaagagagaaatacacaaattatctgaacacagtataatattgataaccaaatctgaaaattagggtacaaacacaaaattattttattttattttacttttattttttgagatggagtctcactctgttgcccaggctggagtrcagtggcaggatctcggctcactgcaacctctgcctcccaggttcaagtgattctcctgcctcagcctcccgagtaa

SEQ ID NO: 684960 - DNA, 632 bp, Homo sapiens
gctctgtaactcctttgctccctagagaaacatttttatagaggaggataactaatgtttattgatgttcctggaactatatttttgttatgtaatttaatcttcacatcaactttatgagattaagatctttttctccatttgacatatgaggaaaatgaagctccaagaagtaggctgacttggttaggatcacacagctagcaagtggtagagctgagttttttgttgttgtttttgttttgttttgttttgagatggagtctcactctgttgccaggctggagtgcagtggcacgatcttggctcacagcaacctctgcctcccgggttcaagcgattctcctgcctcagcctcccttgtagctgggactataggtgtgcaccaccatgcccagctaatttttgtatttttagtagacacggggtttcaccgtgttggccagatggtctcaatctcttgacctcgtgatccgcccaccttggcctcccaaagtgctgggattacaggcgtgagccaccatgcctggccagagctgagttttaatcacaaatatttctgactccatagctgyattttgtccattgtgccacttatcaatttcttacatgtggattgcttatttcagata

SEQ ID NO: 684961 - DNA, 3089 bp, Homo sapiens
cacagaaccagtaggagtttaaccagctggaatcgagtcgatcttagccactagactttaatgtccttaatcactaaattcttgtaaaatgctgaagggctcctactgttttcctttttttaaaaaaagaagtcatgtactttcagacataaaatttaagacttaaaaaaaacatcatcactttgcattcaaaaacttaaaatgattatagatgccctatcagaaagatagctttctctctacctgttgccttccttttaaaagtatgtgatgctgccaggcacggtggctcatgcctgtaatcccagcactttgggaagccaaggtgggcagatcacttgagctcaggaattcaagattagcctaggcaacatggcaaaaccccatctctacaaaaaataacaaaaattagccgagtgtggaggcatgtacctgtggtcccagctacttgggaggctgagttaagattatccttgagcccaggaggtcaaggacacagtgaactgagattgcaccactgctttgcagcctgggtgacaaagggagacactgtcttaaaaaaaaaaaaagtgatgccaataagatattgtccagttttccttaagtgctcaagtgtctatatacttgactctgtagggtataatacattatgatacaaggttgcttctttggaaaggtaataaagttgactccaatagttctaagctaagggggttttgttttgttatttttcctaatgaaacaagtattttagatggcatttggaaatttccttttttaatacgttcaacaagtcatttgcatgcagttttaaactactcctttcagtaatgttttatgatttaaagacttgataacttttaaaaatggtgtgtttaaaaactaaaagacagcaaaacctcctaacgcaatggctttagatccttttaaatattccagaaccagtccataaagaccactttctcttttttcttttctttgtttctttaataaggcagtggatggattgacagatgtggaagaaactaagggggaaaaattcaaggcttaccatcatttttactgtggaatttgtttctgaaaattacattgtgaagcaggtttaggaagcagtgtactatagcaggaaaaaagatagatttgacggatccatgggatttaggtttctataagagctgtgtcattgcccacttgcatgattgtgggctggctatttaacatccctgagcttcaatttcctcatccaaaatgaaggaatagtgacatctgctttatagagctagtggcagagaagtacttggtacatagaagtccttactagttgtgaattcctttatttctccccaaaaatatactcttctttttccttttaaaaaaatactttaaattttaaattttcttagcgacagggtcttgctctatcgcccatgctggagtgcagtggcgctatcatagctcactgcagcctcaaactcctgggcttaagcagtcctcccttcccagcctcccgagtagctgggtctacaggcgtgcaccacatgatcagctaattttttaattttttttttttgtagagatagagtctccctatgttgcccaggctagtctcaaactcctggcctcaagcagtcctccaaccttggcctcccaaagcactgggattacaagggtgagccaccatacctggcttccttctcctttaaatatgttagatatggtagccagaaaatgtaaagtggaacggatttaaaatgcttactaaatggcttaaataagcagaacaacaaaatgtaaatctaaaatattgtgggcttcctgcacaactcatgaccaaagatgtgaaatgaaaaacagacyacaggatccccaaggtagctaacagggaacagaggagaggtgacaaatagtgacagctgtgcagatccagttccttaagatctgccaattataacaaaacaaagggacatggacaatttgttgtgtaattctcacatttcttatatagttttaaaaaactccatttaaaaaaaacactcaactggaataggccttgattaccctccttcagaatctcccgtgagtcctctaccctctcagccatcttattacttccactgtggtgcaataggagttgtgattgaaccattcccacaaagagctcctgatttatgcaacccatatatttttcttttttactttaggcatctacctccaggattaattcagatgtcattcttgttgtcctgaatgtaaataatgcaaactttattttgttcataactgaattattattcaatacagtcaccactaggcatatatggcttcttaaatataaatttataaaaataaaaattcacttcctcagtctcactaacaacatttcaaatgcctagtagccgcatgtagatagtagctactgcattagacagtgaagatatagaacatttccattgttacacaaagttctattgaacagctctgctttaaagaatgtgttatttgggggatttatattgtcttctatgttgcacaaaaatcacattggtctttatgcaacttgacaacttaagaaggttgcccctcacagaatgatgattttactctgggtggtgatcatataagatcacttaatgaactctgatctgtaacaccttaactgaccccaagctgaattttatagggtgtctgtcccccaaaatgattccccaaagaagtaataaaatttgtttgaatcagaccttgaacattttccctgtgtttctgtgtttatctcaaaatagacagagatcactgtttttttaatgtggcatatctgactgctttatcagactgcgaaaatcaggagcatgtaatgagatagcgctccttcaatcactttgtaatcaagtactcatatcttctacattcctttttagaaagatctataatatctccctttattcaaccgatttttggcttgttcctctttctgcatcccaacatcctagagcattatctaaaacacacagtaggtactaagaatgtgtttgagtgaacgagctaaaaatgacttttggatttgactttagaagattaccagattaggaaaa

SEQ ID NO: 684962 - DNA, 618 bp, Homo sapiens
attttttgttaacagttgttactagaattctttttaggaaaagacgtgtctttgaagaaaagaaccttgatatgtctcctggggtaagatgcgtgacttgtgggaatgcaggtagctggtggctgaggagaagcagctcgcaggaagcaaaaggaagagtccctggttttgctcctgaccagggaggagactgataaagaagaaagggggtggtaaaagggacgagccagagacacggagaagagccagaggggcagagagaggctgggactggtgagagtgggcagaggactttgaaggggctgacattgtatggctgygatgtaagcctctcctgtctcccctctgaagtcaccagtaaactccacgatgttgacagaactctggtgagtgaaagtcaaagagagggccacgtttcatctctgagatgccttgtgcaactgagatgcatcaaaggacacagcagccaggagacagaggaggcatgcaagtggagagaggacacttgcgtctcatctgaagtgcaagcagcagagacagcttggccacagtcagctgcccctagcagacgacttctacaaggaatgtgtcagtgcagagaagcctgggaaaggacaa

SEQ ID NO: 684963 - DNA, 590 bp, Homo sapiens
aactatctcttgctactaagttacaaagatttaatacatagttgtattaagttccacttatagaggtatcatagtgaaacccttattcattgacatgtccaggctcagaaaacaagctataaccagcccaagcttattttcagacctgaaaagcagcatcttttctatatttctgaccaatgtgttatctgaaaagcggcatcttttctatatttctgaccagtgtgttagctatggtgccccagaaatagctgcaaaataaaaggttaagtgccatgtaggcctttctctaggcttagartaattcacttgattacataggaagaggctgcaatgatgacagcttccagggctgggccagaccttaccctgggtaaaatgatcctccagtgtggcccatatgtatgctttgagccaggagctgctagctgggagaacaagtttttcttcagtggtattcctgtgaccaagatttcaaataagctccatttttaattttaattggttattgtcctcctgaaattttatgacacaatctatatctttaaaaaggcactctttcttctttatacagttgttttcatgatgtt

SEQ ID NO: 684964 - DNA, 646 bp, Homo sapiens
caacactctttttgttgagggagctgttttgactaaatcccatgctgaattgagtgtaggatttttttatttctaaaatcaagttagactaaaatgtaatattttaggagttacaaattggcagcctgccaaaccttgccattggtattatgatcaacttgaactttaatatctccaggtggagcctttactgtctagtttccttactgtccttctcaagtctgcttgattatttgattctatcttgaaggcatttgagcttcagaagcctggtgttatttggccagtcaagttcttttccctattaaaagggctgtaattctataatttactagctttccgaccttaggaaagttatttaattttctaatgttcattttgcaagagaagcagctaaggctatttgcctaagggcatagagctagaccagattttctctctgggtttctttcatcttcagccaacatctgtgattctcttggttccaagaagggtctcactcrtcctttttcagcggatgatgctattactactttcttatattcctaattggctaaatgccagggacttcacaagtttttgcctgctgcacggaagcacagccattatgtttccagtagcttcatctgtcttctttttcaatttg

SEQ ID NO: 684965 - DNA, 905 bp, Homo sapiens
catttcctgccgagtggctctctagcattcttcacaaaagtgtgatcgaagcctctgccagtccctaaattgtgatccctgccctggtctctttcatagtgatcttttgttttcttacctttctccagaaagccctctatctctgtctgattaagcagtctgaggccccagagcatgtgacawgaggctgagcgatgctctgtgagctgccccgctgcagagaagcccactcagggctcagtcctgccagccccacacctccccgagacagggcactgctgatgaggaatgagttctctctttgcttctttttcaagtgaccctaaaataaaacagccaaatggaagcaaacacaagttgacaaaggcagcctcgctcccgggcaagaacggcaaccccacttttgctgcagtcacggctggctacgacaagagcccaggtcagtgcctttgcttcagagacctgccacgccaggcgccaggcctggtggaatgacctctgtcctaatgtgccttccattgattgaacgtccattgttacaggtgggaatggctttgctaaagtttcttcaaacaaaacaggtttctccagcagccttggcatttcacacgctcctgttgacagcgatggctcagacaggtacggtagaccaccactaaccgctagaaagacggaaggcttctcaagtcgggttagcacctttttatccataaatgggtttcagggcatttttcccctaatttacaaggaggcatttgtcagaagtggtcaagtgcctctaagaaatcatgtctgctgggtggaagcagaaagccggctgcggtgccttccccagggggtccagatagagaaagggggcacccatgcctgtctcagccaggcagacacacgttacacctgttctc

SEQ ID NO: 684966 - DNA, 647 bp, Homo sapiens
tccaaatagaagttcctcaactgctaacagacaggatgcgcaggtccaaactctcctaatatgtctataatgcaactttgagaaaatggctttcctcagcatttacaaaacattagtgctgtataaatgatggagtaagtttgcctgagatgccttcagaggaatgtttgcatgaggtttcccttggtaattaacaaatcggaatcataatatcagcttaacatatgctttagtgaactcatacacaaattattagaaatacaatgttaaatgctgraagtgcttttttccttatttgctcaagtgcttttataagcagttttagaatgttccggaccgttgaatttcacttgagggttactgagcattagttgggtctgaatgttgtgagaaaagcctagaactatatttagaacatatgcaagcttgcgaactgcctttcctgggaaacttgcaatagttttatacttattgattatctttgagttagcaatagtcactaacaggttgttgtataaatatgcttactacaaggtgttgattgtgtatgagttgtcatttaaagccaccagaatgggccagctacttaagtgttttgtcttgggtttgtttgttggctttttgtttccctggaaaatgggttttaa

SEQ ID NO: 684967 - DNA, 1219 bp, Homo sapiens
tttttttttttttttgagacggagtctctatgtctcccaggctggagtgcagtggtgtgatctcagctcactgcaacctcttcctcccaggttcaagcaattctcctgcctcagcctcccgagtgtctggaagtacaggcgcccrcaaccattcccagctaatttttgtaattttattagagacagggttttgccatgttggccaggctggtctcaaactcctgactgcaggtgatctgcccaccttggcctcccaaagtgctgggattacaggtgtgaaccactgtgcccggcctatactgagctattttaaactctttcccacccctgtactaagtctaaaatccggcgtatgttttacatctttattcagactagccatattccaagtattcaactgccgcatgtgacaagtggctgccgtgttggacaggacaggttaaatgtttccttcatgtcccaaaacctgcatattgtaagtttttattaaatatgcacccctggggtgccctgtctcctgctgaggaaccctcctgacagcagcacatgctctgcttagaccttctcttccagtttgagcccgtttggaaaaagccaatgtattttaacttactatatcccatccttgtgcaaacattgccatgcctttgcaagatccattggcttcaacatcgctttgacttgcctgcttacaccagatttatgaccataggaagaaagttacattttctggttcttttttgttttttgttttttttgagagggagtctggctctgtcgccagtctggagtacagtggcacgatctcggctcactgcaacctccgcctcctgggttcaagtgattctcctgcctcagcctcccgagtagctgggactataggtgcgggccaccacacccagttactttttgtttttgtttttgttttttttttgagatggagtctcactctgttgccaggctggagtgaggtggcgcagtcttggctcactgcaacctccacctcctgggttcaagcaattctcctgcctcagcctcctgagtagctgagactacaggcacgtgccaccacacccggctaattttttgtatttttagtagagacggggtttcaccgtattagccaggatgatttcgatctcctgagctcgtgatctgcccgcctcagcctcccaaagtgctgggattacaagcgtgagccaccacgccctgcctattt

SEQ ID NO: 684968 - DNA, 1219 bp, Homo sapiens
tttttttttttttttgagacggagtctctatgtctcccaggctggagtgcagtggtgtgatctcagctcactgcaacctcttcctcccaggttcaagcaattctcctgcctcagcctcccgagtgtctggaagtacaggcgcccgcaaccattcccagctaatttttgtaattttattagagacagggttttgccatgttggccaggctggtctcaaactcctgactgcaggtgatctgcccaccttggcctcccaaagtgctgggattacaggtgtgaaccactgtgcccggcctatactgagctattttaaactctttcccacccctgtactaagtctaaaatccggcgtatgttttacatctttattcagactagccatattccaagtattcaactgccgcatgtgacaagtggctgccgtgttggacaggacaggttaaatgtttccttcatgtcccaaaacctgcatattgtaagtttttattaaatatgcacccctggggtgccctgtctcctgctgaggaaccctcctgacagcagcacatgctctgcttagaccttctcttccagtttgagcccgtttgraaaaagccaatgtattttaacttactatatcccatccttgtgcaaacattgccatgcctttgcaagatccattggcttcaacatcgctttgacttgcctgcttacaccagatttatgaccataggaagaaagttacattttctggttcttttttgttttttgttttttttgagagggagtctggctctgtcgccagtctggagtacagtggcacgatctcggctcactgcaacctccgcctcctgggttcaagtgattctcctgcctcagcctcccgagtagctgggactataggtgcgggccaccacacccagttactttttgtttttgtttttgttttttttttgagatggagtctcactctgttgccaggctggagtgaggtggcgcagtcttggctcactgcaacctccacctcctgggttcaagcaattctcctgcctcagcctcctgagtagctgagactacaggcacgtgccaccacacccggctaattttttgtatttttagtagagacggggtttcaccgtattagccaggatgatttcgatctcctgagctcgtgatctgcccgcctcagcctcccaaagtgctgggattacaagcgtgagccaccacgccctgcctattt

SEQ ID NO: 684969 - DNA, 645 bp, Homo sapiens
tttaaacatcatatttttaaaatatgtggtatattttggagtaaaatgcaaaataattgcatgaatatgtgaaataaaacaggagatttatagtcaaatgtgctctcccactcttgtgtctgggctgggtctcccaatctccaaaaatgtggtggtaacatgttgtcttccattgcctctgcgggaactgagaagggagagcttccccattgtgtgtgatgttgggcaacccctatacctctctgagcctcccatccctcagcagcacgatggaaatgctaatagcacctccccagggctggcttcacagccacgcgacctgcgtaatcccacagagccctgaacttcaaagggccccacagttggttcgatgctctgcccttgccatcttgaaattcttaataacttttgaacaagggacccccttgtttttactgagccccgcaaatgatatagttgctccccagaaatgatgtagctggtgctgcacstttcagcagagttttagcaagggttaaatcagaaatgtgtgaaagaagcccacacggagatttatccctccctccctctctccctcccttccttcctccttcttctttccctaaacatccattgagcactcagtatactgggtgctgtgattca

SEQ ID NO: 684970 - DNA, 1197 bp, Homo sapiens
agatagtgtggataatttggagctaaaataatttaattatattttttaaaatatttgttgataggtttgtacccagggctttcattcaagatagagtatcatttatttcatagcctatattccactagcagaagcttactttttttttttccccccttgggtaattttttttaattgtctaagggattaactgtcacctcattatctttgttaatcacttycagagcttttcgctattgttcatcacagtagtcaagaggatcacaaagaaagtgctaaatccttatttacaaagaaaattgattctcagctttgcttatatctgctatatatttcctttgaatatttgttagggtagcaatggttaaaattaaatatttattgagaagtgatttttaatgttgtgggaaaatattttatgtcagaaaaatattgaatttcaaaaccatggaaaatagaaaaaaatcattaagagacttgactaatgtctcctcagaatggtttacaatattctgctattcatttactttcttcatgagcagtgatcttgaaagttttgaagaaagacttttgtcttttgttaaatactttggaatttttttggcaatgtgaagaaattttatttacatgtttgataagaacatccacagacatctcttttaaagataaaaaacttcaatatgaaaattgaagttataaactaaagatcctctctcagctaagaattcctttttagaaatgtataaatacaattatcctttaataaataaacatatcttcaaattttctcagtaatgtgtcactgaaacacattaaaagatgacatcgctactcacaataacagtacaaaatgaagaaaataattgaaacatagatcaaggatgttaaagatgggtgaaaaaaattatcttgctttttataactaaagtttgtttaatattcataacaggcttatagaattcttaattgttccaggtaaaatacctaattttctttgttttgaaagcattctctttttcttactaaatcaaaaacagagaaaacttagggtacacgaatcaattatggtttttagaacaacaatggataagaatgttttaaagatttaggaatcttttaatctctgtgacgtttcatcatttccattctgtgtcgagtttttggttgcaaagtaatagaaactgatgttgaataact

SEQ ID NO: 684971 - DNA, 1197 bp, Homo sapiens
agatagtgtggataatttggagctaaaataatttaattatattttttaaaatatttgttgataggtttgtacccagggctttcattcaagatagagtatcatttatttcatagcctatattccactagcagaagcttactttttttttttccccccttgggtaattttttttaattgtctaagggattaactgtcacctcattatctttgttaatcactttcagagcttttcgctattgttcatcacagtagtcaagaggatcacaaagaaagtgctaaatccttatttacaaagaaaattgattctcagctttgcttatatctgctatatatttcctttgaatatttgttagggtagcaatggttaaaattaaatatttattgagaagtgatttttaatgttgtgggaaaakattttatgtcagaaaaatattgaatttcaaaaccatggaaaatagaaaaaaatcattaagagacttgactaatgtctcctcagaatggtttacaatattctgctattcatttactttcttcatgagcagtgatcttgaaagttttgaagaaagacttttgtcttttgttaaatactttggaatttttttggcaatgtgaagaaattttatttacatgtttgataagaacatccacagacatctcttttaaagataaaaaacttcaatatgaaaattgaagttataaactaaagatcctctctcagctaagaattcctttttagaaatgtataaatacaattatcctttaataaataaacatatcttcaaattttctcagtaatgtgtcactgaaacacattaaaagatgacatcgctactcacaataacagtacaaaatgaagaaaataattgaaacatagatcaaggatgttaaagatgggtgaaaaaaattatcttgctttttataactaaagtttgtttaatattcataacaggcttatagaattcttaattgttccaggtaaaatacctaattttctttgttttgaaagcattctctttttcttactaaatcaaaaacagagaaaacttagggtacacgaatcaattatggtttttagaacaacaatggataagaatgttttaaagatttaggaatcttttaatctctgtgacgtttcatcatttccattctgtgtcgagtttttggttgcaaagtaatagaaactgatgttgaataact

SEQ ID NO: 684972 - DNA, 1197 bp, Homo sapiens
agatagtgtggataatttggagctaaaataatttaattatattttttaaaatatttgttgataggtttgtacccagggctttcattcaagatagagtatcatttatttcatagcctatattccactagcagaagcttactttttttttttccccccttgggtaattttttttaattgtctaagggattaactgtcacctcattatctttgttaatcactttcagagcttttcgctattgttcatcacagtagtcaagaggatcacaaagaaagtgctaaatccttatttacaaagaaaattgattctcagctttgcttatatctgctatatatttcctttgaatatttgttagggtagcaatggttaaaattaaatatttattgagaagtgatttttaatgttgtgggaaaatattttatgtcagaaaaatattgaatttcaaaaccatggaaaatagaaaaaaatcattaagagacttgactaatgtctcctcagaatggtttacaatattctgctattcatttactttcttcrtgagcagtgatcttgaaagttttgaagaaagacttttgtcttttgttaaatactttggaatttttttggcaatgtgaagaaattttatttacatgtttgataagaacatccacagacatctcttttaaagataaaaaacttcaatatgaaaattgaagttataaactaaagatcctctctcagctaagaattcctttttagaaatgtataaatacaattatcctttaataaataaacatatcttcaaattttctcagtaatgtgtcactgaaacacattaaaagatgacatcgctactcacaataacagtacaaaatgaagaaaataattgaaacatagatcaaggatgttaaagatgggtgaaaaaaattatcttgctttttataactaaagtttgtttaatattcataacaggcttatagaattcttaattgttccaggtaaaatacctaattttctttgttttgaaagcattctctttttcttactaaatcaaaaacagagaaaacttagggtacacgaatcaattatggtttttagaacaacaatggataagaatgttttaaagatttaggaatcttttaatctctgtgacgtttcatcatttccattctgtgtcgagtttttggttgcaaagtaatagaaactgatgttgaataact

SEQ ID NO: 684973 - DNA, 628 bp, Homo sapiens
gataagaagtgtctgcaagagagaaccaagcaaaactacattttgaatcaatgtccatgaagtacgatttatgtcgatatacctcattcatttaaaggacacaagttaatgacttctgaaagatgtctactcatggagtgatcaggatacataatcttttatattattctcaaagtttcctcatacccctctatcgttcatccctccttctgctcccagacaggaaaccaccaattttccttttgtcactatagattatttctagttgttacaattttatatagatggaatcatacagtacctactcgcctgtgtctggcctctttcacttagcatattaattttgaaatttattcacattttgtggtatcagcagtagttcatacctttttattgttgagtagaatttaataatatacaattacatttattattttttgattcaactcttaatagatattcgtcatttgatgagttgtttccagttcttagctatcatgaacaaagctgcaaagaacatttgtatacatgtytttgtgtgaatatatgttttaatttattgggcgagatgcctaggtatagaatggctaggagaggttaaacttttagataaaactgccaaatcatg

SEQ ID NO: 684974 - DNA, 703 bp, Homo sapiens
cactactctcctgtatgccttctatggttatagaaaaaaaggaactacaaattattctctgaatatacttcatattttttctatctttatgcctttgaaaagttatttctatctagaattctcttaccttccttaccccgactcctacatgaatttctatttttacccactttttaaaaagccagatcacatattacctccacccttaagtaatttttataatcccctaaagcaggggtttccaatcttttcgcttccctgggccacactggaagaagaattgtcttaggccacacataaaatacactaacactaatgacagctgaagagcaaaaaaaaagaaaaawaataataataaatctcataaagttttaagaaagtttacaagtttgtgctgggctgtgggttggataagcttgcttaaaagaataatagctctcttcttggaaatttagtagtagttgttgtagtacatttacatccttgttgatctatcattctctacccgtgtttttgttttaaaccctctactaggctgtgggcaacctgtgggcagggaccatgccagactgatccttgtgtcctccaaagcacatagtagctatccaataaatatttgttgaattattgagtatataccaataattgaatactgagtaaatccccaagtgtcctggctcatgagcttttccttaacataatt

SEQ ID NO: 684975 - DNA, 2733 bp, Homo sapiens
gtctccaaatgattgaaaattaactaatatttccctttaagccattatttgtatttgttaactctacttaaaatctttaaatatggaatttttaaagttccagttgctctatggccacatgtctatgacaagggcaaattctgtgactagattcagtgaacgatttccacactggtgcagcacacagcaggggacrggaaatcctggtcctcgctctttcagagtcatcttaattatcaggggcatttcgatttgcactgtcatcccagccctcatagggatgcagaggccagagtaactgccaagaagccatttaggaagtcagcaaagctccacaaaccatctgtcttctctcttgttctcacttgttatcagtgtagacaactaataaggaggcattaaactcagggtgcttgaatatattttccccatgtaactacagaccagatgtcttttgccaacagggggatatgaacagaatctaaagtagccttttcccaaataagataaaacaatttcaaaactttatgcatctagcagacaaaaaaagcaacgaattacgtatactcttcagcaataaaaatgaataaactactgatacaacatggataagtctcaaaatcatgatgtaagacaaaagaagaagacagacacagaagagtatgtactgtatgattcaatttatataaacttctagatatgcaaaactgagctgtggtgatagaaatcatcagtggttatgggtgggggattgactgaaagggacacaaaggaactttctggggtgacagaaatgttctatgacttgaacataatggggtagtgattacacaagtgtatgcatttgtcaaaacttaaaatgtgtacatcctattgcaagtaaactatattcctaaaaagcagattttaaaaaatctactaaaagtacaaaaacaatgtgtcaaagacctttcttggttaatgactctcttagagatcaacagaagtggcaagcaaaaatacaccaacaatatggaagatctgaatcacaaaaatatcacatttcatttaataagcacacacagaaatttttatgctcaacaaaccaggtatacatacatatttttaaaatatccaacgcatcatttgcaaaagctgatcatgtgttcagtcacaaagaaaattcctaaaagttgaaaacctttaagatgcaatcacctaccacaataaagaaaaccagacagataaaccaaaaggctaggacaactaacatgcattccatgcatttcaaacacatctcaaccacctggaaaaattctaaaaacacttataaataatttttctattaaacaagactaaaattaaaattaaagtatatcaagagattaatcacaattagaacaccgtatggcaaaaaaaaaaaagtcaaggtactcagaggaaaatatacagcctccaatgcatttcatagaaaataagcctgataataaatatgtattcaacttaggaagttataataaaaaacaaaccactagccacagtggctcatacctataatcccagcactttgggaggccaaaacaggaggatcgcttgaacccaggagtttgagatcagccggggcatgagatctcatctctactaaaaattaaacagaaaaaagttatctgggaatgatggcacatgcctgtgctccttgctcctggctcctggggaggctgaggtgggaggaacgtttgagcctaggaggctgaggctgcagtaagctgtgactgcaccactgcactccagcctaagcaacagagggaggccctgttccaaaaaaataaaataaaattaacaaacaaaccaaaataaagaacaaagaaggaattcagaaaaataaaagcagaaattaatgaaaaagcaaaccaaataacaattagatatgagctggttcttgaaaagcccattgggagctttatttattatttattaactgtcctaaccactaacaaatttgatctagataaaattattagtattacaaagagctaaaattcaggcctaagtgctagacactgctaagcactttatatattttttctcatttaattctcatgtcaacctgataaaaaaaaactattgtcttctaaacacttcctatcacccttccttttttttgtactcagcactttgctctaaaacatcagatttataaaaatcttgtttaatgtttgtgccacaagaatgttaagttccatgaaggcaaaacatttttatgttttgttcactgttgtatttttaatacctagaacaatgtctgacactaagtaggtcctcaaaaaattttttagaaatgagtgacataattcctattatacatatagaaactgtgataagagcagataataagtgcatattgaatttataggagaatataaccacaggtacacaggagaatatgaaaataataagtaaacataatatgcatatttatgtcaatgaaactgaagtctcaataaaagaaacaattttctagaaaaacataaattatcaaaatgattcaagaaaatgcagaaaacttggataatttagtataaattgaaaaaataatagaaactttatccccaaaaaagcagcagaaccaaaaaatttaagaggaaatttcaaactattattagatcattttccttatctaagaggttcattttttggttccacataaactggaaagtagttttctccaattctgtgaagagagccaatggtagc

SEQ ID NO: 684976 - DNA, 603 bp, Homo sapiens
tttttctaaaaatatgcctactactggcttttttctttagttagtggcaacaaagtaatcttttataatacctatgatgatgactaaaatgacaagattcaccctaaaatttccctgtataggaaaacaatgacatgtttacacaaataaagctacagtaatacattactgggggcatgatggcatactgatttcaacagcatggactttggaggcagacggtttggattcatattctagctttaccatttactagttgtgtgactgcaggcaaattacttaacctcagtttcctcatttgtaaaattcagataattgtagtgcctacttcatagagttgttgtaagtattaaatgagttaatatgtataagatactcattatagtgcctgacacatcatgctatttaagtattagcttttgttattgttactcttttttttttttgatactgtctggctctgccactgaggctagagtgcaayagcgcattcttggctcactgcaatctctgcctcccacggctgaaaccatcctcctagctcagcctcctgaaagcttggactacaggtgcacaccaccatgcccaactaatttcttgtat

SEQ ID NO: 684977 - DNA, 853 bp, Homo sapiens
aatcaaggatcacgcatttcatttcttagtcatatccatgacttctcattttaaaaatgaatgattagacagatttgacaagatacatacacacaaataatgatttgggtaagaagaggaactcaaactttttagttcataccctactgcattgttttaatttttttcaattagcatattcaattcatgtaatttttaaatacatatatatgcacacttttttttctctttttgagattgggttttgctctattgaccaacctaagtgcagtggcatgatcatagctcactgcatccttgaactcctagcctcaaatgatcctcccggttcagtctgctgagtagctaggactataggggtatgccactacacttggataattttttttgtttttatttttttgtagagacagggtctcactatgttgcccaggctgatctcgaactcctggcctcaagtggtcctcccacctcagcctcccaaagcgctgggattacaagtgtgagctactatgcctggccttaaaccaatatatgttttaatgaaggatcactttttaaaataatttatgatgttcatgaaatattgatatttctgcttagtatttttkctgattatactgcaggttccctatttgctaaaaaatatttgattttctgggacaatacattggattatgaaaattctgaaaacaattactttatatttcacaatgtcattataaatttagtctgttttgcctaaaaagtagagtcaccaacttaaaatactcaaagaacccattagtactaaatcacaatttaattgaaaaaaaattaagcagtcttaaaggatttcaggagattatattca

SEQ ID NO: 684978 - DNA, 632 bp, Homo sapiens
gaaagaaagaaaaaamaaaactgttagcatcatattgacaactaaatagataggtcgaaacgttctgccgtcccatttggcatcctggagaggttaatgttaatagtcagtggttgagccagaggcatgttcctaaatatcaccatgctatgcaaagtcacacaaaaaaacacacagggcttatgggaaaaaaaaaaaggaattatggctgtaacacttggaaacatcacctgtgaacattaaaaaaaaagataaggccgggcgcagtggctcatgcttgtaataccagcactttggaaggacgaggcaggtagatcacctgaggtcaggagttcgagaccagcctagccaacatgatgaaaccccgtctctactaaaaatacaaaaaaattagccgggggtggtggcaggcacctgtaatcccagcttactcaggaggctaaggcaggagaattgcttcaatccgggaggcggaggttgcagtgagccgagatcgcaccgttgcactccagcctgggcaacaagagcaaaactccatctcaaaaaattaaaaaaaaaaatcttaaagataattttattcatgttaaataaattaagaaatatgtaaatactacaatgaatattgtactttt

SEQ ID NO: 684979 - DNA, 658 bp, Homo sapiens
ttgttcaaaccatagaagtggggggagggtatcactgaactggataataacactaggtgtagttagctgtccctatatagcaagcattgtgtttattgccttctattagttatttcctttaatccaacaaagtagagttccatttttcagatgaggaaactgaggcttggagaagtaggctccaagcaggctttcatcctctacactaaactgcctccagagaaagtgccccagagcagaacaagccttggaatgctgtcgtacccctggcccatcctgagggatgctgctgtacttccctcacagcgacctgtgtggaagtcgaagcccaaaaggcaggcacagctgacatcctggccrggagtacccactcccatgccagggcatagtacataatagccctgtttcacctgcctagtgtccacccctcacaccaggagtgatatatcctgcatgcagacccaccagccggaagatggaggtagccaggcactcatgggtggggacaaatgatgacaggaaataaccaaggaagtcatgaatgccatggtaactacctggcggggggtgagaaacaagggctttccagcacaagtcacaacttgggcacttagcacagtgaccaagaatctgtcatccagggtccgagacaaacctc

SEQ ID NO: 684980 - DNA, 857 bp, Homo sapiens
ctggttaagagtaaaggcttaggaatcagataaattagtgtgagaattttgctctgccaccgaatacttgtggaatattgggcaacgtacccaatctttctaagcctcccattacctcatctataaaatcgggatcataggtacctcatggatttgttgtgaggataaagagagataatcaatagtgatattgctgttattaacttttctttctctaaaaacttacagcagaataaatgatgcctggctaattaagaacgagtgaattttgcttgtgatgtatttgtgtgtctcttgaaactccttccttgctccgtagtacttaacaaatgcatagtgaatgcatgcccagtaagaggacacttcactgtctcatctctcctattggatccccagttcctcagggataccagcttctggctgttctttctataccctctcccaggccagatgaactcattctgtgaactgaaagccattaagatagaaaaggagatgcctctatctaatctgaggctaataggagaggaaaacttttacaaactggagggggcatgaatttctagatagcgttaagtggycatatcaaagtataacccacggcttcaatttggtctgtcaaagatggaattaaaagtaaatttgaagtttcacaacatagttctctctattatgggtgcttctgtgcattaaaatcatctgtatgaggctcactgggatgggcagagattcaatcactgctaatggcttaaggaaatggggtggtgagaattagggtcatctatcccaattggggcaagaaggagagctagaaaatgtttttcaatcttgacatcttgccagctggagctgaaggg

SEQ ID NO: 684981 - DNA, 506 bp, Homo sapiens
gaaagaagttactgagaaggcggaagattaagtggcttacctgaagtcacatagctagattaaataatactaaccacaatgaccagtagtgaaataataaactgccaaaaattaatttataaattagttatttgtaagttggaattaattttctcacagaaaattgtgattagactttcagagtagccacaaaattctattgaacacagtgttactgaagtgctttagggggtcttggacaaccaagaaaaaaaagaaaaagagtcaggaagtccaaacatctcagcttaacagctgrtgatctggctacagcgtacgtctctggttttctctgccattattcattttcttgtacagatacagataaattacctaaccaaaattgcagagctaattatttcctctgtaaaaaaaaaaaagattgtccataattttaaaaccagtacagtatagcattctttgcattgaatgattcatattggccttaatgaataaaacaaggttgg

SEQ ID NO: 684982 - DNA, 1456 bp, Homo sapiens
gatatcacaattttaaataagatggtcaaagtaggcattgattgagatgtgacattgatgaaagacctgaaggagacaagtgtctatgttgctacttatacttacatttaaagtccttcctaaaacttcagacttaaggcaaaaccaatgcatcagcttatatctggtataagcaaagttggggacttgccctcttatcatgaaactaatcagacacatattttatccacttgcatttaacaacaaaagccattagaaaacctaattttctgaggcagaatgtgttaaaataccaacccccaaatccttttggtgtaacaaagctccccttgtaaaaactctggccctacttgttggtgccactctctctcaggtaccattctttctctgaagacaacaataacaactgctctcttatcaagattaaaaacagaaaccaaatttttgttggtgataaacagccaacagctagtctaagcattaatccagtagtgtatgaataagttatgaaaattctctttgccagaaaaacaatcaactgtctcactgctcacctatcagcctttatttcctactaggtactatatttatggctcctatctagaaaaaaagaagttgggaacaattcaagcttaagtgcatattattgaaactgtaaatctctattccagattgtaagctattatcatatacttatttttaagactttcagattccaatgtttctcaaatgcagaaaattatcttacaagtcagcaggtcagggtttgatcttgaacagaaccagtttagagaaagttcccatggggagctttcaagattcctgaactacaacacatgtctgagaaattagaaagtccacagcaagtttctgttacatggattataactgagtttgtgagtggttggtgttcgctgccactaagtggccttgctcaaagattctgccccaggcctcgtgtggtagctcatgcctgtaatcccaacattttgagaggccaaggtgagcagattgcttgagtttgggagttmaaaaccagcctgggcaacatggtgaaaccctatctctacaaaaaatagaaaaattagccaggcatgatggtgtgcacctgtagtgaggcaggaggatggcttgagtctaggaggtggagattgcagtgagccgagatcgcaccactgcacaccagcctgggcaacagagccagatcctgtcttaacaaacaaacgaagactcatccccaacaccaccccacgtgtctaccgcctgcctgcatgcttctggctgctcagctgtctgcacttctgactttgctcaacacagctccggcctttgccaatcatgagctgccaagactagagtgtgtggctgaaacacttgaacactcacgtgaaagaaactcaacttctgcttttgggtaatttgctgacagttgctttatttccttttcttctattaa

SEQ ID NO: 684983 - DNA, 597 bp, Homo sapiens
cagggatttttcaccgtcatcacatttccaaaggatttaagaaaacttacaaaaacacatgacattttaaaaagtgaggaaatcgaggatatgggaaaagaaagtgacatccagatctcctaatatgatgtaaacaatggccagcacagtacttcctcaaatcgttttggaagaaaaagtataaataatatccagcactgtgattctctccctgctaagcaactgcaattttgggttactatgtaaatgtagcagtaggtgccattgagaggcagctttctaataagaaaataagtattttaattaaattgtatttcggccgggctcatgcctgtaatcccagcactttaggaggcagaggcgggcggatcacaaggtcrgcagttcaagaccagcctggccaacatggtgaaaccctgtctttactaaaaatacaaaacttagccaggcatgctggcgggcgctacgtgatcccagctactggggaggctgaggcaggagaatcacttgaagccgggaggcggaggttgcagtgagccgagaccatgccattgaaaaaaaaaatttgtatttcaagatttgactacaatactgaaa

SEQ ID NO: 684984 - DNA, 605 bp, Homo sapiens
agctgtgataacaggaactttactgagtcctgactccgtggcatatggtctgtgtcctactttccttcacacaggcccctgaaccgctcctgcagcaatgcagcctgtgcaggaggaagccacagccctaacagctgctgagatctgggattctgtgagaagctcccttcccatttcttgccaggcagagggggctcagggtggaactgcaacccctggtcaaagtttgtaggattagctgacaagtagggtagaagaaaaagatacatacatacatagataggtaagtagatattaacgaaaaatgtttaagcttccaggagtcattgttgactgcccttgcttgtcactgtcctgctatacctgagagctgacacctgggaggattaaggaccaaaatacagaatcgagtaatcaatgtgtaaatttacacgtgcataaacaggtgcataggtgtgtatttggttctcctctgtgagtttttgtgataaaattgtccatattttatttatttatttactactccttgcacagccgggctaccccataggcaatgcrcccagaggagcctatattttaaactctttattataaaaaaatgttca

SEQ ID NO: 684985 - DNA, 260 bp, Homo sapiens
ggattaaaatcccttgaatataggaggcctgcacacagtagcccccarttttaactgtctgctgtcagtgagtgggtcattctcaatagttactgtagagttaaaaatactgttatattgcctatgaataaagaatgggagctcttttgaaaaatcaggtcttggttgggagtggtggctcacgcctgtaatctcagcactttgggaagccaaggcgcgcagatcacgaggtcaggagttcgagaccagcctggccaaca

SEQ ID NO: 684986 - DNA, 632 bp, Homo sapiens
tgacgtcactgagcactggaaacgtggcyagtttgaatccagatgtgttgtaagaataaaatatactctaggttttaaaaactttgtatgaaagtaagtattctaaaatcttattaataattttaggttgattacatgttaaaatgacgacattttggacatattgagttaaataaatcattaatatgaattttgtttcttttcaaaaatgtggttttgctgggcatggtggcttatgcctgtagtcccagctaccggggaggctgaggcaggagaatggcgtgaacccgggaggcggacgttgcagtgagcccaggtggcaccactggactccagcctgggcgacgcagcgagactccgtcacaaaaaaaaaaaaaaaaaaaaaaaaaaaaagccaaagccaaaaatgcggttgctaggaacgtttaaattacatgtatgtgccccgttaagggtctatcaggccatgctgccctggacagtcatggctgtaggctgcagttctctggcccctgacctccctgcttcccgctcccccagcctctcctcctcctctcctctgtacgtcagccagcacctcagcttcgtcctcacaggggactctcacggctggaaagacttggtaagatggc

SEQ ID NO: 684987 - DNA, 632 bp, Homo sapiens
tgacgtcactgagcactggaaacgtggccagtttgaatccagatgtgttgtaagaataaaatatactctaggttttaaaaactttgtatgaaagtaagtattctaaaatcttattaataattttaggttgattacatgttaaaatgacracattttggacatattgagttaaataaatcattaatatgaattttgtttcttttcaaaaatgtggttttgctgggcatggtggcttatgcctgtagtcccagctaccggggaggctgaggcaggagaatggcgtgaacccgggaggcggacgttgcagtgagcccaggtggcaccactggactccagcctgggcgacgcagcgagactccgtcacaaaaaaaaaaaaaaaaaaaaaaaaaaaaagccaaagccaaaaatgcggttgctaggaacgtttaaattacatgtatgtgccccgttaagggtctatcaggccatgctgccctggacagtcatggctgtaggctgcagttctctggcccctgacctccctgcttcccgctcccccagcctctcctcctcctctcctctgtacgtcagccagcacctcagcttcgtcctcacaggggactctcacggctggaaagacttggtaagatggc

SEQ ID NO: 684988 - DNA, 2291 bp, Homo sapiens
cagattatttaaatgattgatgtagtgtggttctttatgatatatgtcatgtctttttagaatgaacactcctagagggtagaacttatgaagtgtgcactttaccagtaccaggccattgtgggtccagttaataccaagccacacaagttcactatgaaaaaagatatctagtctaggataagtcatgctcttgactttatgatagcctcttccccaacaacttcttcttaaaaaggaagaaggtgggggaaagagatgaaaagaaagacgagttaattcttcatcatgtcagttaaaaagccctcaaagactcctagggcccataagattaagataaaaattgtttttttgcatgacattctttataatctgagccctaccttcatttctagactttcagtcctctccccacctggtgaaatctatctttatcttccaagattcaccttgcatgccataatctcaatgatgacacttttcctgaactgcttcatggtcagaattactcactttcttgttggcagtctcaattaacctttcaagtaaaaagtaacaatgacaattagataatatatgtaatgtactagcccattcattgcatggcatgcaggagatgggtgctcaacagaaaattgttaacagaatcaatgtcctgagagactactattactatttgcaatttatataatggaccattttccctatcgtattcatgcattagagatagggaaacaaaccttagaacagtgacaaagttgcttctgagaattggtgcttctctcaaacaataactttctgaatttgagtccataaaacattcctctaggctaatttctgtgtactctaataattttggttcaatctaatgactatttattgagaagctactatgtgcaagaaaccatactctgctctgaaaatggtaaaatgagtaagaaacaaacccttgccctccactcccatcaagaagctaactgttctgatgggaatgcagacatacccacccctaaaaataataatgatcaagttgtgaaaaagtataaacaaaatgcttcagggttatgcaagagtgagaaacaaatgagaccacatcagctgagccttgaagtacagcttctcatggggaaaagaagttgagtatgagacattccatctaagagagtaacatggcagaagcatgaaggtgagagtgtacctgtgagtaattcacagtggctggagcacaaggtcagtaggggaactggtgggagacaaggtcatgaaagaaaaatggaggcaaatggtgtttttttattgttgcctctagtaatgttcttaaattgtgaactagaggttctctcctttatgcaactcattaatgaaactatcaacttaataaaagataaactaggaattttttattcatcttccagaaagaattaatggcacatttcttcaaatagtaagcatgtctaatacatttacaatgtgatttgctttgtaaatgtaaattgatatgcaacttttcaggaacacttggattgtaaacaaactatrtcttgactggtaggagtgtcatctcacctgcatagttggaagggcagtcagagttgttttttctactgagggaaatatatttgtttaagaggctgatgagatggctaaaatgagatgtgaataaatattatttgcttatgcaccctaatgcttgggaacttttaaccattgattgcaaggaagcagtctttgaacttattaatagattccttctctggattcagattttgaaggtaaagttttaattgcgaacctgttggtattattacacttaggctccatgtatatttttctctataagttccaggaatttcctgtatctaaaaaaaactttttattttgaactaattttagactcacaaaaatgttgccaaactagtatggaagggatcattgcactgtattatatatccctcccctatcttcccctaatgttgacaccttatatcaccatatggcaattattgatgatagggcaattatcaaaaccaggaaagtgacattgtttctatactgttaactaaacaaaaaccttattctaatttcacctgtttttctactaatgtctattttctgggacaggatcgtagccggcaaccacattgcatttagttattattattctccttagtcttctgcagtctgtgacggttcttaagtcttttcttttcttctattaccttgccatttttggttattttgttgaacacttctcagtttgggtttgtttgatattttctcatgtttcgact

SEQ ID NO: 684989 - DNA, 2291 bp, Homo sapiens
cagattatttaaatgattgatgtagtgtggttctttatgatatatgtcatgtctttttagaatgaacactcctagagggtagaacttatgaagtgtgcactttaccagtaccaggccattgtgggtccagttaataccaagccacacaagttcactatgaaaaaagatatctagtctaggataagtcatgctcttgactttatgatagcctcttccccaacaacttcttcttaaaaaggaagaaggtgggggaaagagatgaaaagaaagacgagttaattcttcatcatgtcagttaaaaagccctcaaagactcctagggcccataagattaagataaaaattgtttttttgcatgacattctttataatctgagccctaccttcatttctagactttcagtcctctccccacctggtgaaatctatctttatcttccaagattcaccttgcatgccataatctcaatgatgacacttttcctgaactgcttcatggtcagaattactcactttcttgttggcagtctcaattaacctttcaagtaaaaagtaacaatgacaattagataatatatgtaatgtactagcccattcattgcatggcatgcaggagatgggtgctcaacagaaaattgttaacagaatcaatgtcctgagagactactattactatttgcaatttatataatggaccattttccctatcgtattcatgcattagagatagggaaacaaaccttagaacagtgacaaagttgcttctgagaattggtgcttctctcaaacaataactttctgaatttgagtccataaaacattcctctaggctaatttctgtgtactctaataattttggttcaatctaatgactatttattgagaagctactatgtgcaagaaaccatactctgctctgaaaatggtaaaatgagtaagaaacaaacccttgccctccactcccatcaagaagctaactgttctgatgggaatgcagacatacccacccctaaaaataataatgatcaagttgtgaaaaagtataaacaaaatgcttcagggttatgcaagagtgagaaacaaatgagaccacatcagctgagccttgaagtacagcttctcatggggaaaagaagttgagtatgagacattccatctaagagagtaacatggcagaagcatgaaggtgagagtgtacctgtgagtaattcacagtggctggagcacaaggtcagtaggggaactggtgggagacaaggtcatgaaagaaaaatggaggcaaatggtgtttttttattgttgcctctagtaatgttcttaaattgtgaactagaggttctctcctttatgcaactcattaatgaaactatcaacttaataaaagataaactaggaattttttattcatcttccagaaagaattaatggcacatttcttcaaatagtaagcatgtctaatacatttacaatgtgatttgctttgtaaatgtaaattgatatgcaacttttcaggaacacttggattgtaaacaaactatatcttgactggtaggagtgtcatctcacctgcatagytggaagggcagtcagagttgttttttctactgagggaaatatatttgtttaagaggctgatgagatggctaaaatgagatgtgaataaatattatttgcttatgcaccctaatgcttgggaacttttaaccattgattgcaaggaagcagtctttgaacttattaatagattccttctctggattcagattttgaaggtaaagttttaattgcgaacctgttggtattattacacttaggctccatgtatatttttctctataagttccaggaatttcctgtatctaaaaaaaactttttattttgaactaattttagactcacaaaaatgttgccaaactagtatggaagggatcattgcactgtattatatatccctcccctatcttcccctaatgttgacaccttatatcaccatatggcaattattgatgatagggcaattatcaaaaccaggaaagtgacattgtttctatactgttaactaaacaaaaaccttattctaatttcacctgtttttctactaatgtctattttctgggacaggatcgtagccggcaaccacattgcatttagttattattattctccttagtcttctgcagtctgtgacggttcttaagtcttttcttttcttctattaccttgccatttttggttattttgttgaacacttctcagtttgggtttgtttgatattttctcatgtttcgact

SEQ ID NO: 684990 - DNA, 614 bp, Homo sapiens
ctgtacattttttaatttcatccacagttttgataaggttgattttcactttttttttttttttgccagatatgtggtgtttctgaggaggaatggttacctatgatttcccactttgccatttttttctaatgttcttctgttattcacatttgaaggataattttttctatttrtagaatcttagatttgtttgttttttaaaaaattgtaaatattttacttcattatattctttcttgcatggtgtctgaagcaaatcccactgcaattcttcttcttgttcttctatatataatgccccttgccaccttgggcttccttcagaattttctcttggtcttgtttttctgcagtttgaaaaaagtcttagtataattttggtatttattctgcttgatgtttttggatcaccctgaatctgtggttcggagtcttttattaattttggaaaagtctcatccattattacttcagtttttcttttctgttccattttctatttgtttttcttctggtattccaattatttatagattacacctttcagaattgtcctacagttcttgaatgtttctttttctctccctctttctgttatccttcctccttct

SEQ ID NO: 684991 - DNA, 609 bp, Homo sapiens
atatcctggtggtgatattataccataattttgcaagattagattatcaagagaaactatgtgaaaatgcactagatctttctatattactgcatgtgaacctacaattatgtctaaacatttttaattaaaaaattctgtgaacattaatttcagaacaaaattggactttagaggttgatgtagttatatcttgtttgaactttaatttcttctgggaacttcataatgggagagattttatatttaaatttggagcagctatcaatatgttgttggcattttgtgattggaatatcttacttttttaatattgttggaaaactttgatgagctatattggacagtgtggctggacataatttggaatgggaaacagaaaagcaaattcatttttaaccytgagaaaagagtaaccttggagtctacttccattctagagccttctggggacaaaatccacaatagccatcagcaaccctgggaggagtccacaaaggaaggttggcctcatgtatgatgatcaggactgcctcgaaggccacatgctggactgatgatacgattgatggttatgaccattatcttaagaaataaaaaatctggcag

SEQ ID NO: 684992 - DNA, 1085 bp, Homo sapiens
cttactgcaagctttgcctcccaggttcaagcgattttggtgcctcagcctcccaagtagctgggattacagacgcccggcaccacgaccgactaattttttgtatttttagtagagatggggtttcactatgttggccaggctggtctcaaacttctgatctcaagtgatctgctcgcctcagcctcacaaagtgctgggattacaggcatgagccaccatgcccagccacaggtgtatatttttttggttcatagaataaattctgggaatctgcacgccaaactttacaatgagtatctctgtgggtgggatttatacttttcctgtactaactcgtgtcatttgaaattgtaaaaatttgtaagaattatttcagcaagttaaccaaaaaagattagcagcaaatgtgagttatctctagggtatggagtgtggtgaataaacaggctataggagccaggcagtagtggttcattctagtgagctcccccagtgcaaggaaagcaggcttttttttttttttttttttttgagacatggtctttctgtatgtagtgttgcaatcttggcttactgcaacctcctaggcttaagcaatcctcccacctcatcttgccaggtagctggaaccacaggtgcatgccaccacacctggctaatttttatattttttgtagatagggggtttcaccatattactcaggttggtctygaacaactgagctcaggtgagctgcctacctcggcctcccaaagtgctgggactataggcatgagccatcatgcctggccaaagcaagcattttctatggcacaccttctatggggaagctcccaaataccaggtaacctgcctcagaggtgccatcaccactgcagagccctctgtgaaaagaaggacagccaacccatgcttcattgtgttcattcttctgaagtcatttgtcacctgatggaccactgaactttttattttataaatatgcaaagtatacacaatagacacccccacccccacacatatcgtggatactgtcacagtcccagcctaagcttcagtgtcctgagatactctatatgca

SEQ ID NO: 684993 - DNA, 1082 bp, Homo sapiens
tgtacagttgttatttgccagttatactgaaataaagctgaaaaaaaaaactgatctcggacttcttgtcccttgatcctatgctctttccataacactgtgcctgagacacataacactgtgcctgagtcctagctcctagcacagaatttcagagaagttcccttcaggaccaccctttggcccacaacatccctcaacattaaactttaagctcrttttctaaagcgttctgtgaatattagcctctatggaaggatcccataggatccttttttgacagcgatcccatgggagctataaatcagactgggtcaggcagtggcctgtgggctaggccaagatggcagggctggcaggttgagaaaggtcccctgaagtcatcactggttcttggccatcatcacatcttggcagagatcctcagagcctttaatgcagctgtagtgggcattagccacgaggctggcaaagtttcaagaataaaagaatccattttactatcttttgcatctggcaattaaaggaccttgaacaaaagacttcatctcacagcactgttgataactctacggtttgcacttggctaccctggctttatttttatataatccctctggcatgagactccaggttttatagaaagtaaacatctcgggggtgttggagctttctaccttggatgcgttctttattcacctttatccttggttctctgagggctaaagtcataaaaagtttgatgacagtgacctcttccaaacccaagagctatgagagcagtgtactgagaaatgcaaagcccaatgttctcatggaacacaaactcacccagaggtcacagagaaaaaattctcagttcctgttctggcagaatcatttccaaagaaatgaaaccatggtcacatccagcttttatggtctgagtggtcatattcctgaaagaagcataactactagaatctaaggtgacttcactacaaggttaatacattcactcccccaactcctcacccaaataaggccttatgcactgtgcattttcccccactgctgggggaggtttttctaaatttcactca

SEQ ID NO: 684994 - DNA, 1082 bp, Homo sapiens
tgtacagttgttatttgccagttatactgaaataaagctgaaaaaaaaaactgatctcggacttcttgtcccttgatcctatgctctttccataacactgtgcctgagacacataacactgtgcctgagtcctagctcctagcacagaatttcagagaagttcccttcaggaccaccctttggcccacaacatccctcaacattaaactttaagctcgttttctaaagcgttctgtgaatattagcctctatggaaggatcccataggatccttttttgacagmgatcccatgggagctataaatcagactgggtcaggcagtggcctgtgggctaggccaagatggcagggctggcaggttgagaaaggtcccctgaagtcatcactggttcttggccatcatcacatcttggcagagatcctcagagcctttaatgcagctgtagtgggcattagccacgaggctggcaaagtttcaagaataaaagaatccattttactatcttttgcatctggcaattaaaggaccttgaacaaaagacttcatctcacagcactgttgataactctacggtttgcacttggctaccctggctttatttttatataatccctctggcatgagactccaggttttatagaaagtaaacatctcgggggtgttggagctttctaccttggatgcgttctttattcacctttatccttggttctctgagggctaaagtcataaaaagtttgatgacagtgacctcttccaaacccaagagctatgagagcagtgtactgagaaatgcaaagcccaatgttctcatggaacacaaactcacccagaggtcacagagaaaaaattctcagttcctgttctggcagaatcatttccaaagaaatgaaaccatggtcacatccagcttttatggtctgagtggtcatattcctgaaagaagcataactactagaatctaaggtgacttcactacaaggttaatacattcactcccccaactcctcacccaaataaggccttatgcactgtgcattttcccccactgctgggggaggtttttctaaatttcactca

SEQ ID NO: 684995 - DNA, 1684 bp, Homo sapiens
ataatacagaacttttttgtggtgaaaagtgtctttttttttttttttaagacacagtcttcctctgttgcccaggctggactgcaatgatgcaatctcagctcactgcaacctctgcctcccaggttcaggcgattctcatgcctcagccacctgcgtagctgggattacaggcacyggccaccacgcctggctagtttttgtctttttagtagagatggggtttcaccatgttggccaggctggtcttaaactcctgacctcaagcgatccacccgcctcggcctcccaaagtgctgggattacaggagtgagccaccgcgccaagccaaaaagtatcttattttccctaataatgagttcacgttttaacagatgtagtttcctatatggaatataaagtgcctaatttcacctacttttgaaagtagttttgattaattcataagcagacattctttctggccagtgaaatttaagcagactgcgatgggggaaacagaataaagtggggaagcctaacagaaggagacttttttctaattaaaaattttaaaacaatttttgtttttttgagacaaggccttgctctgtcaattaggatatgatgtttcagcacaatcatagcgcactgcatcctcaaactcctgggctgaagtgatcctcctgcctcagcctccaaggtagctaggactacaggcaagtgtggccaaactcaactaatttttttcatttttttagagataggatcttgctatgttggccaggctggtcttgaactcctaacttcaagcaatccacccacctcagcctcccaaagtgctgggattacaggcatgaatcactgtgcctggccatgaaacttattataaactaacaaaaacatagcttcccctttattacttatacacacagatgatttgtagtaataagtgccactagatttattcagtattgatttctagtagtgtcacttaactgtaacgacaatcttcctgcacactttccccatccttctcttaagaattcttttattacaattttatgtttccttttcttttttagagcacttatgactatggcaggcagttgctacaggccacagttgtgttatgccaatctttgcgctgcacttctcggtcatctggggatacacttcctcgactgaacagagtatggaaacaatttacaatagcatctgaagagagagtacatagattggaaatggctattgcatttcactcaaatgctgaaaaggtttgcttgtgtttttgaaatgttattctcagtggtattgattatatgtgtttaaaatatgttaattttagtaatgtaactatatgactaatctatttttcaatatttatattagttccgttgttacggtttgtttagatataatacattgccttagagagttcaaattaaatttccttaatccttaccagtgctggagagccatgattggagaaatccagaaccacctggtagtcttcttctctttacacttctctcctcaccaagcctggtgtccagaatatgccctctgttctttagagtatcatgagttcaatctctttcgttatgcctggaagggaaactttttgctttggcaactgctattaattgtcacacattttttaaaaggcaccttgtgattttataaagtcgggacattaaaaaa

SEQ ID NO: 684996 - DNA, 1684 bp, Homo sapiens
ataatacagaacttttttgtggtgaaaagtgtctttttttttttttttaagacacagtcttcctctgttgcccaggctggactgcaatgatgcaatctcagctcactgcaacctctgcctcccaggttcaggcgattctcatgcctcagccacctgcgtagctgggattacaggcaccggccaccacgcctggctagtttttgtctttttagtagagatggggtttcaccatgttggccaggctggtcttaaactcctgacctcaagcgatccacccgcctcggcctcccaaagtgctgggattacaggagtgagccaccgcgccaagccaaaaagtatcttattttccctaataatgagttcacgttttaacagatgtagtttcctatatggaatataaagtgcctaatttcacctacttttgaaagtagttttgattaattcataagcagacattctttctggccagtgaaatttaagcagactgcgatgggggaaacagaataaagtggggaagcctaacagaaggagacttttttctaattaaaaattttaaaacaatttttgtttttttgagacaaggccttgctctgtcaattaggatatgatgtttcagcacaatcatagcgcactgcatcctcaaactcctgggctsaagtgatcctcctgcctcagcctccaaggtagctaggactacaggcaagtgtggccaaactcaactaatttttttcatttttttagagataggatcttgctatgttggccaggctggtcttgaactcctaacttcaagcaatccacccacctcagcctcccaaagtgctgggattacaggcatgaatcactgtgcctggccatgaaacttattataaactaacaaaaacatagcttcccctttattacttatacacacagatgatttgtagtaataagtgccactagatttattcagtattgatttctagtagtgtcacttaactgtaacgacaatcttcctgcacactttccccatccttctcttaagaattcttttattacaattttatgtttccttttcttttttagagcacttatgactatggcaggcagttgctacaggccacagttgtgttatgccaatctttgcgctgcacttctcggtcatctggggatacacttcctcgactgaacagagtatggaaacaatttacaatagcatctgaagagagagtacatagattggaaatggctattgcatttcactcaaatgctgaaaaggtttgcttgtgtttttgaaatgttattctcagtggtattgattatatgtgtttaaaatatgttaattttagtaatgtaactatatgactaatctatttttcaatatttatattagttccgttgttacggtttgtttagatataatacattgccttagagagttcaaattaaatttccttaatccttaccagtgctggagagccatgattggagaaatccagaaccacctggtagtcttcttctctttacacttctctcctcaccaagcctggtgtccagaatatgccctctgttctttagagtatcatgagttcaatctctttcgttatgcctggaagggaaactttttgctttggcaactgctattaattgtcacacattttttaaaaggcaccttgtgattttataaagtcgggacattaaaaaa

SEQ ID NO: 684997 - DNA, 1684 bp, Homo sapiens
ataatacagaacttttttgtggtgaaaagtgtctttttttttttttttaagacacagtcttcctctgttgcccaggctggactgcaatgatgcaatctcagctcactgcaacctctgcctcccaggttcaggcgattctcatgcctcagccacctgcgtagctgggattacaggcaccggccaccacgcctggctagtttttgtctttttagtagagatggggtttcaccatgttggccaggctggtcttaaactcctgacctcaagcgatccacccgcctcggcctcccaaagtgctgggattacaggagtgagccaccgcgccaagccaaaaagtatcttattttccctaataatgagttcacgttttaacagatgtagtttcctatatggaatataaagtgcctaatttcacctacttttgaaagtagttttgattaattcataagcagacattctttctggccagtgaaatttaagcagactgcgatgggggaaacagaataaagtggggaagcctaacagaaggagacttttttctaattaaaaattttaaaacaatttttgtttttttgagacaaggccttgctctgtcaattaggatatgatgtttcagcacaatcatagcgcactgcatcctcaaactcctgggctgaagtgatcctcctgcctcagcctccaaggtagctaggactacaggcaagtgtggccaaactcaactaatttttttcatttttttagagataggatcttgctatgttggccaggctggtcttgaactcctaacttcaagcaatccacccacctcagcctcccaaagtgctgggattacaggcatgaatcactgtgcctggccatgaaacttattataaactaacaaaaacatagcttcccctttattacttatacacacagatgatttgtagtaataagtgccactagatttattcagtattgatttctagtagtgtcacttaaytgtaacgacaatcttcctgcacactttccccatccttctcttaagaattcttttattacaattttatgtttccttttcttttttagagcacttatgactatggcaggcagttgctacaggccacagttgtgttatgccaatctttgcgctgcacttctcggtcatctggggatacacttcctcgactgaacagagtatggaaacaatttacaatagcatctgaagagagagtacatagattggaaatggctattgcatttcactcaaatgctgaaaaggtttgcttgtgtttttgaaatgttattctcagtggtattgattatatgtgtttaaaatatgttaattttagtaatgtaactatatgactaatctatttttcaatatttatattagttccgttgttacggtttgtttagatataatacattgccttagagagttcaaattaaatttccttaatccttaccagtgctggagagccatgattggagaaatccagaaccacctggtagtcttcttctctttacacttctctcctcaccaagcctggtgtccagaatatgccctctgttctttagagtatcatgagttcaatctctttcgttatgcctggaagggaaactttttgctttggcaactgctattaattgtcacacattttttaaaaggcaccttgtgattttataaagtcgggacattaaaaaa

SEQ ID NO: 684998 - DNA, 681 bp, Homo sapiens
agattattcattatcctggagggtagattctgaactaaagagctttctttcagtcctgtgatctcaaggttttgcttttaaagaactgagtttgaattycttattgagtttgattgaaatgtgccttggtctcagccattgcacctccccagccctcttaacaaccatgaaggaagaaatgtagaaaactgtataaatagtgctataccccagatgtccttaagcctagccagtctatggatgccagtggggagaggggtcccccgttacagcaataactcaaatttcctgtttaactgtattattttttcacatgttccaccacctgtttcacctggcatgtttggtctgctcagccaaatccacctgtgacttttgaaggacttttgagaacagccaaatcacccactagtggtaccaaaatctgtattagtcagagttctccagagggacagaactattataggatatatgtatatatgagagggagtttattaaggagaattgacacacacagtctcaagataaagtcccatgataggctgtccgcaagctgaggagcaaagaagccagcagtggttcagtatgagtcttaaagcctcaaaagtagggatactgacagtgtggccttcagtctgtggctgaaggcccaagagcccctgacaaatcattggtgtaagt

SEQ ID NO: 684999 - DNA, 2179 bp, Homo sapiens
ttaattttccttctctgacttgcctcttaacatagctgttagtgctaagaaggactcctcagattcaggccttcagagttctgcttttgtcataggtgcttatttcctagaagcctaagcctgttgggtaccctctgggagttgcccttgtccaggtccccatcatctcttcctctagatgctgttggaagcaagagcctaagaggtgattaaacaatgccagtttccccagacccagtgaatcacacactgttctgttttgcccagtttccctctgtaggtctcgctggttccttcttggtctgcactctaattcccactccttctccctttatggcatggtccacattatcgcggaagaccatgctgaggcccgcagagcatctgcagagcctccaaaggctccaatggctctagatacccatccagggacctgttttacttttccaccaacaaaaactcctgtggttattttaggatctagcagagggcttggcacataattaaatactcagtaaatattgtagaaagaatgaaaaccacatttatgaaaaaataatttatctccttttgattttaaacccaaagaagacacatggctgccaatcagagccttttgatcagcatgaaataaccagggccactgttctgagctgacatgattcatcccaaagcaaataaatgtggcatttagatagcttatgcagctaattttgggtaaatatatgacctcaactggattttgaagaagattggcaatagggcacagacttaaagaaccaccttcctgtactgcttgtggttagaggacctcaggcagaattcattgcccccacaaccatgaggtattcatcctgattcttggccagagtttctagatttgtcttccgaaacccttgccaggtacaactctgttcaagccactgggacatgcattatctgctcatccctcaaaaatagtccagatggaatttgacacatcctgcaagcattcttggggcatttcttacagtgaccaataaaatgcttgttcattctgtcgtatgggcagtcagaggcactaagaggtcaggcatacacccagtaggtggccacgtgtcatctgagaacttggtgcttttctgtttgccccctggacatcagctgaattacggaaagcctggaagtgtgggttgcatgaaagtgccctgctggggtctcccttctgtgtatccatcttctcattcagagctgctctggtgaccatgtgggctgtcccctctcatccaggatggtgtttggggrcagagaaggagcaagtataaaggagaagggcattgacactggaatccatccaatctctgccaggagttctctgcgtgacctcagaatctttggtccccaagtaggaggctattggcattttggaagggacagttgtttatcgtgtgggactgatgtatacaatgcaagacatttagactcgccagcctctgcccactaaatgcctgtagcatcctcagtttcatgaccattgaaaagtcccatgtagttcccgggagtgagactgcactgagtcgagaaccatgggcttgtgattgcctgttctctccatctctgacattcaaatgttctgggtgaaatcgagggctctgatctcttcactttaaccacctttttctccccactgtcccaccgtgagatccctcctcagtcaacagcctacaacttcactctcagccacgtctgcctccaatcaaaacttactcattctgtgtttccttacggctggctctgtgcttggggggggttatcacccactaatttatttcttaacaattatgctaatggttcaagccatcaacaaaaagctctggttccttgcttttctgtacagactcttagatgctggtgctgggggaaatgtatggatcagtttgtaaatggaaaaatagtgctgggtgagatgtgaaaacttcagagtggaactcaatccagcaggtccaacccacactttgtacccagactgctatttggcttccagcctatccctcctaatttttccccaaacgaatgttgccagatgaatctttttacactcgcagcagaacctaaagacagagaggctttccaatgaaacacatgaggactcaaatcccagctctgcccctacctacctgtgtgacgacggtataactta

SEQ ID NO: 685000 - DNA, 2617 bp, Homo sapiens
  misc_feature 1671, 1672, 1673, 1674, 1675, 1676, 1677, 1678, 1679, 1680,1681, 1682, 1683, 1684, 1685, 1686, 1687, 1688, 1689, 1690,1691, 1692, 1693, 1694, 1695, 1696, 1697, 1698, 1699, 1700,1701, 1702, 1703, 1704, 1705, 1706, 1707, 1708, 1709: n = A,T,C or G
  misc_feature 1710, 1711, 1712, 1713, 1714, 1715, 1716, 1717, 1718, 1719,1720, 1721, 1722, 1723, 1724, 1725, 1726, 1727, 1728, 1729,1730, 1731, 1732, 1733, 1734, 1735, 1736, 1737, 1738, 1739,1740, 1741, 1742, 1743, 1744, 1745, 1746, 1747, 1748: n = A,T,C or G
  misc_feature 1749, 1750, 1751, 1752, 1753, 1754, 1755, 1756, 1757, 1758,1759, 1760, 1761, 1762, 1763, 1764, 1765, 1766, 1767, 1768,1769, 1770: n = A,T,C or G
atgacaacttaaagaaatctctagttggtataaacaccagtgaagatggagtgaagacgtcaggcagcatactaggtttaagaggtttttggaataaagatctttcctgtgccccttaaaattttaccatgcagacaatcaccaattctgtgtctacatatccttggctcagatgaagactcaaaatcagcttcatatcaaaagtgcaatccttctttggcttcagtaataacctctaaaataacatggatctcactccttagttaccactattatcttctttcataaccgatgttcagtaatcgaaccactgcacgttcaagtattcattcccctggaaatcctgcctgctcctgcaaatgaggctgcagttatctgttctttaaataagcctaaatctggcaaacggtaatcttcttgctaattgaccaattcatttccaattttaagtgcactattcatttaccactctctgccactcaactacatgctattcatttattcaaaagatgtgttttcaactcgattctgccctcttgacatttggcacattagtacattctctcggtaagctttataggtgccacagatgatttttttctgtgtgaagagataattgcctttcagtaatcttggtgcattctttccatttcttcacatacaatgttagtaattaggctctgagaatgaattgaattgggcactgaggagtcagaaagagctttttaatgtttaaattttactagacctctgtaatatgtttgctggactcccagaggctagacagttttattcactaactcttcagggtcctgatgccctagagagatgttctttatagccttccccaacaaattaagcaattattattcggtcctgcatttcctgtcagggtgcatagcaaatgttttatagctgatattttaataaggttgatccacagtcatgaagtggcatgccatccacagaatacttttctgtttagctatttatttgcgagagatgccattgactgcattcactcagacatatttcaagacttttcagctgcaaagaagggaggctgcttttctccttgaagttggtgctagcagagctccagtgggaaatgttgatggggcctaaatggcattttctgattattgatttgatgtgaacacctgggccatgtctacaagacatcaaaataggttataattggtttctgaagcacagcgtatgtctggtaaattattgcacgtctttaggttcattaactctttccttcggtgtgaattcaattttattattagcattgctctggcatggaaatattatcttaaatccatataaaatttmatgttttgaataacaaaacaggttctctgttctgttctctattactgcaatgttgctaggtgacaatataggattttgtaaattctttgttcatatgcaataacatggtagacacatgtaataactttcagaaatcttagaatcatatcattcagagtgtagaagaagattaaaccaacaattttttttggcctcctaaaaacaagccaaaattgacacctgtaaacatgtaaggagccaggccctgtgctaagttctttatagctactacgtcatttaatatcactgcctcatgaggaaagtgattgtcttatccttcaattttggagaatnnnnnnnnnnnnnnnnnnnnnnnnnnnnnnnnnnnnnnnnnnnnnnnnnnnnnnnnnnnnnnnnnnnnnnnnnnnnnnnnnnnnnnnnnnnnnnnnnnnntcttacctctgtgagacttttttttaccccaagctgttagaccagtgcctggcacatagtataagatcatttagtgtttgtgaatgaatgaatgaatgatggcaatgagcaaaagggccatgaaggtatttaggaaaaggctgggaaaaaaaatcaaagaatgtggaaggctctgaaagtggtggggggaatttaggaagtgtccttgtttcctgctaatggtctggggacaggcccagggaggtgagtgttctgagtgtgcagcttttcagccacgatggtgaaaataaaccctggcacactcactgtgaagggcctccttctgcctttatgcttccccagtaccaggaagcggagctcctgaaacacctagcagagaaacgggaacatgagagagaggtgatccaaaaggccattgaggaaaacaacaacttcatcaagatggctaaggaaaaactggcccagaagatggaatccaacaaggagaacagggaggcccacctcgccgccatgttggaacggctgcaagagaaggtgaggggtccctggctagagaggagtttcctgggacatgctgttttccttctgcagcaagtatgcggggacctgctgatcatctcagggaggaagcagcctcaggcaaaaatcaggatctttttcttaggcaggatctttagagagttccgaaggatgatcagggaagtcagaggcaagaaataggaaccagactcagggtttccttgggggatattctgcacagttacacaattaaaatccttcattgccttagggagcatatatgtctgattttctagaagaagcctgtctaatacaaaggagtagagat

SEQ ID NO: 685001 - DNA, 2452 bp, Homo sapiens
tgccaatcctttcagctccagttcccggcacatccccttggtgccctaaactgtcttttaagcagtcattgtcactttcactttgcaagtgctgatccctccccatctggaagactcttcactcccttcccctaattccttccttgtctttctttgcctgcctgatctcccctagttatccttcaaaagtcagttcagtcagacatcattcctctgtgaaacttcctctgcctcccctcctcccaccccactgtaaaacaaggcctttcctccactccactcacataaaacatatgcttttattatatgacttatcacattattttaaaactctatttaattatcttattgattgcaagatatttgaaaacaagaatttttccttgtttatatttgcctcctcagatccttgcacaattcctttttttttttaagatagggtcttgctctgctgcccaggctgaagtgcagtggcgcaatcctggctcacagcagcctcaaactcctgggctcaagagatcctcctgcctcagcctccagagtagctggggatacaggcacataacacgatgctcagctggtttttaaaaatttttttgtagagagattatcttgctatgttgcccaggctggtctcaaactcttggcctcaagcaatcttcctgccatgtcctcccaaagtgctaggattggaggtatgagccacagtgccaggcctcttgcacaattcctaacacataagatctcaacagaatgaaaaaacaaacaaattatcattctggtgtgcataattttatatggctgaggataactgaatgtatagtttgatattctgttttttccaattaaaattatataataatctttttaaatttttatacagccaagtgagttaacctctccttatagtcttaaaattttttatcaacatatattatatcactgtcctatacttttagaatattttcgctattgaaggacatttgcatttgttgcattttttgatattgtatttaatactttgatgaactttattgttcataaagatttgtgtttcagaatattttatttagaatagattgttaggaagcagaatttctagaaagagaaaaagtaagtcaatggatatggacctttttgaggcttatgttttattaggctggtgcaaaagtaatggcaaaaactgcaattacttttgcaccaacctaatatattgccaagtgattcactattatgttggtgcacaagtaattgtggtaatggcaaaaaccttaattatttgtgcaccaacctagtaaaatgacaaaacccatttggattcacacaggcagtatataagagcaagcatctcattttaaaagaggtgtagaccaaccagaaagcatctatcacagaatgaaaagaatttgaggaatcagtaaagcgtaataagcaaacaatcattgaaggtacacggggctggttgcagtggttcacacctgcgatcctggcactttgggaggctgaggtgggtggatcacttgaggtcaggagttcaagaccatcctggccaatgtggtaaaacctcgtctctacttaaaacataaaaatcagccaggcattgagctggatgcctgtaatccagctggtatcctgggaggctgaggcaggagaatcacttgaacccagaaggcggaggttgcagtgagccaagatcatgccactgcactccagcctgagtgacagagcgaaactctgtctcaaaaaaagaaaaaaaaaaaaaaaaaaaaaaaaaagtacatggaaaatttacctaaagaagagaagtaatgagagaaacttgacagatcttttcaaatatttgaaaccccatcattaggaagaggaagcagattttgagaacaatgatagagtaactcactactaggtactgagtgtttgctgtgtgccaggcattgtgttacgagtttttgaatcttcatttcacagatagataactaagacttcaaaagctttcgtcactttacctagtcacagaggtcactagtagcagatctggtattcgtaaatccaggctgcactggctctaaagctcatgtcttaatagccacaccagcacttcccaaactttcccatcaaggtgaatttaacggtaaaaaatagtgaaagcagatccttagggtaggtgaggtatagatgaagctagctgtctataagcaagggaattcctagaagccttcattttgcttttaatctatgtgcatttttacagtcgctatggaaaacaacgtgacagttcctcaaaatattaaaagtagaattaccataggatcccrcaaccccacttctgggtatacactctgtaaggaaagagtagtagaaaataggacaggagggttttccagaagaccccagagtcctatgaatatctttcaaggcctatgccttaatggtattaaaaagagaccaagag

SEQ ID NO: 685002 - DNA, 681 bp, Homo sapiens
attttcgaagaatgatatgggttaggaataacaattcttatttatttaatcctcacattttttgtaaattctgtgtaagaattgtcttttacagtattattaatttttatattttctttttaagaagtattgtttctttttataaccaaaggttgtataacatctgattgtagccagaatgctagcacttataacatgcaaggaaagtacccaaacttcacctggtgacaaagtgcacacttttcaggatkaaataatttattcttttaaaaataaaactctaaagaattatcataattgaccttatatgtctatatattctcttggtaatattaggtgatgtctagagcagtgatttccaaatgggagcaaaaggatccaagggaatgctcagaaatatgcaatggggtacagaaagaagacatgtgagtttctatatatatttttgtattagtaattttaagtttcacctgtgtgtgtatgttgcttacaataatctaagtaatgatgtggtaacaatttcaaaatttcaatggcttaatattgtaaaatatattcatctcttatggtcagaaaaatgagagataaatgtattttagagttttaagccacattagtttgcctagggctttgctccacacagtttctcgaacaaccagtacgacagagtctccattatcc

SEQ ID NO: 685003 - DNA, 681 bp, Homo sapiens
attttcgaagaatgatatgggttaggaataacaattcttatttatttaatcctcacattttttgtaaattctgtgtaagaattgtcttttacagtattattaatttttatattttctttttaagaagtattgtttctttttataaccaaaggttgtataacatctgattgtagccagaatgctagcacttataacatgcaaggaaagtacccaaacttcacctggtgacaaagtgcacacttttcaggattraataatttattcttttaaaaataaaactctaaagaattatcataattgaccttatatgtctatatattctcttggtaatattaggtgatgtctagagcagtgatttccaaatgggagcaaaaggatccaagggaatgctcagaaatatgcaatggggtacagaaagaagacatgtgagtttctatatatatttttgtattagtaattttaagtttcacctgtgtgtgtatgttgcttacaataatctaagtaatgatgtggtaacaatttcaaaatttcaatggcttaatattgtaaaatatattcatctcttatggtcagaaaaatgagagataaatgtattttagagttttaagccacattagtttgcctagggctttgctccacacagtttctcgaacaaccagtacgacagagtctccattatcc

SEQ ID NO: 685004 - DNA, 681 bp, Homo sapiens
attttcgaagaatgatatgggttaggaataacaattcttatttatttaatcctcacattttttgtaaattctgtgtaagaattgtcttttacagtattattaatttttatattttctttttaagaagtattgtttctttttataaccaaaggttgtataacatctgattgtagccagaatgctagcacttataacatgcaaggaaagtacccaaacttcacctggtgacaaagtgcacacttttcaggattaaataatttattcttttaaaaataaaactctaaagaattatcataattgaccttatatgtctatatattctcttggtaatattaggtgatgtctagagcagtgatttccaaatgggagcaaaaggatccaagggaatgctcagaaatatgcaatggggtacagaaagaagacatgtgagtttctatatatatttttgtattagtaattttaagtttcacctgtgtgtgtatgttgcttacaataatctaagtaatgatgtggtaacaatttcaaaatttcaatggcttaatattgtaaaatatattcatctcttatggtcagaaaaatgagagataaatgtattttagagttttaagccacattagtttgcctagggctttgctccacacagtttctcgaacwaccagtacgacagagtctccattatcc

SEQ ID NO: 685005 - DNA, 1199 bp, Homo sapiens
ttgcctgcattgccagatggcatattccctgagggcaacggtggcctcccttttggctcactctccatctttcctgcctagagaactgttactcagtagccattctaatgaatttgacttaagaaaaatcttgctcaccttaccatagagctgtttctcttccagctatctctgtgtttttgaagtggtgargtatgctggaagtcatggggtgatcattctcccctaaggtaaaagcagacgctcctgctttgagaagcaactagtaagaatctaggtccttgtccatattcctcatcaacaaggtcctgagccacagtctggggaccccacctcgctttcatgcctcagatccagttagaaaaatccttcttgctttccaatgttccttcttcacgagagagagatccatacaaacctgagaataaattaaaattccctcaaatatccaaataaaagccctttatgggccattttcatttgggtccttttttcaatactatttttttttaaattagtgagacagggtcttactctgtcacccaggctggagtgcagtggcatgatcatggctcactgaagcgttgacctcctgggctcaggtgatccttccacttcagcctccagaaagctgagactacagatgtcactatgcctggctaattttttttaattttttgcagagatgggatctcattatgttgcccagactggtctcaaacccctggcctcaggccatcctcccacctcagccttaagtacaatttcctaccactaaggcatacagcaataggggattttaacatgtttggttgaaaatagcaaagaactcaatttaatgtgttggacactcaagagttgacatcgaatacagtaattctaagtgaaaatgagattgatgacttttgtaaactagcctataggactgtgaagaatctggtacctaatgctgatgaaagatatgatattttagctatttaaatcagaaatgggcctcacataagtatcttctactatctgtctaatacagatctgtgtaatctaaactgcataatacaatagctactagctacctgtggctatttaaattcaaatccaatttttaaaattaagtttctcagtatcactagtcacaattaaagtgctaccatactggacattgctacataacatttctattaatacagaaagttctatgg

SEQ ID NO: 685006 - DNA, 1314 bp, Homo sapiens
atactcaccagaaattcatagtgagagaagcaactataacagaagatatttacccatcttatggagacaaaagtctagataacagttgtatatgctctttccctgcaagtccaaggacacttgaatgatccttttaattccagagacaagtagtttttattagcttttataagattcagagccaacaaagatactgtctcaagatgattatttttatagttccctttgttccttctttcctaatatccatcagacaaattatgtgggttttagacacakgtactaaaatgttcttagtagtggttacatctgttctgttctatacagagaaacttagttatttgatatattatttagtgccctttatatctgcttctctttatttgatttacagaggacttttgatgtttgcactctattatttctaactggcagtggtcttgtgtaaaaatatgtgtatgattattatataccttatattcataaggaggttatattcacatgagtaaatcacatgtatcctcagcttttattctatttttctgaccccatttagaacaaaatcccacagaaatatttcattattctcctcactcttttccttctttcttgaatttagataatggctagcatgaatattataactgaaagattatcaagtcagagggtgactacattagtcatatatatttttttccattttcttaaatcagttaactaagactacataccacctggcttccatagcaccactattaatggccataccatctctcagtcactaataaatatcaacagagtcctatattctcatattatgtcccattaccactactttggtcttctcacttctactgcaaggatcaatacaggcctctgggtctaagagtgctcttgacaaggcatatgtcccaataccactacacttacatctcatcaaaatgttcaactttaagatcaccaaatctcatctcattttgaaccacaagaagtcttaagactcaggtcacctctcatctcatgtagtcaaatccccataaggctctgcctttttctctttatgacgccattgacttcctttcttaaactctgaactctttataccatgcttgttgggactgacaatcaattatctgcaaaatcacctctattctgaacttttgtcctaaatgtcttctttggcttcttagtctaacttgaaaatggctctctcctgggaacacgcattctctttctgccttcaaaactcttagctactttctcttcacacatttcacactattgggccaagaaatgtgctaagtgttctttaca

SEQ ID NO: 685007 - DNA, 655 bp, Homo sapiens
ttttatgctctaacaccaagagcatattgaattagattagccaaagtcttgaaactcctgtgaaatatttttaaataccctgtttctaaacctaaaattttggcatagtaaaaaaatgttactttaggttttcactttgccaaaacacacatttttgtattctgatccaagaacttcccctgagcccaacagtctatcttggtaaaaataatktagttcaattcggtacaacagatgtttattaagtacccacaaagggccaggttctgatccactctattatcatgtgttgttcttctttcctaggatggccttttctggtccgcctggtaaactcctattcttccttcagattcagcccaaatcagtcttcagtaatgtgagttccttcagcttgacatattgtttacttgtcaataaatttgtatggtactcaacacatcatgcactgatttttgcccttgtgactgaactgtgtattcctagaggttaggacactgtcttttcatccttgttactccagttgcattgaaatctcctttatcacgaaatgtgttcggtaatttcctgttgcataaataaatgaattcatgtattcagctatgcttctgatatttttaaataccgactgcctgctaggcagagtaatggaccc

SEQ ID NO: 685008 - DNA, 655 bp, Homo sapiens
ttttatgctctaacaccaagagcatattgaattagattagccaaagtcttgaaactcctgtgaaatatttttaaataccctgtttctaaacctaaaattttggcatagtaaaaaaatgttactttaggttttcactttgccaaaacacacatttttgtattctgatccaagaacttcccctgagcccaacagtctatcttggtaaaaataatgtagttcaattyggtacaacagatgtttattaagtacccacaaagggccaggttctgatccactctattatcatgtgttgttcttctttcctaggatggccttttctggtccgcctggtaaactcctattcttccttcagattcagcccaaatcagtcttcagtaatgtgagttccttcagcttgacatattgtttacttgtcaataaatttgtatggtactcaacacatcatgcactgatttttgcccttgtgactgaactgtgtattcctagaggttaggacactgtcttttcatccttgttactccagttgcattgaaatctcctttatcacgaaatgtgttcggtaatttcctgttgcataaataaatgaattcatgtattcagctatgcttctgatatttttaaataccgactgcctgctaggcagagtaatggaccc

SEQ ID NO: 685009 - DNA, 1729 bp, Homo sapiens
ttaaaatttgggggacagtttagataatctagaaataagatcaataaaaagtcatgaatagcatctattttctttcctttttaaatttggcataaataaaagatgttgaggttgggtcccttttccctacacagagtagtgaactatttcaagaacattttcataacttagtcrtatttctcttgcattcatattcacaattgttggggcattgacaatctttagttatatagcagtagagttaacaatttccagatcctgaaggtatatctgctttaaactaaaaatgccacatgatacagacattatttctaaatccgaacaagcattttaaatggtcatcaataccccattaacttaatgatgatagttttcctcattacctatcatttgtgaagtacctactgattaccaagcactgtaccatgtgtgtacaattcttacaacagttttatcagatttgttttccacatacacactacacatatgaagtattaagaagtaaaaccaagttgcttagggtttccattcagtaagaaccagaccaaaatacaagccttttctctaagtccaaactatgaccgttatattttgtatataaatcaaatgcaacctttttaaaataaatctgctatctctcagtggtctaaataaaagacacaactacccaccccattattatcaatcagaaatatgagatacctgacacctgctttttctgtactctcagatgcactttatggacaaatcttgatcttttaccttcttaaccactctagagttttttccttccttttcaaatttagtgttttagggctagatcatgatccgtgtcttgcttaatatttttactatgaccttctcattgctttctttccttccataggaccctgcttcactccatcctccatgcttaccttaagataatgtttatgaaaaacgaatacactttatatctcataatcacattagtcccttattttacagaggttaaagtccaagcattttaacatggcattcaaatgcctccatttttggtaccagtacatcactctagcccatttcttgacacctaaacctgcacgatacagtttgagagacaacgtggctcaaaatacagtttcatgatatcattttgaaatatttgttcatccttcatcatccacccagggtattatttctcacccttcctattagcacacgtctacttaatttcagcattcagctcaaatgttctatttgctatgaaaattttcttgcctcatctttggcttcaagagaaagtagccattcacttttatttgtcttctaaactctaaaacttttatagactatttaggtactatctgtcctggcaaaattaattgtacatttcttggaaagatgattcattttctcctgaccatccagcataagatttggatattggtagccatcaatcaaatgttctttagtgaatgaatgaagatgtgttcatttctggccaacctccttttagttattcttgctgtggtataatttattggctttatctctattttttaggaaagtttgcacccaaaatctttattggaaaattattgttaggagctcagaagaaacataaagatgaatgcatgtactatcctttctttaataatattataataaagttagggttcagatatattcataaaaccataaaaaagctggtatagtagataaatataattatcattaataaaaatga

SEQ ID NO: 685010 - DNA, 1833 bp, Homo sapiens
ctaataaaaatgctaagatatcagaccaaggactagtgttctgggaatgcccttatgctgacatcaagccactaaaattactctttggagcctagccctacaaccaacaatagggtccggcctgtgttgtaaaagctgttaagcaaaaattgtcagccccgctgaagtcgacgtatattgtttctgttgctctctccgcttttcttcctaatctgttagtatgatttgtacagaaaatgaaagccaatgctcttaaaaaaacaaaaaaagccaaagccccatctgataggatttaaccttcccaacactttattagctaccagcctgcccctttactctttctgggaatttggcatagaattgatactttctctggtgtagctcagctatgtgatttgcaggacatgctatacacatgccataccatcctctctcccttgttctcccactgtctagaaattctcacctatcactagttagacctggatgttacggtcagcaatattttgaagccctgtgttaggtattggtgggccacgttgattttaaaaacacttggcttttcaagaatatcttccaatcgtttctttaccaattttagttcaatgtttcactttcctgtggcaagctttgcactttatttcttttcttttctttctttcttccttttgagacagggcctcactgtgtcacccagactggactgcrgtggcatgattatagctcactgcatcttcaaactccctggctcaagcaatcctcccactgcagcctcccaagtagctgggactacaggcacatgccaccatatctggatattaaaaaagttttttttttgtagacattggcctcactgtattgcccaggctggtctcaaactcctgagctcaagtgatcctcctgccttggcctcccaaaatgctgggattacaggtatgagccaccacgcccagtctacattttcttatttgtgtaatcttaggtgatttttgtaaaataaatgcaagtaaaaaaagagatctattgggttctgtctttgtaaggtcatttattgttatgggctgaattgcattctcccaaaattcatatgttacagtcctaactcctagtacctcagaccttgactgtatttgtcaataggcctttaaagaggtaattaaagtaaagtaaccctaaaagttattagggtggggtgtgtatctgagtgatgtctttgaaggaagcaattaggattaggacacaggcaacacagaaaaccatgtgaggacacggccagaaggtgaccatctgcaagccaaggggcgaggcctcagaagaaaccaaccctgctgaggccttgatcctagactactagcccctagaactatgaggaaataaaattctgttgtttaagccactcagtctgtggtatttgttatggcagccctaacaaactaatacattcactatcaattttgttcttttctcctagtcaactttgattattcttttttttttttttttaatggagtgttgctctgtcacccaggctggagtgcagtggcatgattatagctcactgcatcttcaacctccctgggctcaagcaatcctcccactgcagtctcccaagtagctgggaccacaggtgcgatccaccacacccactaattttttgtttttctttcttagcagagatggggtttcactgtgttagccaggatggtcttgatctcctgacctcgtgatccacccaccttggcctcccaaagtgttgtggtacaggcatgagtcaccgtgtccagcctgattgtgcttttaatattcacaggacacatttaaagagatctgggc

SEQ ID NO: 685011 - DNA, 1162 bp, Homo sapiens
tgatagtctgagatggctccggatacagggtcccttcacaaaaaaaattagtaacttgcccagcaattagaaaaaggcaataagaagaaaaaaaaagcactggttacaggcatgagcttgaggatgagtcagggaagaaaacatgttgctaaattaaatctctagttagatttcattaccttattagtgtctacacagtatgttttactatctgtaagtatttggttcatttatttatttgctagttgaatgtctatttccacatatttgaagccccaagagaggagaagcatttcctgctgtgtttccagtatctaataacaaaataaattctcagtaaatactgtgttgaataactgtggaaagttgttgcaactccctccttcaatcataagggaaaaaaatctgtatctatttcaatttattcttgtctggagggaactcagtgatcctagaattgctcttgaatcaagtacaggatggattaagtcaattatcatgaactttctctggatccagaactctacatttgctttgaacccaggccagatataagagagatgagcatagtttgggaacttgtttagagattcattcatttgtttcatttatccaaccacccacccatccatccaatattatttgaatacttactatgtgttaggaacttttctgggtgctggatgcaataatgaatgggttcttctgcatctctcttcaaatgctagaaacttcctgcaaggtaatgagggagttatgagcctccatatggttttataagaattcaaggtccagactcagactaggtttgtaggaagacatgaagattcatcactctagtcaccatcaatgtttactcttaaaaaaagttcccaagraagattttaatttttttcatagagggcttatgatttttttctgggaatttaaaatttttcattgtttttatgaatagaatcttctttttatttgtaatttacaattagttgctgatagcatacatgaagttgttgaaatgtaattagtttcaaatagtttccctcactgagccctattattctaatacctcttagttattttgcttttcttggttttgttttgttgttagttactaaacataaaatcacatcaactagaaataatggtaattttatctcctcta

SEQ ID NO: 685012 - DNA, 1592 bp, Homo sapiens
tggatattattattgctgagttagcatcacaacattttatacatgagtaacagacattgttataattcttgtaatgaatctagatgaattatgtggtagtcatcagaatgttttaatacatgatttggaagtaggttgagagtcctggccaacaggattatcattcagtgtggtgccattggcacgcaagccctggctggacggcctttagactgaatttaaagcttggcaccaccacttcctctgcctggctttagaacattgtggaataatctcagctctggaaatttgagttagagttgatgacactgggcttcagctccacttgcagtgaaagccccatgacaaggcttcagtccacatcagcgctctccagcgagcttctttctcctgaatgtgcacagatgggtggttcttttgttagtcggctatgactcatgtgctctgtttaaatgtgtattttgttgtgaggcagccattagggccgtaaactcatggagcggtcctcgtgctgggtgcttgatcgatctgttacgctttgcaatatggtattctcaccgttggggattttacaaagccagaacatgctagaaaaaggaaaatttggtgattcaggaaagcttcaagccattcaggtagtgctcatcaccctttgccgtcgtcacccccttcctgtcccccgactctgactttctttcttcttccctgggactagcttccaaatagcccctaggaactgacgccccagtgtccacaccacccatccctctatcagtcaccttgtgtggcagatgaagtaaaatgtccagaatgtgctttttgaatcakagtttgtttttgtttttgtttttgtttttttaaattccctgtttccatttacttgtttttaatctctctttctctttcctcccacccctctgtgtgcctgtgtgtgtgtgttgatgccgcacacctgaaagcaccaaggctgctcttcatgatggcagcatgaggggcttggtagcatctacagctactctctgtgaatgtcttaaagaaaaaaaaaaaaaagatactgcagttcctgctctttttttatgctaatcaaacatgttcactgactggttttaagaatcacgaagctgcttcacacacgggctgtaaggaactactcacccatattctgcaaattttatttagcctgttcaaagtattccaagcagacctcttctttagacaaagaattgagtccagctcgtctcagattccttctactggggaatgagtatagagatatatcaggacaagcccttcttttctactttttttctttcttccagcttctctagtaggaccaaatgacaggtccttcttattcccatcctctagctgtgtggagtttgacaaagggaataaaattggtcaattataactctccttcatgtttccagactcttccatattatttattcataaataaatcaattatttaacccagcaaacatttgttaattttatggtaagtgcagtgcaggacacagggtatccaaggggaaaaaggcagtcttccttttgtgagtaaagtgtgttgtaaataaggcaggaacataaac

SEQ ID NO: 685013 - DNA, 1592 bp, Homo sapiens
tggatattattattgctgagttagcatcacaacattttatacatgagtaacagacattgttataattcttgtaatgaatctagatgaattatgtggtagtcatcagaatgttttaatacatgatttggaagtaggttgagagtcctggccaacaggattatcattcagtgtggtgccattggcacgcaagccctggctggacggcctttagactgaatttaaagcttggcaccaccacttcctctgcctggctttagaacattgtggaataatctcagctctggaaatttgagttagagttgatgacactgggcttcagctccacttgcagtgaaagccccatgacaaggcttcagtccacatcagcgctctccagcgagcttctttctcctgaatgtgcacagatgggtggttcttttgttagtcggctatgactcatgtgctctgtttaaatgtgtattttgttgtgaggcagccattagggccgtaaactcatggagcggtcctcgtgctgggtgcttgatcgatctgttacgctttgcaatatggtattctcaccgttggggattttacaaagccagaacatgctagaaaaaggaaaatttggtgattcaggaaagcttcaagccattcaggtagtgctcatcaccctttgccgtcgtcacccccttcctgtcccccgactctgactttctttcttcttccctgggactagcttccaaatagcccctaggaactgacgccccagtgtccacaccacccatccctctatcagtcaccttgtgtggcagatgaagtaaaatgtccagaatgtgctttttgaatcagagtttgtttttgtttttgtttttgtttttttaaattccctgtttccatttacttgtttttaatctctctttctctttcctcccacccctctgtgtgcctgtgtgtgtgtgttgatgccgcacacctgaaagcaccaaggctgctcttcatgatggcagcatgaggggcttggtagcatctacagctactctctgtgaatgtcttaaagaaaaaaaaaaaaaagatactgcagttcctgctctttttttatgctaatcaaacatgttcactgactggttttaagaatcacgaagctgcttcacacacgggctgtaaggaactactcacccatattctgcaaattttatttagcctgttcaaagtattccaagcagacctcttctttagacaaagaattgagtccarctcgtctcagattccttctactggggaatgagtatagagatatatcaggacaagcccttcttttctactttttttctttcttccagcttctctagtaggaccaaatgacaggtccttcttattcccatcctctagctgtgtggagtttgacaaagggaataaaattggtcaattataactctccttcatgtttccagactcttccatattatttattcataaataaatcaattatttaacccagcaaacatttgttaattttatggtaagtgcagtgcaggacacagggtatccaaggggaaaaaggcagtcttccttttgtgagtaaagtgtgttgtaaataaggcaggaacataaac

SEQ ID NO: 685014 - DNA, 589 bp, Homo sapiens
acatggaattctatgttgcatcccagagaacgcactcctacaaaccagagtaagaatggcaccccctggagccatggcaccccctggagccgtgctatccagaggccctgcaaggaccccagccttatgccacatctcttaccgtggcccctgccatattatgcagctcagtcagctactgaacataaaagcacttcaccacagagagtcagtgccatagtacaggttctacgaggcagctgtaacaacaacttccatggaaatagtattttacatttctttgagtgcacctggtcacggccayacgccttaaaaaattcctctgtggcaagcatggtaaagcagacatggttgccctattttatcctctctgaagacagctttggagaagttaattcttattcaaggctacagagttctgtggccttaggcctggatttctccttctgcatccaatgctccttccattatcccttgctgccaagtttggactagttgaatgcagaactctgattctattttagacctagtatgttgaatctttgttctctgaaattctaccaattatatttcagtcctttaattaaga

SEQ ID NO: 685015 - DNA, 653 bp, Homo sapiens
tcatacattcaataattcttaaggaaactttggctttcatagaaggaattttaaaaatactgaagtagctaaaagctatacaatttgatagtggaagctaagaagagttttcaaaatttaagaacatgaaaatattctctttgttttcaaagactcataaatgtcatttgctgttgtaggagaggaaaatttttctactgtcctcttagggttttcagctaggattgacgtaagacagattaaacaggagaaaagcaaattttatttacatatacacgggagcccccacaaggacaatgaagacccaaagaagtggctaggcctaagcasttatacagtagtttgaacaaagggtggaaattgtggaaaagtaactaggaagataagttagtttaacaaagtttgtacagatttctctcagcctcaattccctgtctctggtgataagcatgttgtttcttttgtactggtatagggagggtatcttccacttgggagtttcatctactgctttcgggaagaaaaggggagattagagtgcccttcctatacctgctatttctcaagtgcctctatttcaaaacaactaagatgccaaggcagcatattttggagtggcatgtcctgaattccttcactgtcatctctactta

SEQ ID NO: 685016 - DNA, 950 bp, Homo sapiens
atacttctaaaaacgttaccagtttccaaaaatactaaaggaaaatcagttttcttcacgtttacaaatctgaaatgtttttcataaagtgggcacattgacttctaataaaatatacaaagcctgattagaccaaatttcttttcttcataagtagaatatacatataacatatatatttatatattctagcttaagcacataagtaaaatatgagacagtaacagccactctgtcattcataacaaaaacattttaagttcctaccagcaacttgtaaattccatctcctgctaacaaccacattctaccgcacctttatcaatggcaagtattattaatgaaaacaattcacgtaagtacacatatatcagaaaatgggaggggatgggtgcagtggctcacacttgcaatcctagcactttgtgaggctgaggtgggcaaatcactttaggacaggagctcaagaccagcstgaccaacatggcaaaagcttgtctctactaaaaacacaaaaattaactgggcgtggtggtatacacctataatcccagctacttgggaggctgaggcatgagaatcacttgaacctgggaagcagagtttgcagtgagcgaagattgtgccactgcactccagcctgggcaacagtgcaagaccttgtctcaaaaacaaaacaaaacaaaatgaaaaaaaagggggggggggggaaggaaagtatattacatttagtgtagtaaatttctatgggtatttaatctttaaaacaattaaaatatgcaagtcttgattaaatcttggtttgcaaacactattcataaaacatatcttggagataactggaataatcttatataatgaatattagatggcattaacaaattactgttgattggccaggcgcagtggctcacacctgtaatcccagcactttgggaagccaagggagg

SEQ ID NO: 685017 - DNA, 648 bp, Homo sapiens
ctgagcgacagagtaagactctgtctccaaaaaaaaaaaaaaaaaaaaaattactactgattttcttagacatgataatggtattatagttataaagaagaacactattcttctgtctttaggagatggtgctgatgtatttaagttaagtgtcgtaaagtctgcaacctaggctggctgtggtggctcatgcctataatcccagcattttgggaggctgaggcagtggaacatcagaggtcaggagttttagaccagcctgaccaacatggtaaaaccccatctctactaaaaatatagtattagctgggcgtggtggggcatgcctgtaatcccagctactctggaggctgaggcaggagaatcgcttgaacctgggagacggaggttgtggtgagccgatatcaggccactgcactccagcctgggtaacaagagtgaaactctctgtctcaaagaaaaaaaaaaaaagtagccagagggggaaaaagcatattacatacacagaaacaaagacaaagataatatcagatttctcatgaaaagcaatraagtaggtaacagtggagcaacatctttgtactgctgaaagaatatcaatctacaattatatactcacttcaaatatcttttttaaaaacaaaggtg

SEQ ID NO: 685018 - DNA, 619 bp, Homo sapiens
aggaagtccaagatcaaggcactggcaggttttgtgtctggtaagggccttcttgctgtgtccccacatggcagaagggatggaaaggcaaagaaaggggggtgaatgctgtgtcctcatatggcaaaagtgcgagagggtgatcccttcaaccttgagctctttcacaggcactaatccatttatgaaggcacaacccttatgacttcatcacatcccaaaggccccacctcttaataccactacaatggggattaagtttcgacacatgaattttggaggggacacattcaaaccatagcaatctcctcraggccaagtgatggctttctgtacccctgtgtcagtcagtcatggactatgtgctgccccctcccaggtgggatacttcattctatgctctttggtggaggacaattctctagagaagggagcggctaggagctgttaacagtcaatgctcccagcagctaggggagaggtgcacaggctgggaaaggctgtctgggtggggcacaatgacatctgcaatggtgggacatgctcggcagagacaaggacccacatgtgtaaggagcatgtcatattcagagcttagggctgctgggctataaactgc

SEQ ID NO: 685019 - DNA, 1336 bp, Homo sapiens
tagggtttcctttaaacaaagggaatcacttggattaactaagcacaagaaaactttcccattgtgttgtttctgtatttcccttcttccttttaatgaatttcaaagatcttaaatcttttcctctcctaattattagaaaattatatatcttatttttatttatctgatgttacacttacatttttacaatgatattgatgcttttttttctatcaatgttgaaaactaacargcattcataacattcatactccaacagggtaatattgttattacaatttgtccctttcctttttttaaaatttttaattacggaagcttccaatataggcaagagtagatcaatgactttaatgaatccctctgtactactcaccagcttaaacaggaggaatgtgtctcaactcatggccaagtttacatccccatccatttgctcctcccacactattttgaagcatagcccagatatcatatttcatctgtaaatctttcagtacctatctcaagaagatataagggctcctttcacatatataaatacagtatcacacctaagaatcaattaaaaataactagtaaatacccagaattccaattatgtcatacatgttattgtaacttttttcctatagcttgtttgaattgggattcaaatagtctatatattgcaattggttcatatgtctttaacatctcttaatgcatagatttccaattatgtctttttttcttacaattcatttgttaaaaaaacaaattgtttgttttatagttatatagatcatccgtgagtgatcatgaagcagatagtcactagtccatcaagatgtcttatttaaggggaacgagttggtgatcatagtgttattaatatagccttgaagtaagagccagacactaggtatagtttcagtctagaaaccccaaagttttatggcccagagttaggaggggcatacttcccatgtgggttgttggtttctcgaacaacaaccttggtagtcaaggaatttatttgggggtgataagaatgttgatgagaagccgagcatggtggctcatgcttgtaatcccagcactttgggaggccaaggcaggtggatcacctgaggtcaggagttcaagaccagcctgactaacatgatgaaaccccatctctactaaaaatacaaaattagctgggcatggtcgcacatgcctgtaatcccagctacttgggaggctgaggcaggagaattgcttgaacccaggaggcggaggttgcagtgagtcaagatcgcgccattgcactccagcctgggcagcaagagtgaaactccatctcaaaaaa

SEQ ID NO: 685020 - DNA, 3244 bp, Homo sapiens
  misc_feature 2335, 2336, 2337, 2338, 2339, 2340, 2341, 2342, 2343, 2344,2345, 2346, 2347, 2348, 2349, 2350, 2351, 2352, 2353, 2354,2355, 2356, 2357, 2358, 2359, 2360, 2361, 2362, 2363, 2364,2365, 2366, 2367, 2368, 2369, 2370, 2371, 2372, 2373: n = A,T,C or G
  misc_feature 2374, 2375, 2376, 2377, 2378, 2379, 2380, 2381, 2382, 2383,2384, 2385, 2386, 2387, 2388, 2389, 2390, 2391, 2392, 2393,2394, 2395, 2396, 2397, 2398, 2399, 2400, 2401, 2402, 2403,2404, 2405, 2406, 2407, 2408, 2409, 2410, 2411, 2412: n = A,T,C or G
  misc_feature 2413, 2414, 2415, 2416, 2417, 2418, 2419, 2420, 2421, 2422,2423, 2424, 2425, 2426, 2427, 2428, 2429, 2430, 2431, 2432,2433, 2434: n = A,T,C or G
ggactgaattttattctcagcatgttttagagcacaggacaattctaaccgagagtggtactgggaaacagttcaaagtcatagtttagagtttaatgatatgggaatatgctgctgatttaaaaaaatagagtatgtaactgaatacttgacatgttcccaattttggttttaaagacatgtggagatgaattgcagactcaccagaatgaaacttacctgcgtgtcagcagtagcagcccctgggcgaccggtggttttcatttttctctttgtacctttcagccctttccatgttttcaggaaaggaaagtaatatccttaaaatgcatgcttctgagtgcgctgacgggttggagcagagcagagaagggggtggggaggaagcagcagccggcctcaaggttgggccccctggggtgccttgactgactgaaccgcctccttctagttcgagggctgctcgaaggcctactcccgcctggagaacctgaagacacacctgcggtcccacaccggggagaagccatatgtgtgtgagcacgagggctgcaacaaagccttctccaacgcctcggaccgcgccaagcaccagaatcgcacccactccaacgaggtacctctgcggggcatgcactgggcatgcacactggggccccactgacgccccatggcttccaggcatctgtagtccagtagatagccaggtgccccatgtcccgcccccgccactgaccagctatacatcctcagatacagaccaggactctttgagacctagacagaccggtctctttctctatgccacatcctttcctctaaaagatgccccgtgaggtcccatggcatactgaccctctctgtgcctcaatttccttatctccataataaatataatagtgycctccccaaaggccatcatgaggtcctcgagagttgaagttgaagcagggaagtggcccttctgatctcggagtgtttaacatgcatctgctccctattacttggggctgctgggtgggctctgcctccccatcctctagatgaggaaacgaagactcagagatgaagtgactttccccagtgccagagcagtgatgatccctctgcagctgtgaaaacatcctgggtcactgctccccacccccaaattccctttccaccacaagcaggtgttccactggggagcagctgccccactgcctgagggaagcagagcagtgctgtctgagcttggcgtttgttggtagccccctggcctgttggcttgggcagccagcagtgacatgctccagctgttagcgctgcctgggcctgccgtggctgtcagccccagcagatggggcacagagcagcctctgtctccctgggtaggcagagcccctatctgggctgagagaaccagggagaaagcagggcaagagccggtggcatcctggcccagccacacaattactgtcgctcaggcttactcggaaatgtatgtttttaaaagcttagacatatcctggaccccaaagggactttgctccaatgcttgtaagaagttagaggaattttcaaaggcatctgaacccctcagagtctctatggacaagagccagccttagaggggagtgtgtgtgcacatgtgtgtatgtgtgtttgtaagtgtatgtttttctgtagacgtggtgtgtggggtgtgtgtgtgtgtgtgtgtgtgtgtgtgtgtgcatgtttatgagtccaggactgaggttcggaaatcctgggttttttcaccccattactggatgacttggaacctgttcctttgcctccctgatcctgcctttcttcatcagagaaatcaggggtgctagtgctgtcagagggtacactgagctcgtacacttgctactagtactaaaaaccccactgccctgttcattgagaggcagcattgtgattacacgaggcacatgtgtccccagcttcttgtggcaggaccccccgtggccgtgtgcttaactgcatgaacaggtgcagacaagccaggctatggccaggctcctgcatggtgccatccacagagcactggctgcaaatttgacacagcacctactgacgttgccagctgggctctgctgaggggcgtgggtagcttcaggagaacagggagagcgccccttcagagttgatcctcgtacccctatccatgacacaggcctgcttctctccccagaaaccctacatctgcaagatcccaggctgcaccaagagatacacagaccccagctctctccggaagcatgtgaaaacggtccacggcccagatgcccacgtcaccaagaagcagcgcaatgacgtgcannnnnnnnnnnnnnnnnnnnnnnnnnnnnnnnnnnnnnnnnnnnnnnnnnnnnnnnnnnnnnnnnnnnnnnnnnnnnnnnnnnnnnnnnnnnnnnnnnnnttggcaatgctggcgtgtttcagggctgctgggaagcgccctcaggccccacatgcctgtgtgatgctggcagttctgccagctctggcccattcctctggctgtgtttagtctgtcaaaatgaccatctctgggaacatgtgtgcccctggatccttagcggtcatcacaacatagtggggttggggggttccagctccctacccagagtagggtgggattgtatgtgatgacctggtaggggtggggtggggaccagagacagagaagaagctgaaacggtggggagaaagctctcctgccctcaggtactgccccctcccttatcctgtccacaccctgagccctgcttaccaccaaccagtgtcatcaagaacgcccacttccctgccagggcacaggcaggggctccagcccagccccacctgggttggttgtggttctaccacctgctatctgggcacccttggccaagggacctagcctatctggggatgttcccatccacaagatgggcataaagtgcctgtgttgtgaatgttttatttgaattcacaaagaaaatatgtgcatgtgccccaccgatggctggcacacagtcagccctaccctggggagataccaggtaagagcacggctgtgatctcactggccctgtgcaaaagagacatctcggaaggcttcctggaggaagtgtctagacagtcattgatggctacgatggccagtgggcctgtctctggtattgtgtgccctgggtttccaggccagcagacactctatattccaaattggcttgttgctgaggag

SEQ ID NO: 685021 - DNA, 1301 bp, Homo sapiens
tcacaggcaaatcccacagaagattagctcccccgccacatcagtggtcaccaactgtgactgtagtggtgaaaagatagagagagggcggggctggatgaackcgcaggtttggggtctcctcccctgttttcagctccatattcacagtagtgttgctttggtgaattttcacaggatggccaaggccaattcctgccctagggaaagcgtgaagaggcctgggctctattaaaatataaaatatttgtactcaggccgggcgcggtggctcacgcctgtaatcccagcactttgggaggctgaggtgggcggatcacaaagtcaggagatcgagaccatcctggctaacacggtgaaaccccgtctctactaaaaatacaaaaaattttagccaggcttggtggcgtgcgcctgtagtcccagctactcgggaggctgaggcaggatagttgcttgaacctgggaggcagagggtgcagtgagctgagatagcaccactgcactccagcctgggtgacagagggagacgccgtctcgaaaaaaaaacgtacttagtggcggggtggtgcctttggtcagtagccctcaggacatacttgtgagatggcagagggtgtgatctggtgccagatatgctctaacgggggttccggtgacaaggatccaagggcccacagcacagagccagtgaaggcagacgccagggtcccagtggagactccccagtgtctggaggggaccagggaattagcattttcaacaaaggttcacttgagtcttagcttattcaaccaaaaaaccgtagtgatgtggtctgcatctgtgtccccacccaaatctcatgtagaattgtaatccccaatgctggaggtgaagcctggtggaaggtgattggatcacgggggtggattccccacttcggtgctgttcttgggatagtgagttctcccctgaccccgttgttaaaaagtgtgcagcactgcccccccgccacctttcttcttctccggccacttacagcgctggctgcccctttgccttccgccacgattgtaagtttcctgaggcctccccagaagccgagcagatgctggcagcatgcttcatgtatagcctgcagaaccgtcagccaattcaatctcttctttttataaattacccagtctcaggcatttctttatagcaatgcaagaagggcctaatacatgtagctccagagggcagcccagctgagaatggaaggttccggaagggtcctcagcaggagtggctctaacagaggaggggaacgggcctca

SEQ ID NO: 685022 - DNA, 1301 bp, Homo sapiens
tcacaggcaaatcccacagaagattagctcccccgccacatcagtggtcaccaactgtgactgtagtggtgaaaagatagagagagggcggggctggatgaacgcgcaggtttggggtctcctcccctgttttcagctccatattcacagtagtgttgctttggtgaattttcacaggatggccaaggccaattcctgccctagggaaagcgtgaagaggcctgggctctattaaaatataaaatatttgtactcaggccgggcgcggtggctcacgcctgtaatcccagcactttgggaggctgaggtgggcggatcacaaagtcaggagatcgagaccatcstggctaacacggtgaaaccccgtctctactaaaaatacaaaaaattttagccaggcttggtggcgtgcgcctgtagtcccagctactcgggaggctgaggcaggatagttgcttgaacctgggaggcagagggtgcagtgagctgagatagcaccactgcactccagcctgggtgacagagggagacgccgtctcgaaaaaaaaacgtacttagtggcggggtggtgcctttggtcagtagccctcaggacatacttgtgagatggcagagggtgtgatctggtgccagatatgctctaacgggggttccggtgacaaggatccaagggcccacagcacagagccagtgaaggcagacgccagggtcccagtggagactccccagtgtctggaggggaccagggaattagcattttcaacaaaggttcacttgagtcttagcttattcaaccaaaaaaccgtagtgatgtggtctgcatctgtgtccccacccaaatctcatgtagaattgtaatccccaatgctggaggtgaagcctggtggaaggtgattggatcacgggggtggattccccacttcggtgctgttcttgggatagtgagttctcccctgaccccgttgttaaaaagtgtgcagcactgcccccccgccacctttcttcttctccggccacttacagcgctggctgcccctttgccttccgccacgattgtaagtttcctgaggcctccccagaagccgagcagatgctggcagcatgcttcatgtatagcctgcagaaccgtcagccaattcaatctcttctttttataaattacccagtctcaggcatttctttatagcaatgcaagaagggcctaatacatgtagctccagagggcagcccagctgagaatggaaggttccggaagggtcctcagcaggagtggctctaacagaggaggggaacgggcctca

SEQ ID NO: 685023 - DNA, 1301 bp, Homo sapiens
tcacaggcaaatcccacagaagattagctcccccgccacatcagtggtcaccaactgtgactgtagtggtgaaaagatagagagagggcggggctggatgaacgcgcaggtttggggtctcctcccctgttttcagctccatattcacagtagtgttgctttggtgaattttcacaggatggccaaggccaattcctgccctagggaaagcgtgaagaggcctgggctctattaaaatataaaatatttgtactcaggccgggcgcggtggctcacgcctgtaatcccagcactttgggaggctgaggtgggcggatcacaaagtcaggagatcgagaccatcctggctaacacggtgaaaccccgtctctactaaaaatacaaaaaattttagccaggcttggtggcgtgcgcctgtagtcccagctactcgggaggctgaggcaggatagttgcttgaacctgggaggcagagggtgcagtgagctgagatagcaccactgcactccagcctgggtgacagagggagacgccgtctcgaaaaaaaaacgtacttagtggcggggtggtgcctttggtcagtagccctcaggacatacttgtgagatggcagagggtgtgatctggtgccagatatgctctaacgggggttccggtgacaaggatccaagggcccacagcacagagccagtgaaggcagacgccagggtcccagtggagactccccagtgtctggaggggaccagggaattagcattttcaacaaaggttcacttgagtcttagcttattcaaccaaaaaaccgtagtgatgtggtctgcatctgtgtccccacccaaatctcatgtagaattgtaatccccaatgctggaggtgaagcctggtggaaggtgattggatcacgggggtggattccccacttcggtgctgttcttgggatagtgagttctcccctgaccccgttgttaaaaagtgtgcagcactgcccccccgccacctttcttcttctccggccacwtacagcgctggctgcccctttgccttccgccacgattgtaagtttcctgaggcctccccagaagccgagcagatgctggcagcatgcttcatgtatagcctgcagaaccgtcagccaattcaatctcttctttttataaattacccagtctcaggcatttctttatagcaatgcaagaagggcctaatacatgtagctccagagggcagcccagctgagaatggaaggttccggaagggtcctcagcaggagtggctctaacagaggaggggaacgggcctca

SEQ ID NO: 685024 - DNA, 587 bp, Homo sapiens
gaattcccttccctatgagactgtaaactgcctgaaggcatagtgtttggcaggcacttgcgagatgttattttataaagatttattaaaatgaatgaatgaataaataaataaataaataaataaacaaataggaaattgcaaaatggtatgggacacctgtgaaagacatggaatcctgcgtatctgaaagaaaatatattattttgggttgagaggaaaagaacacctctagaaaaatttttaaattgatggaaagattgatgacagtcacttctagaatggtttccaaaggacagtttctaaccatgggaaatatttaaagttgaaagtaaagagacagagaacaattcaaagcattttctggtggggttagaaaaatatgatggaatcaaagataacatgctggcagctttagggaagcacgaaattgttggtaataggtgtaaagaatggaaaggttagaagttgaagaatctstacttttcaatctatactcctttatactgttctgatttggagactatgcaaatgtataatgtatccaaaattacactttaaaaaagttagaagaaattaactattag

SEQ ID NO: 685025 - DNA, 606 bp, Homo sapiens
agctgctcattgactatagatgacctatgttattttaatatctagtttttattagggttataaggagggaggtggggctttttcaatgttaattagtgtaacatgtataaaaatgaacaatagacttaacaaataggtcacctttttctgcctaggaggaaagctgagctgatacagagtttytggggaattctaatgctgatgttgtgaagttctcctatttctcagtacaaaatctaagaggaatcaaaaagaaaaacttacccatttgcatttagggaatacacagcactagaaagagaatcagattaagtaggatttttaaagaataattaattcggtatttatggaatgtaaagtattctcaagttcatgatactgttatatgctaattaacacagtcactgtgaccagtggcaatttcagaatatctgtgcaaaagggcttttgaagcgacatttaaatagcaagcactgtgtcttttaatatgctaatttagagttggttgataagtggaggtaggtgggttctggccaaaataatgcccctttgatgttctcatgactgtgccaacacaaatcatctaatctctctgtagttttctca

SEQ ID NO: 685026 - DNA, 606 bp, Homo sapiens
agctgctcattgactatagatgacctatgttattttaatatctagtttttattagggttataaggagggaggtggggctttttcaatgttaattagtgtaacatgtataaaaatgaacaatagacttaacaaataggtcacctttttctgcctaggaggaaagctgagctgatacagagtttctggggaattctaatgctgatgttgtgaagttctcctatttctcagtacaaaatctaagaggaatcaaaaagaaaaacttacccatttgcatttagggaatacacagcactagaaagagaatcagattaagtaggatttttaaagaataattaattcggtatttatggaatgtaaagtattytcaagttcatgatactgttatatgctaattaacacagtcactgtgaccagtggcaatttcagaatatctgtgcaaaagggcttttgaagcgacatttaaatagcaagcactgtgtcttttaatatgctaatttagagttggttgataagtggaggtaggtgggttctggccaaaataatgcccctttgatgttctcatgactgtgccaacacaaatcatctaatctctctgtagttttctca

SEQ ID NO: 685027 - DNA, 652 bp, Homo sapiens
aagttgcatctactagaaccttgagtgatgagaaggtgctcactagaaatgttccaggcctggtggacacacatgaaaagaccagagctacagaacttggtacttctaccaagaatgaacacctaagctgctgttgttggggccatgacaatcgctggggagaccactacaggacaaatagaggatagactggattgtggagaaaccccgtcaggattttggtctgtatgccaaggataatgggaaataactgacaaaagatagatttaaacagagaagtgagatgaccctatttgaagtttgcaaggatgggtgtggctgcagtattgactagaagcagctgaccccagaggatcacacaagtctggttgggaggccagagtcctgggtccarttcctgccctgctccccaatttcccaccgatgaaggaggcctctatcctgtctgcctcgtggagttgttacaagaaataaaggagactgagagtcccatagcaggatgcgaaatgctgtcaatgtgacatgcattttgtattctttatctgacctggaaaaggagagcatcaaaatgaactttgtttttcttggtcctcatgtttaaggtgagaaatgggcctacttctcactaattttccatctgagaaaattagaa

SEQ ID NO: 685028 - DNA, 967 bp, Homo sapiens
agaaaaaaaaaaaagcctgagtaattatacctaataaacacagtagcaggaacgtcaacctttgaaagagaaaggaggccaaaaaaatgtgtaaccatctggcaaccatgcagtatttgagaaaatgttagtgttctaattgaaatctaattgagtttgataaacatgtcaagataattgcttcagtattmattaaatatgtctcctgcagctgcacagaaagctaaaccttacattgtgctgattatataggatacatatcgatcattcaagtcaacattgctaggctcatgttacaccaaaaatagctctctgtatattgattattaacatctcagattctgacattagttatttctcaatagatgaagaataacatttctgaaatcttgagaggaaattagtgaggctacttaaagactagtcagaaaactattcaccatcaataatatatatatataaagcatcttatataaatatatgtatatataaatgattgtatacattatgagatttttacttttttctatgaaattatatataattatactctatatctaatatataaaatatgtagtaatatataatatacgtaatataattatataagataatatataataggcatatattttatatataatatataatcacaaagaaaaaaggaaaaattaggaccacgcatggtggctcacacctgcagtcccatcattttgataggctgaggtgggaagatcacttgagcccaggagttcaaggccagcctgggcaacattgtgagacctcagttatatatattttttttaatttttaaaagaaaacattactcttttataatcctgttgccattttccagaaagcaatatgttagagcaggaaaatactataaatcatgctgctataaagacacatgcacatgtatgtttattgcggctctattcgcaatagcaaagacctggaaccaacc

SEQ ID NO: 685029 - DNA, 638 bp, Homo sapiens
ctcggggcacgagtagggtttctctcctgtgtgggtgcgctgatgtgcaatgaggttgggactcctgctgaagctcttgccacactcggcacactggaagggcttttcccccgtgtggatcctctggtgggttatgaggttggcactccggctaaagctcttcccacagtctctgcatttgtagggcttctccccggtgtgagtggtttggtgtctactaaaatttgaaccatcactaaagctttttccacattcatcacatttgtagtatttctctcctgtgtgggtcctctcgtgtgtgatgaggtgggatttccggctgaaggtcttcccacactggggacattcgtagggcttctcccctaggtaggtgccctgcaggcctatgagctggccaacttccctgtcctgagaaaccacctccccgtggtcctcacctgggstgtgtccctggagcctctggatgccagcatctctctcaaagtcactttccccatcggagtgctgagcactttcaccttcaggcatttccgagaatatcttacgtgattcattctcaaacatgtcttgattacagttctccccattttcactctgtatctcaaaatctgaaacaatgaagaaaaacatacaatgtc

SEQ ID NO: 685030 - DNA, 1367 bp, Homo sapiens
tttttatggctgtgtaatattccactatatgtatataccacattttttgattcatctgttagtggacatttgacttgttttcacattttggctattgtgaatactgctgcagtgagcattggcatttgagtttctttttttagttcttttgaatatatacctaggagtgaattggtgggttatatgctaatactctgtttagctttgtgaggaacttccatactgttttccatagtggttgcaccattctacattcccgttagcaatgtacaggagttatttatttttccacatccttgcccagcacacttatttgccacactrtgtgtatctgtaaattaccatgaaagcaccacaagctgtaattttttaattttgggattacaaataagttttagtgagcaggcagacttgcaaataaagttatcagtgaagtgaggatcaactatatctaaatgcaaatcatatatatgcattgtgactataacatgttatatgaatacacatagtgtacacctaggtttttacatttctaggtgattttagtgagttgaagtgagcatagtgtcacaatgaggaaacaatagcaggtcattaattttataattaggtaaacctaaaaattcagctatatgttataattttttcagtggtattgtacatgctttcaccaaagattagcataaattatgctccttttttcgaatttctaatagctttttgataaggttttttaaaaataaaaaatcttataaaatgctaatctttaattttcataccagtgtttttagtacgtattcaagtagcaacctttttacctacatagctttaaggttgatggtggggagtgggattttttaaaaataatttcgtttgccaaaaaatgcttattttaattttttttcccaactcctaatccagatctcttgcagctaattaaaaaacttgtaaactctcagcggggcaatgactcatacttgtaatcccagcactttgaaaggtcaaagtgggaggatcgcttgaacccaggtttgagaccagcctgggcaacatagtgagacctgtctctacaaaaaatacaaaaattagccaggcatgctggcatgcacctatagtcccagctacttgggatgctgaggcaggaggatagcttgagcccagaatgttcaggatgcagtgaaccaaggttgtgccagtgcactgcagcctggacaacagcatgagaccctgtctccaaatcaaaaaaataaaaacaaaaaaaacttgtaaacacgatatgaaccatttctgttcaagtccaacagtatatgtctgaggatcataagaatatagcccgtgcttaactgtttaaaatgttaagattgaaa

SEQ ID NO: 685031 - DNA, 3715 bp, Homo sapiens
ctatgcccagctaatttttatattttctgtagagacggttttgccatgttgcccaggctggtctcaaactcctggactcaagcaatccacctgtctcagccttctaaagtgtaagccactgcatctagccttttattttctttttcttttttttggagaggtagtcttgctctgtcgcccaggctggagtgcagtggcgcgatcttggcccactgcaagctctgcctcccgggttcacacctttctcctgcctcagcctcctgagtagctgggactacaggcgcctgccaccacacccggctaatttttttgtatttttaggggagacggggtttcaccgtgttagccaggatggtctcgatctcctgaccttgtgatccacccaaagcggcctcccaaaatgttgggattacaggcatgagccaccgcgcctggcttattttctttttcatttaacaaaataagttaacatttacagattttaggaaatagttctccctatcttggagacagcagtaaatgaacagatttctcattctttctaatagctttgtactttctacaggtatacagtggtatacctgatttatatttattaaattattttgtattatatatcaaattatatatacatttatcaaagtattataaatatttatacttatataaatacaggtaaatatttatatgtatataaatacaggtaaatatatttatataaatacaggtaaatatatttatgtaaatataggtaaatatttatatttatataaatacaggtttatatttctataacctgttcctcctttatggacatttaggtttacagccttttactactacaaattatggtacattgaataaccttgcacatatcttattttgcgaatgtgtaaggatgtacataaagtaaattcctagaagtggaattactgagtcagagagtcttaaatgcatttgtaatatggatatttgttgtcaaattggcaatcaagtaattctatcagtttatccctttaccagcagcaacaataaatgaggtcattttttatttttgtcaatccaattggtgaaaaaatgttacgtttgtaattttaatatgtaagattatgatttctcatagatagtatttcatttcatgggggtattttttaagtaattcttactactgtacaattatcttttttcatgtggcatttaacacattttttcatgttattttaaaaagcttattttcttaggcagtccatcacaaactaatttacttaactattgtgttagacatttaagttgtttgtgcttactgttatttaaaaaaaaacccaaggactattttattttaaatggttgcctttacagatattccagtacatagaattagtaaaatgttaaaaggtacaatgaatatgaatatattcaagattcttggcctgtaatgccaagttgcttatcaaaactgctggtgccttttatgtttttttttgttatttcactttttgtgaattctctgctcatatacccttaggtgtcctttgagctttaatttgatagacggacagtgaaaggttttggttgtcacagtgactgatatttaatagggcaagggttgcttaaggttctgcagtgagttggataaccctactcaatgaattgccctagtgcccccattcctaagcactgcttaagaaaattaatattctcagcaactatgacaatgtattttccccaatttttttctttttaatttcacatagacaaatagaaataatttttttcataagttcaaatctgtttatctccattatttacttcattagtgaatctaaaaagctgtttcatatccagggttcaggtaaatattcgcaagtacttttcttagtttctattttgtggggaggtacacattttgtgagaggaaaaaaaaatttttttttttttttgaaacggggtctcactgtcacccaggctggagtacagtggcttgatcttggctcactgcaacctccgcctccctggctcaagtgatctttccacctcagcgtctccagtagctggggctacaggcatgtgccaccatgcctgtctaatttttgtattttttgtggagacagggttttgccatgttgcccaggctggtctcgaacagctggacttaagcaatctgcctgcttcagcccccmaagggccgggattacaggtgtgagccactgctcccagcctcctaagctctttacatgttaaacagcagcactagttgagtacctcttacccaaaatgctttggaccatattattgcggatttctgactttttcagattttggaatgtttgcaatatacttaccagttaaaccttccaattctgaaaatccaaaatgctccaatgagcatttcctttgggtgtctttttggcactcagaaaatttcagatttggggttttcagatttaggatgctcaatcatgatgtagtaatcatgacagtgagacactttaaaaatgtcattgaaaaacaaaaacaaaaataagaaaaaagaaaaaaatatataattgaagatttaaattacatgcttacctgagtttctttcataagtctgctgtatacaacctaggaaatgcaaaaactaaaataaaaattacctataactcatttacttagagatagactcaatattttcatttatttcctattttgttttactgtgcagatacattttaaacttttatgaattttaagttgaaaaactaatacatgaacatattcttattgcaaaaattcaaaccttatacgtaaagctgaaggcccccaatgacttccattcctagactcagtcccttttgcagagattctgtgaggagtttggtatatatagtattttcaagatctctctttgtagaaatagggtattgttttatggtgttaaaagaaatacttatgtacaatttacttttttgtttcttttgaactaaacagtaggtttcttggcttgtgttacaatgaaactgccatatagtattaaatagcattttataccgtaatttgttcagtttctccccattgtaagatattttgagtgtttccatttttttgttgttgttactgcaattttacattctcacttatgcctatcctctcacatttattcattcatttaataaacactgatttcttgtcatatgccaagcactgtttgagcagtaagaataagactgaaaattcaggtttatcacatcatggaacttatattctagtgagagaagatggatataaaaattgaatatcaattagcaataaatggttggaagaaaaataaagcagaataagaggatgtaaagtgttaggaggatgagagctcctttcttgaatacagtagactaggaatgggcctctataagaaggtgatacttgagcaacaaagggatgaaccatgtgaagatggtttgagagcattccaggtggagagaacagcaaatgtaaaggacctgatgaaagagtaggctgttgggtggcagggggaacaagcaggataccaatgtagctgaaataaagttgaggaaaatattagaagatgttaggaaatgaaagttgaggaaaatgcctagaggtgaacaggagctaaaatatttagagccgtataattgaaattacagtagccacaagccacatgtgctttttgagcacttgaaatgtggctagtctacattgagatatgtttcaa

SEQ ID NO: 685032 - DNA, 3715 bp, Homo sapiens
ctatgcccagctaatttttatattttctgtagagacggttttgccatgttgcccaggctggtctcaaactcctggactcaagcaatccacctgtctcagccttctaaagtgtaagccactgcatctagccttttattttctttttcttttttttggagaggtagtcttgctctgtcgcccaggctggagtgcagtggcgcgatcttggcccactgcaagctctgcctcccgggttcacacctttctcctgcctcagcctcctgagtagctgggactacaggcgcctgccaccacacccggctaatttttttgtatttttaggggagacggggtttcaccgtgttagccaggatggtctcgatctcctgaccttgtgatccacccaaagcggcctcccaaaatgttgggattacaggcatgagccaccgcgcctggcttattttctttttcatttaacaaaataagttaacatttacagattttaggaaatagttctccctatcttggagacagcagtaaatgaacagatttctcattctttctaatagctttgtactttctacaggtatacagtggtatacctgatttatatttattaaattattttgtattatatatcaaattatatatacatttatcaaagtattataaatatttatacttatataaatacaggtaaatatttatatgtatataaatacaggtaaatatatttatataaatacaggtaaatatatttatgtaaatataggtaaatatttatatttatataaatacaggtttatatttctataacctgttcctcctttatggacatttaggtttacagccttttactactacaaattatggtacattgaataaccttgcacatatcttattttgcgaatgtgtaaggatgtacataaagtaaattcctagaagtggaattactgagtcagagagtcttaaatgcatttgtaatatggatatttgttgtcaaattggcaatcaagtaattctatcagtttatccctttaccagcagcaacaataaatgaggtcattttttatttttgtcaatccaattggtgaaaaaatgttacgtttgtaattttaatatgtaagattatgatttctcatagatagtatttcatttcatgggggtattttttaagtaattcttactactgtacaattatcttttttcatgtggcatttaacacattttttcatgttattttaaaaagcttattttcttaggcagtccatcacaaactaatttacttaactattgtgttagacatttaagttgtttgtgcttactgttatttaaaaaaaaacccaaggactattttattttaaatggttgcctttacagatattccagtacatagaattagtaaaatgttaaaaggtacaatgaatatgaatatattcaagattcttggcctgtaatgccaagttgcttatcaaaactgctggtgccttttatgtttttttttgttatttcactttttgtgaattctctgctcatatacccttaggtgtcctttgagctttaatttgatagacggacagtgaaaggttttggttgtcacagtgactgatatttaatagggcaagggttgcttaaggttctgcagtgagttggataaccctactcaatgaattgccctagtgcccccattcctaagcactgcttaagaaaattaatattctcagcaactatgacaatgtattttccccaatttttttctttttaatttcacatagacaaatagaaataatttttttcataagttcaaatctgtttatctccattatttacttcattagtgaatctaaaaagctgtttcatatccagggttcaggtaaatattcgcaagtacttttcttagtttctattttgtggggaggtacacattttgtgagaggaaaaaaaaatttttttttttttttgaaacggggtctcactgtcacccaggctggagtacagtggcttgatcttggctcactgcaacctccgcctccctggctcaagtgatctttccacctcagcgtctccagtagctggggctacaggcatgtgccaccatgcctgtctaatttttgtattttttgtggagacagggttttgccatgttgcccaggctggtctcgaacagctggacttaagcaatctgcctgcttcagcccccaaarggccgggattacaggtgtgagccactgctcccagcctcctaagctctttacatgttaaacagcagcactagttgagtacctcttacccaaaatgctttggaccatattattgcggatttctgactttttcagattttggaatgtttgcaatatacttaccagttaaaccttccaattctgaaaatccaaaatgctccaatgagcatttcctttgggtgtctttttggcactcagaaaatttcagatttggggttttcagatttaggatgctcaatcatgatgtagtaatcatgacagtgagacactttaaaaatgtcattgaaaaacaaaaacaaaaataagaaaaaagaaaaaaatatataattgaagatttaaattacatgcttacctgagtttctttcataagtctgctgtatacaacctaggaaatgcaaaaactaaaataaaaattacctataactcatttacttagagatagactcaatattttcatttatttcctattttgttttactgtgcagatacattttaaacttttatgaattttaagttgaaaaactaatacatgaacatattcttattgcaaaaattcaaaccttatacgtaaagctgaaggcccccaatgacttccattcctagactcagtcccttttgcagagattctgtgaggagtttggtatatatagtattttcaagatctctctttgtagaaatagggtattgttttatggtgttaaaagaaatacttatgtacaatttacttttttgtttcttttgaactaaacagtaggtttcttggcttgtgttacaatgaaactgccatatagtattaaatagcattttataccgtaatttgttcagtttctccccattgtaagatattttgagtgtttccatttttttgttgttgttactgcaattttacattctcacttatgcctatcctctcacatttattcattcatttaataaacactgatttcttgtcatatgccaagcactgtttgagcagtaagaataagactgaaaattcaggtttatcacatcatggaacttatattctagtgagagaagatggatataaaaattgaatatcaattagcaataaatggttggaagaaaaataaagcagaataagaggatgtaaagtgttaggaggatgagagctcctttcttgaatacagtagactaggaatgggcctctataagaaggtgatacttgagcaacaaagggatgaaccatgtgaagatggtttgagagcattccaggtggagagaacagcaaatgtaaaggacctgatgaaagagtaggctgttgggtggcagggggaacaagcaggataccaatgtagctgaaataaagttgaggaaaatattagaagatgttaggaaatgaaagttgaggaaaatgcctagaggtgaacaggagctaaaatatttagagccgtataattgaaattacagtagccacaagccacatgtgctttttgagcacttgaaatgtggctagtctacattgagatatgtttcaa

SEQ ID NO: 685033 - DNA, 3715 bp, Homo sapiens
ctatgcccagctaatttttatattttctgtagagacggttttgccatgttgcccaggctggtctcaaactcctggactcaagcaatccacctgtctcagccttctaaagtgtaagccactgcatctagccttttattttctttttcttttttttggagaggtagtcttgctctgtcgcccaggctggagtgcagtggcgcgatcttggcccactgcaagctctgcctcccgggttcacacctttctcctgcctcagcctcctgagtagctgggactacaggcgcctgccaccacacccggctaatttttttgtatttttaggggagacggggtttcaccgtgttagccaggatggtctcgatctcctgaccttgtgatccacccaaagcggcctcccaaaatgttgggattacaggcatgagccaccgcgcctggcttattttctttttcatttaacaaaataagttaacatttacagattttaggaaatagttctccctatcttggagacagcagtaaatgaacagatttctcattctttctaatagctttgtactttctacaggtatacagtggtatacctgatttatatttattaaattattttgtattatatatcaaattatatatacatttatcaaagtattataaatatttatacttatataaatacaggtaaatatttatatgtatataaatacaggtaaatatatttatataaatacaggtaaatatatttatgtaaatataggtaaatatttatatttatataaatacaggtttatatttctataacctgttcctcctttatggacatttaggtttacagccttttactactacaaattatggtacattgaataaccttgcacatatcttattttgcgaatgtgtaaggatgtacataaagtaaattcctagaagtggaattactgagtcagagagtcttaaatgcatttgtaatatggatatttgttgtcaaattggcaatcaagtaattctatcagtttatccctttaccagcagcaacaataaatgaggtcattttttatttttgtcaatccaattggtgaaaaaatgttacgtttgtaattttaatatgtaagattatgatttctcatagatagtatttcatttcatgggggtattttttaagtaattcttactactgtacaattatcttttttcatgtggcatttaacacattttttcatgttattttaaaaagcttattttcttaggcagtccatcacaaactaatttacttaactattgtgttagacatttaagttgtttgtgcttactgttatttaaaaaaaaacccaaggactattttattttaaatggttgcctttacagatattccagtacatagaattagtaaaatgttaaaaggtacaatgaatatgaatatattcaagattcttggcctgtaatgccaagttgcttatcaaaactgctggtgccttttatgtttttttttgttatttcactttttgtgaattctctgctcatatacccttaggtgtcctttgagctttaatttgatagacggacagtgaaaggttttggttgtcacagtgactgatatttaatagggcaagggttgcttaaggttctgcagtgagttggataaccctactcaatgaattgccctagtgcccccattcctaagcactgcttaagaaaattaatattctcagcaactatgacaatgtattttccccaatttttttctttttaatttcacatagacaaatagaaataatttttttcataagttcaaatctgtttatctccattatttacttcattagtgaatctaaaaagctgtttcatatccagggttcaggtaaatattcgcaagtacttttcttagtttctattttgtggggaggtacacattttgtgagaggaaaaaaaaatttttttttttttttgaaacggggtctcactgtcacccaggctggagtacagtggcttgatcttggctcactgcaacctccgcctccctggctcaagtgatctttccacctcagcgtctccagtagctggggctacaggcatgtgccaccatgcctgtctaatttttgtattttttgtggagacagggttttgccatgttgcccaggctggtctcgaacagctggacttaagcaatctgcctgcttcagcccccaaagggccgggattacaggtgtgagccactgctcccagcctcctaagctctttacatgttaaacagcagcactagttgagtacctcttacccaaaatgctttggaccatattattgcggatttctgactttttcagattttggaatgtttgcaatatacttaccagttaaaccttccaattctgaaaatccaaaatgctccaatgagcatttcctttgggtgtctttttggcactcagaaaatttcagatttggggttttcagatttaggatgctcaatcatgatgtagtaatcatgacagtgagacactttaaaaatgtcattgaaaaacaaaaacaaaaataagaaaaaagaaaaaaatatataattgaagatttaaattacatgcttacctgagtttctttcataagtctgctgtatacaacctaggaaatgcaaaaactaaaataaaaattacctataactcatttacttagagatagactcaatattttcatttatttcctattttgttttactgtgcagatacattttaaacttttatgaattttaagttgaaaaactaatacatgaacatattcttattgcaaaaattcaaaccttataygtaaagctgaaggcccccaatgacttccattcctagactcagtcccttttgcagagattctgtgaggagtttggtatatatagtattttcaagatctctctttgtagaaatagggtattgttttatggtgttaaaagaaatacttatgtacaatttacttttttgtttcttttgaactaaacagtaggtttcttggcttgtgttacaatgaaactgccatatagtattaaatagcattttataccgtaatttgttcagtttctccccattgtaagatattttgagtgtttccatttttttgttgttgttactgcaattttacattctcacttatgcctatcctctcacatttattcattcatttaataaacactgatttcttgtcatatgccaagcactgtttgagcagtaagaataagactgaaaattcaggtttatcacatcatggaacttatattctagtgagagaagatggatataaaaattgaatatcaattagcaataaatggttggaagaaaaataaagcagaataagaggatgtaaagtgttaggaggatgagagctcctttcttgaatacagtagactaggaatgggcctctataagaaggtgatacttgagcaacaaagggatgaaccatgtgaagatggtttgagagcattccaggtggagagaacagcaaatgtaaaggacctgatgaaagagtaggctgttgggtggcagggggaacaagcaggataccaatgtagctgaaataaagttgaggaaaatattagaagatgttaggaaatgaaagttgaggaaaatgcctagaggtgaacaggagctaaaatatttagagccgtataattgaaattacagtagccacaagccacatgtgctttttgagcacttgaaatgtggctagtctacattgagatatgtttcaa

SEQ ID NO: 685034 - DNA, 596 bp, Homo sapiens
gtttcaaagttgaaattaaaatatgaccattgaaaatatgcacatcagttatggttccagcagagtgtggaagcagctgctggtttctataaaagcgtgtgcttttaggrctttgaaaagcttttgccacgtagagaaggcgctcagctgcctctggagagaccgaggctgctgcagagaaagaaacagcttcctatgtggccctgcagctgggtcacccagagcctgaggagttcttcagacaggcaggcagctttggggccagcagttacatcatgggctagaacctaaggacaagctagaggtgcatgtggccgtgttcacaccttcaggcccgctgcgtttttggaggtcttgggtttagtgagcagatggtgccttccgcggcctcagtcacgagagcgcaaggcttgtcctccatgggggggcctctgctgcacctgctgagctgttttctctgtgcctcctgggtgaaaattgaaaaaccaaaagctttgagcagctcctggtaccaagaaaaggactgacttagtttgtttttgctgctgtaacaaaatacccccgacgacgtcacttataaataagagaaatgtatt

SEQ ID NO: 685035 - DNA, 435 bp, Homo sapiens
ggattattttttatcattctatttttccttctactagtttagaatatatacctgctattcctttcctttagtggttccttaaattataacattatgcttaagttatcaaatccccaaattaatcaatactttgctgcaccatggacaatgttagaaccttagaacatttaactcaattttctcacccaatcaatttacatgttattattgtcatgtattttaatgtatgagtactatttgaatatactcgtttatcactttatttgttcttaatttcttcttgcttctcagaccttccatttgatattgcttctcttctgcctgaagtatattgtttagaatttcctttcatgagartctggttgtgttaaacactaacagattttcggccgggcgcggtggctcacgcctgtaatcccagcactttgggaggcc

SEQ ID NO: 685036 - DNA, 1088 bp, Homo sapiens
ggttcaaatacttcttctttagatatttcaattacatgcatgttgggtcttctttgcctgtcttccattcaaccactttatatctctgacccttctgatgtctgtctttacctcattctcattcatatctgccttaagtgacacattaaattttcatttcaatacattctcccttacatcttgtaatttatttcttatttgtgatttttcctatttctaagtatttcatacacaggaatcctagttcaagagtgttccctctgtcactatagtgaagttcagtttatttcaaagacaatgttgagctgttaggggtgagcaaaagcagctggcatgtcttctagttctctttcatttctgcaggaccaccaattttccccattactttgttctttccctcccttgccatctgaggggcatctccactgctctatttatctctcacctccagaagcaatgttttgtcaaggcttcccccttcagtcctgctcaaattcacattcctgtactcagtgctatgaattactaacttctagacctgacctctgtttagacgtttaacagtttaaattagactttctctttctgaaggagattttcatggtgcttgatccagtttcctgctccccgctcttcttttccaacgaaatactaaagactcccctcccccactctccatgcttgtagcagcaacaaaaattttctgtttttatacttatagataatttgaggttcatggtatccttgatctcctcgcaatgctaaaagagtaatttcatgaatggtttacttgtgcttcaagttgaattcacaggttttaggggaggatgtgttgagagatcaggattttagcagsctccattagcccagtgccaactggaattcagcatattcattcttaataagagtaaagtgatgccttaagatactggaagatgcttgaaaacagtctataaaattatttacatattcttcttctaataacgtaactaatatgtgtagagtaaaattcacagaattatcagttccaaattcctgaagtcaaaactgatgaggattttctataattcaaagttcccaacttttct

SEQ ID NO: 685037 - DNA, 1041 bp, Homo sapiens
caggccaataattgtcaggtaggagtacagcagttactaaagtagctgttttcttgattttgacccctataaaccctgacaccaggcctacttcagtcacagggagggccctgagaactcaagctaaaagctcattcccttgccagggcagcctctgaccaaaggaaataaatcatgctgcatagagtggtacataggtgccaagtgagggctctttctcagatgccatgaattctccttatcatccatctatcatctctagctttttctcatttcttcagggcatttttttttttggaaacaagatctcactctgtcacccaagctggagtgcaatggcacaaaaatgactcactgcagccttgacctcctgggctcaagtgatcttcctgtctcagcctcccaggtggctgggactgcaggtgtgtgtcagcacatttggctaattttttaatttttcgtagagatgggatctcactttgttgcacaggctgattttgaactcctgcgctcaagctgtcctcctgcctcgacctcccaaagcactgggattacatgcatctgccatcgcacccgccctcttcagggcttttaaattgcagcagaatttcctgaaatctcctcctctcttctcctttacccttcttcctggccagtctcaggagggccccactgaggaaatactgtcccaagactgggccatcagattgtaggttatcctggaaaaattgttcacggaggctccatttttctgccttttggaagtggggcaggaatgtgggcaaaaaacaaggtagaataaacagagtgatgtttcttcagattagtactgttaattagattcttgctctttctcttttcttctgytagtcatatctaaaaggtaataaaagtgggagtcctcatatcacaatggtctaattaattttgtcaaaagtattaacaataataaatataacaacaaaatctaatttgtattgagtaaggccccatgctaagtgcttttcagctttacctaatttatcctgtacaacagtaata

SEQ ID NO: 685038 - DNA, 646 bp, Homo sapiens
acatgagcattacattgtcattttatgtcttattgactcagcctcaaacgaggaacctgcttcttttctgctatatctaaaatctcttgatttccttgatatttttgatatctacattgaacaagcccaaatctctcccatctaaaaaaaaaaaaaaaagcttcgtctcagctttgccttgccttctgagcctccccttctcgccttcacagtgaagcttcttaaacacacggtcctcctttgcagggttatgtcaccaacctcttacycctgaactcactgtcatcttgctttcacctgcacaactccaccgaaactcctcaggccaggccctgggggacgtctcagtgacgtggtggactctgttcagccccatttccacctcttggtagccctgctcttcagggcccttgtgcctcaggagctgctggggctggctcagttctctggtgtggtctctggccccttctctgatgtgcttctctgggtgctcctcctcccctgctggccctccgaggctgtcatgcctccagatcctgtcagctgcctccacgtaggctgctggttctcagacttgaatggtcagggctccccggaaatctcaatgcaccacagatggagcccatcccatggtgagcacctcaca

SEQ ID NO: 685039 - DNA, 1172 bp, Homo sapiens
ttttaaattatacattttaaatggcttagaaccatgctgaccatgaagtgcactgcttttattttcctctaagaggatctgctgcaagtagttggctgacagcttccagctgctaagctctcaggttccccaaactcttggggatatttacacctcaaacccatggtttccctggttgctcccagccagtgactgagcagagcagggaccctagagcccactccttcccagtgcaggatccatctgaaggtcatcttcacttagagctgcaccacaatctgaggttccttctactcaattctacttccttccctctcttctttcacaaatgtcaggcttgcatttgctcccctgcctcctcctgctccttaccactttaytaatcaaaggcaattccctcaaataaatctctagcatacatctaatctcatcttggggagcctaaactgatgtgcagtcaaataaattgcccagaaaaacacagccaataggtggcaaagccaaaactcagtatctatattactaactgtcaccaactgaacatggatataaaattgcatttatttgataatgagaactatctaaatagggtttttatgtattccctggtggagtggttctgaccctctcactaaatagtgtgattttgagtaaaccactgacctttctgtatctctatttttaaaatatgaaaataagaggtgaccctcttgaagcttgtaaactactcttcttcctgtgtccatgttgatctcatgaatccatttcagccctttctcactctaagacactgatatggtttgtctgtgtccccacccaaatctcaacttgaattgtatctcccagaatttccacatgttgtgggagggacccacggggaggtaattgaatcatggaggctgatctttcccatgctattctcatgatagtaagtctcacgagatctgacgggtttatcgggggttctgcttttgcttcttcttcattttctcttgcctaccaccatgtaagaagtaccttttacctcccaccatgattctgaggcctcccaagctatgtggaactgtaaatccaattaaacctctttttcttcccaaaggtatgtctttatcagcagcatgaaaatggactaatacagacaccaagcagctattctaactgattgaattggg

SEQ ID NO: 685040 - DNA, 1172 bp, Homo sapiens
ttttaaattatacattttaaatggcttagaaccatgctgaccatgaagtgcactgcttttattttcctctaagaggatctgctgcaagtagttggctgacagcttccagctgctaagctctcaggttccccaaactcttggggatatttacacctcaaacccatggtttccctggttgctcccagccagtgactgagcagagcagggaccctagagcccactccttcccagtgcaggatccatctgaaggtcatcttcacttagagctgcaccacaatctgaggttccttctactcaattctacttccttccctctcttctttcacaaatgtcaggcttgcatttgctcccctgcctcctcctgctccttaccactttattaatcaaaggcaattccctcaaataaatctctagcatacatctaatctcatcttggggagcctaaactgatgtgcagtcaaataaattgcccagaaaaacacagccaataggtggcaaagccaaaactcagtatctatattactaactgtcaccaactgaacatggatataaaattgcatttatttgataatgagaactatctaaatagggtttttatgtattccctggtggagtggttctgaccctctcactaaatagygtgattttgagtaaaccactgacctttctgtatctctatttttaaaatatgaaaataagaggtgaccctcttgaagcttgtaaactactcttcttcctgtgtccatgttgatctcatgaatccatttcagccctttctcactctaagacactgatatggtttgtctgtgtccccacccaaatctcaacttgaattgtatctcccagaatttccacatgttgtgggagggacccacggggaggtaattgaatcatggaggctgatctttcccatgctattctcatgatagtaagtctcacgagatctgacgggtttatcgggggttctgcttttgcttcttcttcattttctcttgcctaccaccatgtaagaagtaccttttacctcccaccatgattctgaggcctcccaagctatgtggaactgtaaatccaattaaacctctttttcttcccaaaggtatgtctttatcagcagcatgaaaatggactaatacagacaccaagcagctattctaactgattgaattggg

SEQ ID NO: 685041 - DNA, 1172 bp, Homo sapiens
ttttaaattatacattttaaatggcttagaaccatgctgaccatgaagtgcactgcttttattttcctctaagaggatctgctgcaagtagttggctgacagcttccagctgctaagctctcaggttccccaaactcttggggatatttacacctcaaacccatggtttccctggttgctcccagccagtgactgagcagagcagggaccctagagcccactccttcccagtgcaggatccatctgaaggtcatcttcacttagagctgcaccacaatctgaggttccttctactcaattctacttccttccctctcttctttcacaaatgtcaggcttgcatttgctcccctgcctcctcctgctccttaccactttattaatcaaaggcaattccctcaaataaatctctagcatacatctaatctcatcttggggagcctaaactgatgtgcagtcaaataaattgcccagaaaaacacagccaataggtggcaaagccaaaactcagtatctatattactaactgtcaccaactgaacatggatataaaattgcatttatttgataatgagaactatctaaatagggtttttatgtattccctggtggagtggttctgaccctctcactaaatagtgtgattttgagtaaaccactgacctttctgtatctctatttttaaaatatgaaaataagaggtgaccctcttgaagcttgtaaactactcttcttcctgtgtccatgttgatctcatgaatccatttcagccctttctcactctaagacactgatatggtttgtctgtgtccccacccaaatctcaacttgaattgtatctcccagaatttccacatgttgtgggagggacccacggggaggtaattgaatcatggaggctgatctttcccatgctattctcatgatagtaagtctcacgagatctgacgggtttatcrggggttctgcttttgcttcttcttcattttctcttgcctaccaccatgtaagaagtaccttttacctcccaccatgattctgaggcctcccaagctatgtggaactgtaaatccaattaaacctctttttcttcccaaaggtatgtctttatcagcagcatgaaaatggactaatacagacaccaagcagctattctaactgattgaattggg

SEQ ID NO: 685042 - DNA, 1172 bp, Homo sapiens
ttttaaattatacattttaaatggcttagaaccatgctgaccatgaagtgcactgcttttattttcctctaagaggatctgctgcaagtagttggctgacagcttccagctgctaagctctcaggttccccaaactcttggggatatttacacctcaaacccatggtttccctggttgctcccagccagtgactgagcagagcagggaccctagagcccactccttcccagtgcaggatccatctgaaggtcatcttcacttagagctgcaccacaatctgaggttccttctactcaattctacttccttccctctcttctttcacaaatgtcaggcttgcatttgctcccctgcctcctcctgctccttaccactttattaatcaaaggcaattccctcaaataaatctctagcatacatctaatctcatcttggggagcctaaactgatgtgcagtcaaataaattgcccagaaaaacacagccaataggtggcaaagccaaaactcagtatctatattactaactgtcaccaactgaacatggatataaaattgcatttatttgataatgagaactatctaaatagggtttttatgtattccctggtggagtggttctgaccctctcactaaatagtgtgattttgagtaaaccactgacctttctgtatctctatttttaaaatatgaaaataagaggtgaccctcttgaagcttgtaaactactcttcttcctgtgtccatgttgatctcatgaatccatttcagccctttctcactctaagacactgatatggtttgtctgtgtccccacccaaatctcaacttgaattgtatctcccagaatttccacatgttgtgggagggacccacggggaggtaattgaatcatggaggctgatctttcccatgctattctcatgatagtaagtctcacgagatctgacgggtttatcgggggttctgcttttgcttcttcttcattttctcttgcctaccaccatgtaagaagtaccttttacctcccaccatgattctgaggcctcccmagctatgtggaactgtaaatccaattaaacctctttttcttcccaaaggtatgtctttatcagcagcatgaaaatggactaatacagacaccaagcagctattctaactgattgaattggg

SEQ ID NO: 685043 - DNA, 530 bp, Homo sapiens
aagttacagaaagaatttctggttctttgggaggccaaagtgggagtatcgcttgaggtcaggcatttaagaccaacttgggcagcatagtgagatcccatctgtacaaaaaatgaataaataaaaattagccaggtgtggtggttcatgcctgtagtccctgctactcaagagactgaggtgggaggatagcttgggcccaagagttcaaggttgccataagctatgattatgccactgcacaaagtgagamcctgtctccaaaaaaaaaacaaaggattcctggtttagagttggccaacaagaaaatctgccaccctctttagtagtgagtgacccatcaccaagagcgttcaatgggatatgcggtgtagagtgggagtgggagactcttgcatcagctaagagggcagaatgaaaccactttaagacccactccaaccctgttgagttgatgactaatctactataaagtatagacggtctccctccttttctgagggaagcagtcatgaacccgacaccaaaca

SEQ ID NO: 685044 - DNA, 530 bp, Homo sapiens
aagttacagaaagaatttctggttctttgggaggccaaagtgggagtatcgcttgaggtcaggcatttaagaccaacttgggcagcatagtgagatcccatctgtacaaaaaatgaataaataaaaattagccaggtgtggtggttcatgcctgtagtccctgctactcaagagactgaggtgggaggatagcttgggcccaagagttcaaggttgccataagctatgattatgccactgcacaaagtgagaccctgtctccaaaaaaaaaacaaaggattcctggtttagagttggccaacaagaaaatctgccaccctctttagtagtgagtgacccatcaccaagagcgttcaatgggatatgcggtgtagagtgggagtgggagactcttgcatcagctaagagggcagaatgaaaccactttaagacccactccaaccctgttgagttratgactaatctactataaagtatagacggtctccctccttttctgagggaagcagtcatgaacccgacaccaaaca

SEQ ID NO: 685045 - DNA, 1183 bp, Homo sapiens
tctatacccgcacattagagcttcagtgggcacagtcacctacttataaatcattctgaaccaaacataagaccttccattatatttctttcctaatttgagaattgattaatcgtaaaaatcatgtaaaaatacataaaatcaatttcatttggcttttaattcagtgattacctttacaaaaaaagagtacacagactcgagatgatcccagagcrtctgatgagtccttacaaagggtttaagaatcttgcagtcagaatactgaacaaagacacacagttgtgctacttgcagctgatggaatcacaggtatcctttccattaatgatccctagacgatttagaattgacagcagaccgctagtatagttattttggggggttatgctgcaccaggagaggcttcagcccccgaatactgtggcaataatataatggagtgagaagcaggagggagagagaggatggaactggaaagtataagatctgggacaaggaactcagactgtcctgcagaaaaaagaaatcatgcttctggcttccagttgagtcctgtggttattcccaataggtcattaatttgtgtcacagggcatggaacagacataacacctatatttcaggggtttaaaatcttagtacaatggagcacaaaagagattatggtttctaacttctagtttccattatctatcatcaaacatgacatattttaataaattttccctaatgcaagtcaatacttggcaaagcacaatcacatcttaaattatggaaaaaagtaatacaattttgaaaagaaaaagttcctttaaccatatgagatctttgagatcccctgaatgaatttaaaaggttgaactctctctgaagacatatgacacattgatttatttattttaacctttacttttctcaaaattatagcagtatgtagggggcctgatatggtttggctttgtgtcccccacaaatctcatctcaaattgtaatttccatgtttcaggggaagggcctggtgggaggtgattggatcacgggggcaaattttccccttttgcttttcttgtgatagtgagtgagttctcatgagatctgatcatttaatagtgtgtggcaccacccccttctctatctctcctgctctgccatggtatgatgtgcctgcttcccctttgcc

SEQ ID NO: 685046 - DNA, 628 bp, Homo sapiens
taaataattgatctattattatctggtaatgtcattgcttcttcttactcaagtagccatttggagaactatttctccctaattatcattaggaggttaacctcagtgatcttaccatatttttaaagaagaagcatgtgggaacctttawgaagatatagaacagagaaaactctgagaggatgtggttcatgcaacaactgttctcaggttatgaaagcaaacgcatatgcaagcaaaaacagcgggtgaaaggcaagacagcgaaagggttttcttgtctgattttgggttgtggggtaggagtaaagccattccattcttatctcatttgtttagggtgcttcagcacaggaatccagaggcagggatgcccaagatttgaagtatgttctgaagacaaaggaaggtttgtggatttctcctataagagactattccaggctcaggcaagggtaagaacaaacatttatcaaatgctgtgtgccaagtgagtcacatcagttatcttattgaatactaacaacaaccctttgatgagctcccattactcccatttcacagatgaggaaactggcagctctgggataggaactctctggttaaccacttgcactactgtctgctg

SEQ ID NO: 685047 - DNA, 1186 bp, Homo sapiens
tttctcccaattgcattttgcatgctaaaaggacaaaattccaacaaattagaaatcaccaaaataattcacttacttcatttaatgaagtcattaattcagtgaacgttgattgcattatcaagtgttaagtgctcagaatacaaataagtacagaaaacagttcccaaatggatattctcaccgatggcatggtgttacatttttatattatataactatattaattcaaaagaaattattacaaacatttctttataaaattattttgaccatgaggcatagtggggtggggagggaaggggaagtgtctctcctacttcatgtttaaattacttttctggctaccgaaacttgtttttgatttgttttcatttttttttaattgagacagggtctctctctctcacccaggctggagtgcagtggtgcaatctcagctcactgcaacctctgcctcccaggctcaagcgatcctcccacctcagcctccaagaaagctaggaccacaggtgcgcactaccatacccacctaattttttagtattttcagtagagaaggggtttcatcatgttgcccaggctggcctcgaactcctgagctcaagggatccacccctctcagtcttccaaagtgctaggattacaagtattagccaccattcctggccactgccaaaccttgtaggccctggtagaaatggttgagaagattctgggtgtaatgatatcactttagtaacttcttacttgtactttggaaacattggccatctaatatccaactaatgggaatttgctagtgatcaaattcaagagaaatcccttttccccaaaataagcttgtggtggcatgtagaaattgaattgaaaacctatttttgtctcatctaatattacatgaagctatgtttgcagaattgttttaactgtgtgaaagaaaatgcttgtaaataattatattttgatgaataacaacgttgttatttactaaagtcagatgatgctttcttttctttttatttccccaccagataactaggttgtattgaaaatatttaatgattaaaaacatgarctctacagagtgatagggtccaaatcctcttctcactggattaactctatggccttatggaaattacttccctacgactcaatttcttcctttagaaaaatgtgggtc

SEQ ID NO: 685048 - DNA, 1186 bp, Homo sapiens
tttctcccaattgcattttgcatgctaaaaggacaaaattccaacaaattagaaatcaccaaaataattcacttacttcatttaatgaagtcattaattcagtgaacgttgattgcattatcaagtgttaagtgctcagaatacaaataagtacagaaaacagttcccaaatggatattctcaccgatggcatggtgttacatttttatattatataactatattaattcaaaagaaattattacaaacatttctttataaaattattttgaccatgaggcatagtggggtggggagggaaggggaagtgtctctcctacttcatgtttaaattacttttctggctaccgaaacttgtttttgatttgttttcatttttttttaattgagacagggtctctctctctcacccaggctggagtgcagtggtgcaatctcagctcactgcaacctctgcctcccaggctcaagcgatcctcccacctcagcctccaagaaagctaggaccacaggtgcgcactaccatacccacctaattttttagtattttcagtagagaaggggtttcatcatgttgcccaggctggcctcgaactcctgagctcaagggatccacccctctcagtcttccaaagtgctaggattacaagtattagccaccattcctggccactgccaaaccttgtaggccctggtagaaatggttgagaagattctgggtgtaatgatatcactttagtaacttcttacttgtactttggaaacattggccatctaatatccaactaatgggaatttgctagtgatcaaattcaagagaaatcccttttccccaaaataagcttgtggtggcatgtagaaattgaattgaaaacctatttttgtctcatctaatattacatgaagctatgtttgcagaattgttttaactgtgtgaaagaaaatgcttgtaaataattatattttgatgaataacaacgttgttatttactaaagtcagatgatgctttcttttctttttatttccccaccagataactaggttgtattgaaaatatttaatgattaaaaacatgagytctacagagtgatagggtccaaatcctcttctcactggattaactctatggccttatggaaattacttccctacgactcaatttcttcctttagaaaaatgtgggtc

SEQ ID NO: 685049 - DNA, 916 bp, Homo sapiens
cctgagggaggagtcatgatctttgctaaagaaaagtgaggaaaaagtaagtttgatatgtaaagaaacttacccaagacccccctggctggttagtgagacagtragaccagaattcagagctacatgtttctagtctgggactttcagtgttctgccgtgcagtagtttagctgcatttcaagctcagtctttagacaatggcccagtcgataataacttgaaaagggctctagaattatgtaatttggagaagaaaatgaaatgctcaacagaagcttaaaacatgcacatttaaaaattttaaattattccatgtaaaaaagattttcttgaagttagattaaaaagagatcttacaggctgttccagttaattttaacctcagtgagaaatgtcacatttcccatgcacatttgattaggcatccaggagtgtcaggacatcctgtcccatggtggatttctgtgagaattatatggtctatggaaataattataaaacaaagtctcatctcaatgtgaacaagaggaagaaaataaacctctaatattctgatattccaaggacatggcaaaccaagatggactctgagctctgaaatgccctttcatccttacacttctcctatttagtaatacttgttaactcctgtggtaattgtttgcatctcactggggatatgtttgaatttattatgatctcgacaggcagagaatttctcatcgtgttgaccagtagttctcaaaggtaagtgagcatgaggatactgggaaagactatgcacatgtatattcctgagccccatccccagaaattctgactcagcacatgtggactggcactcaggaatctaaatgctaaaaatgcagcctaggtgatattcctgcaggtggtccatggtcgtcactttgaa

SEQ ID NO: 685050 - DNA, 916 bp, Homo sapiens
cctgagggaggagtcatgatctttgctaaagaaaagtgaggaaaaagtaagtttgatatgtaaagaaacttacccaagacccccctggctggttagtgagacagtaagaccagaattcagagctacatgtttctagtctgggactttcrgtgttctgccgtgcagtagtttagctgcatttcaagctcagtctttagacaatggcccagtcgataataacttgaaaagggctctagaattatgtaatttggagaagaaaatgaaatgctcaacagaagcttaaaacatgcacatttaaaaattttaaattattccatgtaaaaaagattttcttgaagttagattaaaaagagatcttacaggctgttccagttaattttaacctcagtgagaaatgtcacatttcccatgcacatttgattaggcatccaggagtgtcaggacatcctgtcccatggtggatttctgtgagaattatatggtctatggaaataattataaaacaaagtctcatctcaatgtgaacaagaggaagaaaataaacctctaatattctgatattccaaggacatggcaaaccaagatggactctgagctctgaaatgccctttcatccttacacttctcctatttagtaatacttgttaactcctgtggtaattgtttgcatctcactggggatatgtttgaatttattatgatctcgacaggcagagaatttctcatcgtgttgaccagtagttctcaaaggtaagtgagcatgaggatactgggaaagactatgcacatgtatattcctgagccccatccccagaaattctgactcagcacatgtggactggcactcaggaatctaaatgctaaaaatgcagcctaggtgatattcctgcaggtggtccatggtcgtcactttgaa

SEQ ID NO: 685051 - DNA, 1448 bp, Homo sapiens
aattgcccaggctttttgttaaattctgcttcaggaagtctgggatgggtcctgggagtctgtacttcttacaagggtcaggtaaagctgatgctgttggttgaaaagtcgcacttttgaacaatggaacacagttttctagtgaaacactatggagagaagggtcaacagctaaacaagtgtgaaggctgctgaataacstagctgctcttatagtcttatgaagcatgctgtaagagactatcaaagtcttgcacaaatttggctgggttttaactggtgtttcctgaatgaattttactacagaatcctttcatgaagaaatgcctatttacataaaaacaacaacaaacaggtgttatgtgaaacactattttggaagaattttagtatacaggggtcttaaaagaaaattatctgctcactcaattcctatttctgttaccaaataaatcacattctcagattttacctgagaataatcaaatatacagcttccttgaactttgcttgaaatttcaaatgctaagtcttttgaaaccagttaaaggcaaatacatgtgtcaggaatggccttaaccagataaggcttcaacgctatgaatggtactgtgctaactggaagatgttgggaaatgcctccaactagaaatatctattctgccaatgattatgtaccccattgctgatgaattattcttttaggtaacacttcactgtctcctgttcttggatgagcaggctcccaggaatgctgaacattgggtcactaacacacattgtggcaaagagttgctgtgatctcttgcttcccaagatggccatggaaaacaatgaaacaggcccctcccatgtccatggacaacccctttcaaagtgtgcccacttaccccttgaccttcccaacaatctgagggtaaagctaaggcatggattatcacgcttgttgaacagatgagaaattgcagctgagaggataagttatttgttggaagacctccctctatcggcagagcaaagataaaaggtcaataaagaggtctaagaattagcagacttttccgaggcacttcatatatttgatttttttggtcccattttgcacattggaaaactgaggtgtaagataatgtgtcacttgtccaagtctcccagttagtaaatggtggtgccaggatgcaagtccatctgttagatttcaatgcatcagtgtgggtgccttcagtatttcttcatctatttcagatattagcagctactaggccttgtaatggaggggaaaaggcttcacaaggataatgaggtataagatcagacatttgcaacagagaagttttctctactgcacaagtttgcccaaggccaatcatcatttcattacatgttttttttcccccttttaaatatattgtgcagtattttgtatgaggtggtgttattgttagctc

SEQ ID NO: 685052 - DNA, 642 bp, Homo sapiens
gcaagactctgtctcaaaaaaaaaaaaaaaaaatttaaaggtcacagaaatatcgtaattgtcccccattgattattaagataattttgtacagtttcagcttgcaaggtcatttttttaatcttayacttcatacaaaggaaggactacctatacatagtttaattttgtttgcttcagtatctggcatacttggggaatagatgtccaatcttgcgtttctaatgcttgctgtctctcaccgagtgtgctctgttcccgaggtgttatatgattttgggtttagattgctgttctttttctaacctcttcaacaaattctaagacatcattatttttagactttcttttctaatacatactcttaagatacagctttccctctaagaatcgccttagtggcaacgccgacgttatgttattttctttattaatcagttgaaaatattttctaacttccattgtgagttctttgacctgtgagtaacatttagaggcatactgcttaacttagaaaaagctgaggattttctagttacctttttattattgatttctagcataattttcactgtcatcaaagaacataatctgaataatttcaatccttttataatctgagagttgctttttttttgagtt

SEQ ID NO: 685053 - DNA, 635 bp, Homo sapiens
ggtcagaagtatggctagcctgaggtccttgagcttgcagctagtgtgtgaatgaacgcaattatggggaggactgtgctcctcacctgtgatgtctggtctaactccaggtagttagtgttagagttgcactgcaatagcaatcagggaaatggaaatgaagagtgagagatgattttatacccagtgtcttgtcaatactcaaaaagcctggaaatagcaacaatcaacaatgatgaaggtaaacaggaactctgatctgggggtggaaatgaatgttggcgtaaattctctggacaggytcttacttgaattcccaccaactgagacaaggaccgataaaatgaaaggataagttccatagctgatgaatccaaaaaataagaattctacccaagtcactgaattccaaatccattgtgctttctcccacaattgacagccttccaaggttgatgaaataaacatttttagcaaaaccttcaacttactatgctttttatattagagaacatttcttatccattagtttattctattgtcataacccttaagaaaggtaaacatgataacacaaaaaggttcattaaattagagggtgattctgaaacttgaacttgttctcaagaatccaa

SEQ ID NO: 685054 - DNA, 943 bp, Homo sapiens
tgagttcatgagagtgaggatctcatgatgagatctgtgtccttctaaaaagaggaagacagaccagagtgttccccactccgactttattttaggttgatgggatgagaaatacagatttgattgccacagtgaatgaactaaattactgggaaaaaccatttggaacagtcatctataagagagctttagaagtaataataataactaccatgtttatttttagcaagtcccatgtgccagtcattaagcacttagcatatagtaattcatttaactttccaaagttaaacttaccacaccgtcttataataaattgcctatgaatcttctttccatgatagcaggagataggctttattcaactttggatccccaaaacttatcacagcagttggcacagaataagtgctcagtgtctgtgtgtgtgtgtgtgtgtgtgtgtgtgtgtgtgtgtgtgtgtrttttttttttttgttttatttttggagacagtctcactctgtaacccaggctggagtgcagtggcacgatctcagctcactgtaacctccacctcctgagttcaagcaattctcctacctcaacttctcgagtagctaggactacaggcgcctgccacctcacctggctaagttctgtagtttttatagagatggggtttcactgtgttggccaggctggtctcaaactcctgacctcaagtgatctggccacttcggcctcccaaagttctgggattacaggtatgagccactgtgtccggccctcagcatatattttttgagtgaataaaagaatgaataggaaagagacatcccatttgccccacataagcgaatgctttattgtacactgcttttgcatatttggtatcaattaagaatgtgagctttgaagtcacagactctggagctgaatctccaccccacgcctttgataa

SEQ ID NO: 685055 - DNA, 943 bp, Homo sapiens
tgagttcatgagagtgaggatctcatgatgagatctgtgtccttctaaaaagaggaagacagaccagagtgttccccactccgactttattttaggttgatgggatgagaaatacagatttgattgccacagtgaatgaactaaattactgggaaaaaccatttggaacagtcatctataagagagctttagaagtaataataataactaccatgtttatttttagcaagtcccatgtgccagtcattaagcacttagcatatagtaattcatttaactttccaaagttaaacttaccacaccgtcttataataaattgcctatgaatcttctttccatgatagcaggagataggctttattcaactttggatccccaaaacttatcacagcagttggcacagaataagtgctcagtgtctgtgtgtgtgtgtgtgtgtgtgtgtgtgtgtgtgtgtgtgtgtattttttttttttgttttatttttggagacagtctcactctgtaacccaggctggagtgcagtggcacgatctcagctcactgtaacctccacctcctgagttcaagcaattctcctacctcaacttctcgagtagctaggactacaggcgcctgccacctcacctggctaagttctgtagtttttatagagatgggktttcactgtgttggccaggctggtctcaaactcctgacctcaagtgatctggccacttcggcctcccaaagttctgggattacaggtatgagccactgtgtccggccctcagcatatattttttgagtgaataaaagaatgaataggaaagagacatcccatttgccccacataagcgaatgctttattgtacactgcttttgcatatttggtatcaattaagaatgtgagctttgaagtcacagactctggagctgaatctccaccccacgcctttgataa

SEQ ID NO: 685056 - DNA, 943 bp, Homo sapiens
tgagttcatgagagtgaggatctcatgatgagatctgtgtccttctaaaaagaggaagacagaccagagtgttccccactccgactttattttaggttgatgggatgagaaatacagatttgattgccacagtgaatgaactaaattactgggaaaaaccatttggaacagtcatctataagagagctttagaagtaataataataactaccatgtttatttttagcaagtcccatgtgccagtcattaagcacttagcatatagtaattcatttaactttccaaagttaaacttaccacaccgtcttataataaattgcctatgaatcttctttccatgatagcaggagataggctttattcaactttggatccccaaaacttatcacagcagttggcacagaataagtgctcagtgtctgtgtgtgtgtgtgtgtgtgtgtgtgtgtgtgtgtgtgtgtgtattttttttttttgttttatttttggagacagtctcactctgtaacccaggctggagtgcagtggcacgatctcagctcactgtaacctccacctcctgagttcaagcaattctcctacctcaacttctcgagtagctaggactacaggcgcctgccacctcacctggctaagttctgtagtttttatagagatggggtttcactgtgttggccaggcyggtctcaaactcctgacctcaagtgatctggccacttcggcctcccaaagttctgggattacaggtatgagccactgtgtccggccctcagcatatattttttgagtgaataaaagaatgaataggaaagagacatcccatttgccccacataagcgaatgctttattgtacactgcttttgcatatttggtatcaattaagaatgtgagctttgaagtcacagactctggagctgaatctccaccccacgcctttgataa

SEQ ID NO: 685057 - DNA, 1112 bp, Homo sapiens
caagacttttgtcagatgctaggaacctgctgcacgaggactgcgcactcctcttcctcctcttccttggtggtcaaagggaactcatccaagccacaggggtgcagggcttggctctgtcaaagaagcagtgtggtccttgaagctagcactaccagggctttcatttggttctccagcacaatggctgtatttgaggagggctggcaaacagaacaccagtttccaaaccctgcttcctcaggtggccaaagtgctccacccaaactcattatacggtggcaaacctcacagccccttgttggtggttcatactctcctgctaaygggagcctagctccgaaagcctccaggagaggaaagtattcagccaggatgggctgcgcagtatttccctccaatccttctcaagttctgctggctgagagcacaaggtcccagctgaccccactgcttcagcagtcctgcggtgtacctcatttccaggaatcctacccagccctggggcagagagtcttgtcacgtatttacccacagacgctccaacatgtagaacctctggaaagaatctccaggctgggattttggacccctacagtttctacatttcctttgtaactggtaatgatatacgtgtccgttttttttcagtggtgcaatcatagttcaccgcggcctcaaactctgggctcaagcgatcctcccacttcagcctcctgagtaactgggataataggcatgtgccatcatgccctgataagctttatttttaaaatttttttgtagagatagggtcttgctatgttgtccaggctggtctccaactcctgacctcaagcaatcctcctgccttggcctcccaaagtgctaggattgcaggcatgagccatcacacctggccaggtgtttctttaaagtttatcttctttcttactttcacattcttgctcatttaactttttagctgattttgtgctatggctgcaaaggccaattaaaagtaagagtcaaaccttttcacgtaaaaccatcataggagctaaaaaccacctcagggctgacaggtttttgacataattttctctccttcagggttggagtgactcaaagta

SEQ ID NO: 685058 - DNA, 1112 bp, Homo sapiens
caagacttttgtcagatgctaggaacctgctgcacgaggactgcgcactcctcttcctcctcttccttggtggtcaaagggaactcatccaagccacaggggtgcagggcttggctctgtcaaagaagcagtgtggtccttgaagctagcactaccagggctttcatttggttctccagcacaatggctgtatttgaggagggctggcaaacagaacaccagtttccaaaccctgcttcctcaggtggccaaagtgctccacccaaactcattatacggtggcaaacctcacagccccttgttggtggttcatactctcctgctaacgggagcctagctccgaaagcctccaggagaggaaagtattcagccaggatgggctgcgcagtatttccctccaatccttctcaagttctgctggctgagagcacaaggtcccagctgaccccactgcttcagcagtcctgcggtgtacctcatttccaggaatcctacccagccctggggcagagagtcttgtcacgtatttacccacagacgctccaacatgtagaacctctggaaagaatctccaggctgggattttggacccctacagtttctacrtttcctttgtaactggtaatgatatacgtgtccgttttttttcagtggtgcaatcatagttcaccgcggcctcaaactctgggctcaagcgatcctcccacttcagcctcctgagtaactgggataataggcatgtgccatcatgccctgataagctttatttttaaaatttttttgtagagatagggtcttgctatgttgtccaggctggtctccaactcctgacctcaagcaatcctcctgccttggcctcccaaagtgctaggattgcaggcatgagccatcacacctggccaggtgtttctttaaagtttatcttctttcttactttcacattcttgctcatttaactttttagctgattttgtgctatggctgcaaaggccaattaaaagtaagagtcaaaccttttcacgtaaaaccatcataggagctaaaaaccacctcagggctgacaggtttttgacataattttctctccttcagggttggagtgactcaaagta

SEQ ID NO: 685059 - DNA, 1007 bp, Homo sapiens
aaaaggaaagaggttagttcagtctgcagcatgatttataacttttcatgagaaattcccgtctctctcagcaactagccttttctgagttgactggaaaacacttaaatagtgatggaagtaggcattcgtttttctacttctttttagcatagccacttctgagccttactgctttttttttctttttccattacttcccagagrgactttctttctcttcccttcccttggtattagccagcagtttgcattctcctcatcatcagctacattagtggtccccaacatttttggcaacaggaaacagttttgtcgaagacagttcttccacagaccaggagcaagggatggtttcaggatgattcaagggcattacatttattgtgcactttatttctattattattacattgttgtatataatgaaataattatacaactcaccataatatagaatcagtgggagccctgagcttgttttcctgtaactagacagtcctatctcggggtgatgggagacagtgacagatcatcaagcattagattctataaggagtgcacaacctagatccctcacgtgtgcatttaaaataaggttcgcactcctgtgaggcagagctcaggtggtaatgcaagcagtggggagcagctgtaaatacagaacagatgaagctttgctcactcacccgccactgctcacctcctactgtgtggctcagggtaggctggggacccctggcttacatcatttgtagcatagaaaagggcaggctgccacaggcgtaaccatgttcctgatggaactaatccatggtctagacatgatagagctacttcatgtaacaacctttctgagtatttacttaagtgatcaaacctctatttcaggaataaactaatttcacgtaatttaaaactctggtgattttttaaaaactattacaaaaagtgatacataaatgacatgtaactttctagccctgttagaattgatgggacttaaa

SEQ ID NO: 685060 - DNA, 1007 bp, Homo sapiens
aaaaggaaagaggttagttcagtctgcagcatgatttataacttttcatgagaaattcccgtctctctcagcaactagccttttctgagttgactggaaaacacttaaatagtgatggaagtaggcattcgtttttctacttctttttagcatagccacttctgagccttactgctttttttttctttttccattacttcccagagagactttctttctcttcccttcccttggtattagccagcagtttgcattctcctcatcatcagctacrttagtggtccccaacatttttggcaacaggaaacagttttgtcgaagacagttcttccacagaccaggagcaagggatggtttcaggatgattcaagggcattacatttattgtgcactttatttctattattattacattgttgtatataatgaaataattatacaactcaccataatatagaatcagtgggagccctgagcttgttttcctgtaactagacagtcctatctcggggtgatgggagacagtgacagatcatcaagcattagattctataaggagtgcacaacctagatccctcacgtgtgcatttaaaataaggttcgcactcctgtgaggcagagctcaggtggtaatgcaagcagtggggagcagctgtaaatacagaacagatgaagctttgctcactcacccgccactgctcacctcctactgtgtggctcagggtaggctggggacccctggcttacatcatttgtagcatagaaaagggcaggctgccacaggcgtaaccatgttcctgatggaactaatccatggtctagacatgatagagctacttcatgtaacaacctttctgagtatttacttaagtgatcaaacctctatttcaggaataaactaatttcacgtaatttaaaactctggtgattttttaaaaactattacaaaaagtgatacataaatgacatgtaactttctagccctgttagaattgatgggacttaaa

SEQ ID NO: 685061 - DNA, 441 bp, Homo sapiens
ccaaagctgctttgttaaatyaaacctgacacagtttttgattcacccattcagcaaatatttattgaacattcactcttgccaaacactgttttaggagctgggagagagaaagcaagataagtttcctgttcccatggaacttttcttctagtgcaacagtcctcaaacttttggcacaaggggctggttttgtggaagacaatttttccatagactggggcgtggttggtttcaggatgaaactgtttcacctcagatcatcaggcattaggttctcataaggagcacacaacctcgattcctccatgtgcagttcacaacaggttttgtgctctgatatggtttggctgtgtcttcacccaaatcttaccttgcattttgataatccccacatgtcaagggtggggccaggtggagataattgaatcatgggggagg

SEQ ID NO: 685062 - DNA, 654 bp, Homo sapiens
aaggttcttattaagcagatgaagcctccaggtagcaggcttcagagacaatagattgtaaatgtttcttatcagacttaaaaaggtgctagactcttagttaattctctcctggatcagaagaaaagaactggaaagggaaagggagtctctacagaatgtagattttttccccatgagagaaagctttgcagggccatttcaaaatatgtcaaataaatatattttagggtaaaatgcttcgatttcattcagggcctgctatttgtcaagtgatgctatactaaagtcaggctgggacttgaagccttattgttacaaaaagtcttaagatgtctgttttgatgttaatgctggtcagttgtccctgaattccaaagggtggagggcataatgaggcatggccaacacccctgaccccagcttcccatcctggcctgaactaggttttyaggttaactttagaattcccttagctgagaggaggggtccaatcaaagggctggaaggcttagaattttatttttagtttacaaaagcaatcattttggccattatggtctgaattaaattgccactaggaaacactatatatattttaaagttgggatgatgccattgtggtgggataatctggaagaagcttaatttgtg

SEQ ID NO: 685063 - DNA, 815 bp, Homo sapiens
tatataattactggattccagaatcagaacacaaactgatactgtattaaatataatgtaattactttctggcttgagtgtttgccagagatgacctaggaaatgaatgacattttgatttacattgtaattttttgaaaatggtttatgagctgtgaacaactaacacatagacacttcacaataaaaattttgtgaagtgtstgtgtgtgtgtgtgtgtgcgcgcacatacatgtgcacctacctccctattcgtcataacttaagttgtgagttcttacagatcagaagccttctataccagtgtttattggtgtgtgtttttaggtctacctatattaatatcacttaaagtgatagttaagaatacaaatttcctgataggtcaatcaaagtctctgcagcagaagcagctctgtaggtgattatcaggcacactcatcatcgagaactgcttatttatttgaattttttttttttttttgagatgaagtctcgctgtgtcaccagggctggagtgctgtgacatgatctcggctcattgcaacctctgcctcccggcttcaagcgattctcctgcctcagcctcccaagtagctgggattataggcatgcaccatcacgcccggctgatttttatatttttagtagagagggggtttcaccatgttggccaggttattctcaaactcctgacctcaagtgatccacctgccttggcctcccaaagtgttgggattacagatgtgaagcactgtgcccagccaagaactgcttatttatattatgaagaggaaaaggaagtcctatataa

SEQ ID NO: 685064 - DNA, 2691 bp, Homo sapiens
aataaatgagtgaacaaatgaatgaataacaatttaatctctttagagaagataacttaaaactgtattccccaaggtattaaactgatatattgatgttttgaagctataaatgatcatatggatatatgtcaaatgtttcttatttatcatctcatattctagtgtttcattattgtttatggaaataagtagaactcttgaaagcttttgttaaggaatatttatatctacagctacaaatgcaaattatcttgcgttatccctttccaaacatgaaggttgcagtcataatcaaattattaataatttgctaatgtattcttatggtattttaatcatttccctaagtcagtaatattattcatacatttattcattaaataaacatttttatcaactacactatttgtaagaatcattttaatggatgccatgaaagacataacttgacaaaacattgtccctactacctcatagcttctatattcttaggatcttaaaatctactagaggaaatgagttgtcagcttgagtaaacataaaacaaggtggaacatcatgaggattagcaagattctgtaagggagtgtggcagaatgaagaaaacataaattttagagttcaagcaggcctgaattcaggtcccaattctgccacctgggcaagttacttctctcaatctccattttctcagctgtaaaaattatggactctatcctcctactccatgaagttgttatgagcacttatactaagcgcttaaaactttgtctaacatatactaagtttctattaaatgacagctgttattaatattattgttaacataagtttagctgttatcattaatattattattatattgtcattaatgtaatagtggaaatgattccttccagcattgttgccagggtaccaattgatctgaaccttgaagtatggataatgtttaaattgtgaagatgctgagaatatggcctggacattttggacatgggaaatattagactcagaaatatggaaaggtatcttatgtatgagcagacagagagtatttgacacatagtgataaatgagactagcaatagagattggggccagattacaaatcatgttggttgaaggagttagaaacctagggttggcaatagggatctgttgtagaatttcaagcagagtcatgacaacgtaaattagaaacattttgtcaataagaaagactagagatcaagaataagggacaactttttttagattagagtagaaatgatgagggcatgatctatggtgtatcagtttcctattgaggccgtaacccattatcattagcttagcaacttaaaayaatgcacatttaccatgccatcctaagactaggtgagctctactggcttctctgctctgtgtctcacaagaccaaaatcaaggtgtcatccacgctcggattttatcttaagactcaaggcaagactccatttccaaggtcattcagttgttggcggagctcagtgccttgtggttgtggacctcaggttcccattttcctggacatatgacctccttcatcttcaagctaacaaagacacattgaatctttcttgtgcatttaatctctctgactatccattctcccttatcccttctgccttccagtcagagaagtttccctgcttttaagggcttatgtaattagattgggcccactcaggtgatctaggaaaatctccctattttaaggttcattaccttaattacatttgaaaaggtccttttgctatgtaatgtggcatattcccagagtccagggtgcagtgcatggacatctttgggggaccattctgtctaccagaaatgatagtaatagatgaaaaggtaaggaaattcaagaaatactgtagacatatttttgaagttattatatgcatcctgtatgcttcctgggagtcaatgcaaatagaaataaatgttaactttcatagcttaccttctttgaccaaagaacacccacagttattaagatttaagctttttttctaatataaaatttagaagaatttatcagtcattaaaaaatgtaattagcaatagcatgaatttgttgtttaattttcacaacttgagatgtaaatattatcattaccattttacagaaatctaaaatcagaaaactaaaatgcagtttcatggttgacagataaagctctaaagctggtattctttatatgacccccattattgctaacagtgtatttttataattagcttttttcatattattagggggggagatctttcttttcaaaataaaaattcctcaggaaagtacttctaatttaatataagctttatttaactggacatattttaagatgtaaatagccaacaggcattgtccaggttagtaatcagtaaagtcctggtaactgtaaataaaccataaagaatttaattctgagccaagaaatacatacaagaaaaagaagtctttaatttcattaaaatttataagtgccttaaggtttttgagcatcagagtataaacagaaatgcaattttaaggccattttaaatgaaatccccatacactctgaattggtatatggagctgctgaatgctatttactcaattgagtcctgtccgtgttacctactagaaagacttccaaagacacagttgcagttatttga

SEQ ID NO: 685065 - DNA, 679 bp, Homo sapiens
cccttttgttctatttggacccttagtgaattggaggatgcctgcacacattgatgagggtcatctttatgcaacccactgattcaaataatattttcttctagaaacacactcacagacatatgcaggaatagtattttactggctatctgggcattccttagcccagtcaagttgacacatggaagcagctagcatggtgagagcacgttgggtgctggcatttactttccattgcagtacagtgtgacactcaagctgtctcctgtttactgatactgattggtcaggggggttcagtaatagccaaattgatccagtgattgaaaagtcatcatctgctattaatggtttaacaaaccctaatgacctatggatatatatatatatatatatatatatatatatatatatctttatatatatatctttatatatatatatctttatatatatatatctttatatatatttatatatattattatatatatctttatatatatctttatatatctttttatatatctatatatctttwtattttatatatttattaaataataaatatatattaataataatatataatatatataatatattattatatatattatatataataataatattatatatattaaatatataaatatacatatatatatttgccaga

SEQ ID NO: 685066 - DNA, 1067 bp, Homo sapiens
agttagaataagtgcatagtgcagcttttcaaataattgggcttacaaaaattttatttcataaacagactttgcaatcacacattttgcccatttgcttttattcatgtcacctgcttcrtttcctggctaacccccaacacagtgttggtgcccacttcagtaaattaacaggaattcaagcatcttcctgtagtcaagctcatgtaattaactctgcattatccatgtgtttttaattctagaatgtttccctttgcatctatgcatacctctaaatgccaccttatcctgtcagctgatatctgcttagggaatgagatctaatttgaatatttaccaaagtaatgtataattagcctagctactaatctataatgcaatgcatttgtggccaaatagaaataagcttttaattggtagcatctttgctccttgctgttagcctacattattgagaacttactgaacccttgtaaatgatagtatttggaggcaagttgctgtatttcctttaggctcagtgacttaaagtttctaaatctactgttagagttttttaagcccacactgatttattttaatacttggaacatgcttacttttataactagacaaatgggaagtttctgcattctagttatctagtcttccaattactaattgcttgattcatcattttcttccaatctgagatgtatctcttgtttatattatgtcaagattatgttggcaggtgtgttttctcccaattaagcaatgaaataatgtagtatataaatgaatggctgacgctgtgtggctgttgcagcagtgactgttggaataggagcaagaattccttgtctaatgattcagaaactgacaaacatatttagttttgcagtgccttccctgagcctttatagttctcaggtgctagtgttatccattgataatgattttgtgtgcagctgcctatgttttccttttaaagcagctctaatgtatcttttcaatcatagaatactctctcagtattttggtttgttttttttttaattttcaggtggctagaagagcagggc

SEQ ID NO: 685067 - DNA, 1067 bp, Homo sapiens
agttagaataagtgcatagtgcagcttttcaaataattgggcttacaaaaattttatttcataaacagactttgcaatcacacattttgcccatttgcttttattcatgtcacctgcttcatttcctggctaacccccaacacagtgttggtgcccacttcagtaaattaacaggaattcaagcatcttcctgtagtcaagctcatgtaattaactytgcattatccatgtgtttttaattctagaatgtttccctttgcatctatgcatacctctaaatgccaccttatcctgtcagctgatatctgcttagggaatgagatctaatttgaatatttaccaaagtaatgtataattagcctagctactaatctataatgcaatgcatttgtggccaaatagaaataagcttttaattggtagcatctttgctccttgctgttagcctacattattgagaacttactgaacccttgtaaatgatagtatttggaggcaagttgctgtatttcctttaggctcagtgacttaaagtttctaaatctactgttagagttttttaagcccacactgatttattttaatacttggaacatgcttacttttataactagacaaatgggaagtttctgcattctagttatctagtcttccaattactaattgcttgattcatcattttcttccaatctgagatgtatctcttgtttatattatgtcaagattatgttggcaggtgtgttttctcccaattaagcaatgaaataatgtagtatataaatgaatggctgacgctgtgtggctgttgcagcagtgactgttggaataggagcaagaattccttgtctaatgattcagaaactgacaaacatatttagttttgcagtgccttccctgagcctttatagttctcaggtgctagtgttatccattgataatgattttgtgtgcagctgcctatgttttccttttaaagcagctctaatgtatcttttcaatcatagaatactctctcagtattttggtttgttttttttttaattttcaggtggctagaagagcagggc

SEQ ID NO: 685068 - DNA, 1067 bp, Homo sapiens
agttagaataagtgcatagtgcagcttttcaaataattgggcttacaaaaattttatttcataaacagactttgcaatcacacattttgcccatttgcttttattcatgtcacctgcttcatttcctggctaacccccaacacagtgttggtgcccacttcagtaaattaacaggaattcaagcatcttcctgtagtcaagctcatgtaattaactctgcattatccatgtgtttttaattctagaatgtttccctttgcatctatgcatacctctaaatgccaccttatccygtcagctgatatctgcttagggaatgagatctaatttgaatatttaccaaagtaatgtataattagcctagctactaatctataatgcaatgcatttgtggccaaatagaaataagcttttaattggtagcatctttgctccttgctgttagcctacattattgagaacttactgaacccttgtaaatgatagtatttggaggcaagttgctgtatttcctttaggctcagtgacttaaagtttctaaatctactgttagagttttttaagcccacactgatttattttaatacttggaacatgcttacttttataactagacaaatgggaagtttctgcattctagttatctagtcttccaattactaattgcttgattcatcattttcttccaatctgagatgtatctcttgtttatattatgtcaagattatgttggcaggtgtgttttctcccaattaagcaatgaaataatgtagtatataaatgaatggctgacgctgtgtggctgttgcagcagtgactgttggaataggagcaagaattccttgtctaatgattcagaaactgacaaacatatttagttttgcagtgccttccctgagcctttatagttctcaggtgctagtgttatccattgataatgattttgtgtgcagctgcctatgttttccttttaaagcagctctaatgtatcttttcaatcatagaatactctctcagtattttggtttgttttttttttaattttcaggtggctagaagagcagggc

SEQ ID NO: 685069 - DNA, 673 bp, Homo sapiens
tgataggaaactgcatattcagaaagataccaattccatttaaaagaatcaatccaaacacatacccacatttatacatataaataatatcagaagaaaatgattattaagaagaaaggggctaatagtgaaatagcaaggggtttttatcttacacatactttgttatatttttcagattttcacagtgaatagatacttcctctagaaaagaaaaagtacattgtgtagctcccccaccaatgttttagggatgagaaaggaaggcatgagtaattgttctgaaactaactttaacaaggcctgacttgtcttcacccatctccccacagtgagtttggggaaagaagacggccatgcagagttgtaggccattcccctaactccattaacccatgtgctccagtggtcatggggccacgtgttatctcacataatccttgaactacgtggggccaggcaagttacaatagctttaagaagaggcttttcttccacattttatattttgatattgcatttttcaatcgctgcagagctctaaatcttctyccatgttatttttagtcattctcgcagggggaaaaaaagtcaatcagggcttctggcatgtcagctttttataaagggaatgcaaagcagagctcccagcaagtctcataaaacataggat

SEQ ID NO: 685070 - DNA, 623 bp, Homo sapiens
tcgccattctgctgscaacagttcctgttctctttttaacctaaaaacactcatcatgccattacctcgctgattaaatgtatctttatgagactaatagcttaaaagcctgtaagaaagatataatttgatagaactggctaggatttgtcaggcattgtaatgtactgaccctgaagtcccggatgcttccagggcgctaacggccggggacgcccaccaggtgggcggggcgagagtggggcgcgtcagggagggggtggggcctccacgtgggagatcttgcctggaggtggtggaaatgcgagtggagagggttcaaggcttcctgcagagaaaggtgtgcaaatcctggcggcgggagaggggctgttaacagacctcagtttttacttcattctttaatctctcctctactcgtataagtgatatacctgtgctttgtttgaactttacggcagccctataagggaggcattgtaagagacctctttttttgtctatttgctcagtgctctctgctgtcagtgggctgtgctcagccctctgccagcattaaatttcctccttaaaacaaccctgagtgtaataggctgaataacggcccccaataatatcagacc

SEQ ID NO: 685071 - DNA, 623 bp, Homo sapiens
tcgccattctgctggcaacagttcctgttctctttttaacctaaaaacactcatcatgccattacctcgctgattaaatgtatctttrtgagactaatagcttaaaagcctgtaagaaagatataatttgatagaactggctaggatttgtcaggcattgtaatgtactgaccctgaagtcccggatgcttccagggcgctaacggccggggacgcccaccaggtgggcggggcgagagtggggcgcgtcagggagggggtggggcctccacgtgggagatcttgcctggaggtggtggaaatgcgagtggagagggttcaaggcttcctgcagagaaaggtgtgcaaatcctggcggcgggagaggggctgttaacagacctcagtttttacttcattctttaatctctcctctactcgtataagtgatatacctgtgctttgtttgaactttacggcagccctataagggaggcattgtaagagacctctttttttgtctatttgctcagtgctctctgctgtcagtgggctgtgctcagccctctgccagcattaaatttcctccttaaaacaaccctgagtgtaataggctgaataacggcccccaataatatcagacc

SEQ ID NO: 685072 - DNA, 588 bp, Homo sapiens
tcgagaatatgtgatgagtgttggtaagtgatggcagatcactgtttccacagtgctttggggtagcaggagcacacagaacattccctcccaggcccatgtgtgtttayggtctcttagagtaaaacctgttttatcctcatctggcacttcctatggtgtctgggtgtttcctgccctcccccactggactgtaagtggcagaaacacaaactgtgtcttcttttctgttccatcccaagtatccagcatggtgcctggaacatagaaatgttcaatgaatattaacacaatgatcaaataaagtaatgaatgcagtttgtgtattcagatgtagaaaaagaaatcagggatcaagtaagtgacaaatcacacccttggagaggcaccatgcatgctgttacgaatactagaaatggaaaatgtctttcattgtgtcttgaagtaacagcagtgataaaactaagcatattcaacttgctgtcttcctagatgaaaaataacttggctcagaaataagagtccaggccgggcgcggtggctcacgcctgtaatcccagcactttaggagactgaggcgggcagatc

SEQ ID NO: 685073 - DNA, 1328 bp, Homo sapiens
ctctctgggtgtgaaagactgacagacataggcaccagacctcacgtagtaaggaaccatagggcttcagagggcctttgttgacagcagtctgttttgctcttacccaataggattctgcatctgtaagtccttttaaatcccacctccaacccattcctcttgtcccattttgggtgtatctatacctatcaggtgtcagccagagccaactgcgtttcaggttcatacttctttctgtttaccccttaaggctggacaggtaacagaatcagatcacaacagccttatataccatacagaggactttcgattttattttgtagataagccatggggaacttggagggattttgagcaaaggagggatctgatggatttggtgtgatagaaagataattcaggcagcagcttggaacgtggttacaggcaggtaggcctggagactgatgatggaagcggcctgttgagtgatgaagggagaggtgataagggctatgctaacagtggcaatggcactggagatacagaagaggagattaatatcaaaaatatttgatacagtctctaagacttaatgattgattcatcctcatgaagtcagtaactattttgtcattattatcaatacttagcccagtacctggccagtagcaggtgctcaataaatgcttttaaatgaatgaatgatcagtcaatgtggtggctaagaaaggagaatgtggctacatatggaagaagctgtgttttgaccagatagatgatggtcccattcaccttgataaataatgttggaagagggacaactttaagggagaatttaatgcattcggtttggagacgtgtagtttgaggtgtcttagagctgtcactgtagagctgtcaattgggcatttggagatatgggcctggaacctcaggaggaagatctcctgacagatggatttgggagaactcagcatacataaatggtagttgaatccatgggtgtagatgaggttagaggacaagagagataaggaaggacccctaagaaatagcagcattgaaggatggcctgaagacaaggagcctgagggaaaacggagragtggccagaggcaagctaggagagccaggggtgtggaaacccaagaggccctcttcctggtggaagagatgcacccaactctcactcaggttcacacagagcagaatggcatgtcttgacctcagtgaaggttcaaacccatctaggcaggctcaggctctctacctctaacccagcatcctctgcctcttaagagggcagttggtcattcagaatcctgtcataattcctcccataa

SEQ ID NO: 685074 - DNA, 1205 bp, Homo sapiens
ttatcagaatgtatccctgttgttaagctacacatgactataaatatttacaaaattatgagtgtacaccaaggcctccagttctactctagcttatccccagtttatagtatgtatgtgtttatgtgtctatatacatactatcatttcacatttctatgtcctttcttccatattgagaaacttggctcctagaaatatcaacaaagttattcatttgctcaatcctattgggttttttttttgttttgtttttgttttttttgagatgaggtgtcactctgttgcccaggctggagtgcagtggtgcaaacccrgctcactgcaacctccacctctcaggctcaagtggtcctcccacctcagcctcctgaatagctggaaccacaggcatgcaccaccatgcccagctaattttttgtatttttggtagagatgggtttttgccatgttgcccaggctggtcttgaactcctgggttcaggtgatccatccactttggcatcccaaagtgctgggattataggcatgagccactgtactcagccaatcctgttgtttcttgtagtgaaggcctgctttttttttttcaattagaaaaaaaaatttttttagaaatgggggtctcactatgtgacccaggctggtctcacactcctgggctcaagcagtcatcctgccttggcctcccaaagtgctgggattacagatgtgagccactgtgcctggcctaatattctgcttttaatggaatttttagctttttctatgattttggtcttaaaagtctttatttcatttttggttttgaaagatatcattctgggtatagaatccttggttgactgttttggttctttgggttttttctcctgagtactttggaggcatttgtctgttgtcttatggcttaacagtaaatttgctgtgattcttctttatgttcccctgtgtgtatggaactggttgttgtgttggatacacaactctattcatttggccaaaatcataaaattaagaaaaagagtgaattttactgtatgtaaattcttaaataaataaatacatatatgttaaaagcatattatgtactttgcattgtattagtctctaagaatacaatgatgaacaagataattttcagttttatgaagcttacaacctagtgtatgcacaaaaccaatgatacatggtaattgatggta

SEQ ID NO: 685075 - DNA, 2318 bp, Homo sapiens
cagtaattacagtccaagtaaattcaattctacctaaaaaaaaaatcttcacaactttacacaattctaagacaaattttttgaatgattgcccaacatgctagatttaaggaaaattttagtttctaggactactgtccgatagacttattcaagaaccaaaaaactgcctgtcaatttcaaaaggaccgtagaattcaactaattctatctctcaaatctgcaatcttcaacttcccttgggtatataataataataatagctaagagcttttaatgatcttgtgccagccactgttcgcagtgttttgtctgatttcactcatgtagtccyagtaatgagaccagggtagataccactattatcaaaattaacattattttatatgagaagaaagttaggcctagagaatttgtccaggatcatctacttagtaactgggaatagcatcagaataaccagctattcccagttacgaggtagatgaccttggaaaaattatagcaaaggagtagcctgtgtgcattcccaagcccacatatctaaactgtttatattaaactgtttcttttttttttccagatggaattttattcttgtcgcctgggctggagtgcaatggcgtgatctcagttcactgcaacctccacctccctggttcaagcgattctcctgcctcaacctcctgagtagctggcattacaggcacctgccaccatgcctggctaatttttctatttttagtagagatggggttttaccatgttggccaggctggtctggaactcctggcctcaggtgatctgcccgcctcagcctcccaaagtgctgggattataggtgtgagccaccgtgcctggccttatgttaaactgtttctgtgaggcaagattatgcagtatttcccttcattccacttctgatgaaaaaaagttcaagatatcacaagatatctagtatgatttttggcatgtataattgttacaaaaattattttccctcactttgaacttatagtttttgaataccactaatttgtataggtttaccctctgcaaaattgtaatgttctatctttattttttttttctcaacccagttgtcctttaagattttaaatcacctatcaacattcccttaagctttttattcaggccaaattttctcagtaacttcaatagtttccctgtggagaaagcaccaaaacctttagtaatataaatggtgtatagttaatcctgaaaatataatacctatttgtcttcatttatgttttgttgtgtccaatgcaacccgaaattataattctttaaagatttaaaaaaacatacgggtgtctatcaccatagatcaggttacgctgcagtgtaaccaccctctgccaaatctcagtcacttaatacattaaagtgtatcttttttgagttacctattcagcgtaagtgggaagagggctctgatcatcatagttactcagaagggaaaaggttcaggaggcaccatgtgaacacctgcttccatgattaatgggacaggtagaaataagtgcagcatagtcttgcactggtagttcaaacttcctccttggatatgacacatatatacacacatgcacacacacacattatttattcaaatgcattaaccaaagaacattacatggtcctggctaaccacaaagagggtctgagaagcagtcttttcataataactgaaaggaagaagagaaataaaataacaaatataaagaaagcaatattatctgacatcagaatatgtcagacaatatttcaatacaaatacctctttaatgatttccaaagtgtggaaagtgtcctgtttacaaacatttacatcctatcattatatttcttttaatctattgcccccagtgagctgaacacccccatttataccactgaatgttacatcagtattgatgacagccataccactgtatccctcttagttacctacctgagaaatctacaaactcagatgcctttcagattgctgttctccaatcttttccaagagaaatgatgagagatagttgaaatcaagataaaataaatctatacaagttttctgatttaaagactatattaaagttacaggaagaaaggaaatgagacaaggaatcatcacacactgccttaccacatatgccatattgcattgtgatcaacaccaagtgaagagaaaagcaaactttttctgggaatgacagttcctttcttccaaatctgaaatacattacaaaatccacttacaggaaaataggatttgccgaatgttactcagcccttccctacgc

SEQ ID NO: 685076 - DNA, 1519 bp, Homo sapiens
tcaaatttgctaggacacaactctttctgacaaagcagttgcttcaatctaagaagcttttattggtgtacacaagaggtgttcacatgtgctcaagaataggcgctcattttttctctgctctttcctgctgatccgaagacattccgttaactgttttaactctgagactctgccagtgtctgtaccctgcttcatcagaaaaatgctatttaaaccaggattgtgtctcctggttaatgggacatgtgaacgtttagtagagccaaacagtactcccttgccttcagacattattgaagcctagctgccccctgttctcagcagaaatgaaaggattctctctgaagaggtcagttagagtataaaaggctttgctgactgggtgccatataccacgatagcatttttatttttctatctttcccttttctctattaagtgactaaatataaacttaccatttgaatgtttccttcctcttgtgcaaaacatttatgtgaatgagaagtcacagttctctttgactggtgccaatcaaagagtaaaaagaacaaaacaacttcagtggcagcagcaatgtcaatggtagtaatataataagaaagaaaatcaccataataatagccagtagtcaatggctgaccatggacccagcactcttgttaagtactttgcatttattatctgcagtcttcacaacctatctttcaagttggtgttttttaccacaaggatcaaatcatccttctttgtaaccacattatttctgatgagctgattggagaacatagtttcactcagtagccaggctggcttttctggaaatccatatgaagtagaaagaaaggtatgtcacccactgcttggcataactacataaccagagccctctctgcagggaggcgcatctgaaaaaggagagacgcatactctattcctttcaaatttgcaaattagattaagtccccctcctttctaatagtgcagtgaaggaaggtatagagagaagctggaagagtccrttttgtagatttccctcctagaaatggactgcaaatttcttttccgttgtggaaacacaagtcaagtgaaatcagtgcctcttcactctaatccacaatagccactattatgaactccattttacagataaggaagcaaggactttgacatcaaacctccacagtcagatgcataaaaagtgaaggatagagactttgaatgtaggtcatactgactccagagtctatgcttttaaggctccctagagtgcctctttgcatatttgataaaaggtgcaggtgaatgagggattttggctgacatctagacttacaagaactacttaaaaaaaattatcactgggctaaaggtagcctaattaatacacatatagactagttggtgaggagtaaacatatgcaaggaaatggatgttatggaattcacttgcatatgctagcagcactaatactattgaaagcatgccctgttgctgttacaaatatgtgatcca

SEQ ID NO: 685077 - DNA, 3531 bp, Homo sapiens
ggcatcacttggcttcttttgaaatcagcagaatattgaaagacactcattggaattgcctatgtatttactcactttgatatttgaaaagggaactccaattgcctctaccaaaggaaaaatgacctactacatccatatataaacacttaaaaattgcagatttaaccccttctaaatgttttttaaaacataatcagagttattgtagacattcaaaaatatagcatattttagagaaattagcataaaacttaccatgaagtgggatttaatttttttctctacttttatttcgagtgaagtaactacacaaagtgaaaaattaatttaaattattgatactaaattttcatttgaatgtaaaattactatgtctacttttaatatctacaaaaagccttgtgattcataaataagaaaaaacgtttgaaagtacttgggtgtttttcaggagaatatttttatgtatacctattattgtaaattatacattagtgaaatttgaattaatttgatttacaatgttcgcagggtttgtgtatgtacgtatgtgttttgtagtgaagaaaaatatgtagaagaaaagtgcactcatttatctaacacatatattgttcacttatgtatgaggcaatgtgctaggtgttgtgtgggattcataaattagctttaagaagtttacagtccagatcacgtaaggaaaataacatgtatacatatctttgcatacctataagtaaatatagaatcatatttttaataacgaacattatttctattatagtccccatcacgaaaactatttttcagctatttctaggagtccatagatggtgctcatagatgtttagagtaaggtgatttagccacagtagccatgtgccattttttctttttcctctgaaacaatttgattatgcatgctcaaaaatcctggtaggtgactcatctgggctactagttgttatcaaaagctttaattttgtgcctcccacttgttgtctcttttcattctcataggccccatgggaatttttatcctgtgcctccaaacttataagtagcaaagtgattgataaccacagggtttatctgagtctgccaaacttgctgttggaccaactactgaaaatgtggtgtcaaagagacgttgtagctgaaactgctagctgtgtgaagaccctttgtgagctgggaaagctggtggtcttcaggctctatagctatggtatgcaacctcaaatatggaaaattgtttctacttttatggtgtgtataccaataatattcagaattttagtgaagcagtcatttattgttgcttgccaatagtagctccctatctccctgggatttagacataaataaatcctcaggaataggaaaggaaaactgtatcaaaatcacctggaccctctgataatgagagcattgctattgaaccagttttgtttttctatatgtatttatctttggttaatttctttccaagtgcttattgtcttcttgcagatatgttacttgtgcacacctaacctgtgcacacctaacctgtgcacttgtgcacacctaacctgtcctgccaacctgatggaacttgtctacattttaaagtgagaccactttgtacatacctgggccccctatgagagttcgcagacaaggaggtatacggcttaagaaaaaaaaaatttgtctaagaagatttcataacaatgtaatatttgagctgatatttaagagaattgaggagagaacacgaccagatatgcagaaattaaaaaaaaaattaaagttgtaaatgggtgccaacaaagccagttgtgtagcaaattttaagcagaaaaggtttaaattaaaggcctacaaaatgtgtggagggctaaaggaggggatcccatcctggccctccagggaaaatttccagagcatgagataattgattcaccaaaatttcctcatgcttccgtatggttgctatgggcactactaagtttaagactcgaagggagctgatttcctaggattagaaagctgtacctgccagtactcaggaacctgaagaggggacagtggaatgatttgcaggaacatctcacatccgacaactttgcctcctagcagaggaagttgacctcaggctcacttgtcccattataaatattgtgagatacatctaactgttggtattgtgtttgtattcagaatcgtgcctgaaagatagatatggaaaaattataccatgaaataaatatatttacatacagttaaataataatatataacagttatatataatttaataatatattattaataatataatatataatatataatttatataatatatagtaatatttacaccatgaaaattgacaaataatacacatcagaccccccaccaccactaagagccagccgatttttaaacatttattagtacatccctggtacattgactcaatccatattatcttccatattttgcacagtatatataatatgtaaataaaatatacaatacaattagaatattataagattagaattttgatgaattatttggtgttgacaaatatgaagctattccttttgtaaatttttgtaaataatcttatgaatgaaggcactggacttaagccactctgctgtgatatattaaggaacyaatatatatacatgtttattataaatatacatgtttatatataaatatacatgtttataaatatatgtaaacatgtaaatatatgttcctattaaaaaataccacatttattaacaacctatgtctctgtcttgacccagttttacagtttgaagctggcacgaaataaatattgtatacatggaatatgatgcagcaactaattttttctaccatccaaacatcactgatagtatcttaagttgaaatttaaaacatcattaatggtgaggcagtttatttgcatgaaaataaacatcagtttacattacaatgaaaattctaatattagctttaaaagaacttgtatgtaagctaggagaaaggatttcaattagcctttgactttataattagttaataataattaaatgcattttcatttgagccaaaataatcttttttttttctcttaaatttcaaaatgttcttgagtgcctcatggaaataaactgaagaaaagttaaaacggcttggttgttttcatataaccaaggttaggccttgtatggaaaggacattctatcctcttataaactgcaattaagggcactgaggagataaaacttttaagaatggaattaactgtgtcatgtagaaataatgacagaaagcatctgtcatcacgtgagctcttgatatttattgagcacttagaaagagtctgacactgtacttgaccctagagatgaaaaagtcacataattttgagcagtttacagttgtccttttgtattttttgggtcctaaaattgattgacacaaccaatgaaattggagcttctctcaggtaagggcaacttctgtgaattttgagg

SEQ ID NO: 685078 - DNA, 3531 bp, Homo sapiens
ggcatcacttggcttcttttgaaatcagcagaatattgaaagacactcattggaattgcctatgtatttactcactttgatatttgaaaagggaactccaattgcctctaccaaaggaaaaatgacctactacatccatatataaacacttaaaaattgcagatttaaccccttctaaatgttttttaaaacataatcagagttattgtagacattcaaaaatatagcatattttagagaaattagcataaaacttaccatgaagtgggatttaatttttttctctacttttatttcgagtgaagtaactacacaaagtgaaaaattaatttaaattattgatactaaattttcatttgaatgtaaaattactatgtctacttttaatatctacaaaaagccttgtgattcataaataagaaaaaacgtttgaaagtacttgggtgtttttcaggagaatatttttatgtatacctattattgtaaattatacattagtgaaatttgaattaatttgatttacaatgttcgcagggtttgtgtatgtacgtatgtgttttgtagtgaagaaaaatatgtagaagaaaagtgcactcatttatctaacacatatattgttcacttatgtatgaggcaatgtgctaggtgttgtgtgggattcataaattagctttaagaagtttacagtccagatcacgtaaggaaaataacatgtatacatatctttgcatacctataagtaaatatagaatcatatttttaataacgaacattatttctattatagtccccatcacgaaaactatttttcagctatttctaggagtccatagatggtgctcatagatgtttagagtaaggtgatttagccacagtagccatgtgccattttttctttttcctctgaaacaatttgattatgcatgctcaaaaatcctggtaggtgactcatctgggctactagttgttatcaaaagctttaattttgtgcctcccacttgttgtctcttttcattctcataggccccatgggaatttttatcctgtgcctccaaacttataagtagcaaagtgattgataaccacagggtttatctgagtctgccaaacttgctgttggaccaactactgaaaatgtggtgtcaaagagacgttgtagctgaaactgctagctgtgtgaagaccctttgtgagctgggaaagctggtggtcttcaggctctatagctatggtatgcaacctcaaatatggaaaattgtttctacttttatggtgtgtataccaataatattcagaattttagtgaagcagtcatttattgttgcttgccaatagtagctccctatctccctgggatttagacataaataaatcctcaggaataggaaaggaaaactgtatcaaaatcacctggaccctctgataatgagagcattgctattgaaccagttttgtttttctatatgtatttatctttggttaatttctttccaagtgcttattgtcttcttgcagatatgttacttgtgcacacctaacctgtgcacacctaacctgtgcacttgtgcacacctaacctgtcctgccaacctgatggaacttgtctacattttaaagtgagaccactttgtacatacctgggccccctatgagagttcgcagacaaggaggtatacggcttaagaaaaaaaaaatttgtctaagaagatttcataacaatgtaatatttgagctgatatttaagagaattgaggagagaacacgaccagatatgcagaaattaaaaaaaaaattaaagttgtaaatgggtgccaacaaagccagttgtgtagcaaattttaagcagaaaaggtttaaattaaaggcctacaaaatgtgtggagggctaaaggaggggatcccatcctggccctccagggaaaatttccagagcatgagataattgattcaccaaaatttcctcatgcttccgtatggttgctatgggcactactaagtttaagactcgaagggagctgatttcctaggattagaaagctgtacctgccagtactcaggaacctgaagaggggacagtggaatgatttgcaggaacatctcacatccgacaactttgcctcctagcagaggaagttgacctcaggctcacttgtcccattataaatattgtgagatacatctaactgttggtattgtgtttgtattcagaatcgtgcctgaaagatagatatggaaaaattataccatgaaataaatatatttacatacagttaaataataatatataacagttatatataatttaataatatattattaataatataatatataatatataatttatataatatatagtaatatttacaccatgaaaattgacaaataatacacatcagaccccccaccaccactaagagccagccgatttttaaacatttattagtacatccctggtacattgactcaatccatattatcttccatattttgcacagtatatataatatgtaaataaaatatacaatacaattagaatattataagattagaattttgatgaattatttggtgttgacaaatatgaagctattccttttgtaaatttttgtaaataatcttatgaatgaaggcactggacttaagccactctgctgtgatatattaaggaaccaatatatatacatgtttattataaatatacatgtttatatataaatatacatgtttataaatatatgtaaacatgtaaatatatgttcctattwaaaaataccacatttattaacaacctatgtctctgtcttgacccagttttacagtttgaagctggcacgaaataaatattgtatacatggaatatgatgcagcaactaattttttctaccatccaaacatcactgatagtatcttaagttgaaatttaaaacatcattaatggtgaggcagtttatttgcatgaaaataaacatcagtttacattacaatgaaaattctaatattagctttaaaagaacttgtatgtaagctaggagaaaggatttcaattagcctttgactttataattagttaataataattaaatgcattttcatttgagccaaaataatcttttttttttctcttaaatttcaaaatgttcttgagtgcctcatggaaataaactgaagaaaagttaaaacggcttggttgttttcatataaccaaggttaggccttgtatggaaaggacattctatcctcttataaactgcaattaagggcactgaggagataaaacttttaagaatggaattaactgtgtcatgtagaaataatgacagaaagcatctgtcatcacgtgagctcttgatatttattgagcacttagaaagagtctgacactgtacttgaccctagagatgaaaaagtcacataattttgagcagtttacagttgtccttttgtattttttgggtcctaaaattgattgacacaaccaatgaaattggagcttctctcaggtaagggcaacttctgtgaattttgagg

SEQ ID NO: 685079 - DNA, 825 bp, Homo sapiens
aattaggtcaaaacgtctccaaaatggtgcagaaccaagcgagggacaggcttacgcctagcctgggaggtcctgaaggggtacacgggcagcggtggaaggagatgacgtgtctggagaaataagctgtttgctgaggttggagggggctatatggagagaagaagagttgggtgggagttggggcagttggggcagtcaggcgggcaccagattgtgaaggagctgtgaagttcatgctaggaaattgaaccatatggtccttttggtatcaagaaatccaaagttgctattggccctcaactaaaatggaggaagggactagaaggtgtggatcccagtgcccctgcccccatggttttgaacacagactccatgcctagcccacctccttcagtgtcactttcagcctgtggctctgaaggttccagcctagctgtggcttcccgcaggtggagcgcccttgagtcctggctgcttgagagtacgcattcctgctgggcgatgytcccagcaaccggccaggtcactgggtgcagaccttcgcaccacggtaaggagggccagatggacgttgagccagacagaagcccctgtgggcaatgggagcctttgatgggggcgtgactgtgtcccggctgaaccccagaacagggccaaggtaatattatgcttgagggctgccacctctgccaccacccccaccgcctcccaggcttctcctgaaaagcctccattcctcaagatcaagggaaaatgctgccttcggggggaatctctgccctccctgagtcccagcttggaattaattcatcgcctctctgc

SEQ ID NO: 685080 - DNA, 1558 bp, Homo sapiens
tgaaacacaatagtttctacaagggtcccaggaaggagatgcttctgttttctttgtagaataatcttacgtgtcttagcctgtgtaacaggcaagaaagttctctgatctatccaaagtgtcgcttatggaaaaagaaattactctgtctcagaagagacctgttactactagctaacaccgaccgagtactgcctgtgtgccaggcactgtgctgggtattttacacacatttaactgtttaagcctcactacgaccctgggtgctggatactgttattatacctgtttcacagatggagaaactgacaaacagaaattgccccaaatcacacagctagtaagtgaagatgggatacaagtacgatgtagaagatgttgacagagggacaccatgagatgcttatctcaaattcagtcacccagcgtgtgagaccagaggtggggattctctgctctgcttcatctagggaagctgcggctggagaagtgggcccaccctctcctcacaccttcgtccccctcctcctggctccccatatcagatttgaacagaaattgggccactccatctttgacattagcctcctcctcaaatgtcccagcaggctggggagagcctcagagatgggagccggcttgggcctacaaatctcgccttcctgcccaaaccggggttcagcccactaggccattttcattcagcgggtcaaaaagggcattgccaaggcttctcttcccccgatctcctgcttctaggtgtcctgtttctcagtggacagtgttgatccaaccaactacagaagtctgtcctccatttcccagggacaggggttctggtcccttccaggggcaatgagagtgacctctaggtcttagtgtgaaggatcctggaggtcacacagaacacagcaatgacatgtgtgggctcttgagtcaagtcaatgtttgtatgtactgggacctcactttcctcacctgtaaaatggggagttggggggatttaatgtgtacaatgcagtggctaaaataggttaaataatggctactacagtggctagacccaaaattaaaatttgcctttcctgtttggatcatctggaaaattcacttttttttttttttcttgagacagagtctcactttgtcatccaggcaggagtgcagcagtggcacgatctcagctcactacaacctccacttcctaggttcacgtgattctcctgcctcagcctcctatggagctgtgattacaggtgcccaccaccacacctggctaagttctatattttgagtagagatggggatttcaccatgttggccgggctggtctcaaactcctgacctcaagtgattcacccacctcggcctcccaaagtgctgggattacaggcataagccactgcacctagtctcacatttctactcaaagcagtcgtaaggttcagtgaatcaatgtgagggytttgtctctcagcttgatctacaagtttttgacaaaccagaggtgagcggaaaggagaaagaagctgaggtgagcaggcaggtgtgggtaggg

SEQ ID NO: 685081 - DNA, 621 bp, Homo sapiens
tcactcctccagactgccaaacctcccatggaaagagaatggtgagacacaaacttatatgcagtttgttcatttgagaggcaatcccaggaagcatcagtgagtggggaaagtgaggcattgaaataaggaaaagggtgcaccaatgaacatttcaccactgtgggaaactgggactcaattatatgggaacactctgagaaactgcatggaacacacatcacgattataccaccagaaaacagaaagctggggaaattttctataaataccagcacctagtagttgagggcrtcttctcatgtgggtatgttaatttccttagtttccaccttgagtctatagtggtaggtggaataaagttgcaaagtgctgaaaaatgtgcaggcaaggggtttccaatgaagctaacagcctactgattactttggatcataagtgcaggtgaattcaggtgggatgagctgatacagatcatgacattaacagtatctgctatactgccccaagatacttcggataatgtcacatatttataactattgatattatattttccatgctagactggaaaatctgagagaaaattacatatgataatccttggcctatggtgttcaa

SEQ ID NO: 685082 - DNA, 657 bp, Homo sapiens
caattatttaaagtatcttggaaagaaaggaaatagagaagaaagaacagaaagaaggaaccagccttcttctcagtagaagcaaccattggcccctcttgtttatttagtttcattataagaaggacatctttcctgttatcccagaactttgggaggccagggtgggtggatcacgaggtcaggagttcaataccagcccgaccaagatggtgaaaccctgtctcctctaaaaatacaaaaaattagccggatgtgttggcaagcgcctgtaatcccagctactcgggagactgaggcaggagaatcacttgaatccaggcagcagaggttgcagtgagccagaattgcaccactacaccgcagcctgggtgacagagtgagactctgtctggaaaaataaataagaaataaataaatcaatctktaaaagagagcataataatagaggtttaataaaaaagttatttgacgcttctttgggatagaagtaatgattataaaattacaatatgtagcttaggggttctgctaactaacaatgtgtttggggaaaaagtgttactatgacttagaaaactaggtcaatatcatctattgattttaggccttatgaaaagttaaaaacattcttgtgaaagcaatgacctaaaccaa

SEQ ID NO: 685083 - DNA, 673 bp, Homo sapiens
ggacccccatgcccgtcccaggctgtcatcccctctcccgttcctgctggagcccacacgcgggtctctcaccgcctgcagtgcccccgagccacagccccgccagatccaccaccttcccctgaacctcttgctttcccgctgttcttggtggcttaaatgctgatccagctgctcaaactggaaccctgggacctactgagtggcctccccttctctctagtgaagtcgtgatgctctgcctccttgggattttgcagttctccattgcccctccacgctgagtggcttccttacctggggttactcgcggctctgctgttcctgattgctcatggtcaggccttctgccaaagcttcagatgctggaactttaaggaaaccaagaagcctggtctaaatgacagggatctgtaagctcttcagacggttagaagccccctgaaggcagacatgaggtggtacccctctgtttgttcatcttttaattcccyacccaagcagtgtatgctacatgtggcaggaagccaaaatcagttgttgtgaggttgcatgttaatgttctaccagatcacactggtagtgggttgggccataggcagacaagcatcctttaccacacacagaggggctgtccacacaagggagaaatcagaactgcctcattcccctc

SEQ ID NO: 685084 - DNA, 597 bp, Homo sapiens
tgagaggtcactagcttgtgtaaggcaaaatcttttcactgttcggcataattagaatattccaacagtggtttcagtaatttaaaaatcacagtattgttgtaatatttttctaggcttcaggagctcacaattgtttggcccaatcaaatctgggaacactagagaagttatcacccatcaaggtaattactttcaagttgaaataattactctatcaatgttaatggtctttcaacttcaataaagcactcacctgccgatratcacagctaacctcttgctctaatgcaattccctctctatttagtaggttatattacagctgttacagtggtcacttgtcctgaacagctgctgaatttcacttttatcggctgtgaaccataaaaaaattggtcatctgtgtatgatttccccctcacccataagcccttgcagagctaaggatatgatctcttggctgtaatagggtacttcggggcagccatcttgtctcaggtagtggctactttccatctgtgacaagagcagagtagttcaattaacttctgcccttcactgccatttacagcttgctgtctctgctaaatggca

SEQ ID NO: 685085 - DNA, 656 bp, Homo sapiens
acaactgtaatagtagcgaccactgacctgacctttcccrtgggccaggccctataatgatacatctgcatctattacctattttgttcttcagatatatgctaccaatcatgattagcaaaagaaaagctggggaactggacacactaagtaactgtcctgggaatacacagctgtgatacgtgtgaaccaatgaagaacaggaatcatttctttttgtgttcttagttggacagatgaacctgattcaaaattccaggattctattctgatactgacagtggctagcttgtttcagccatagggaccataaaaagtattctttcaccaattttttagcatgtactatatgctttttgatgctctgctagacacacaaatgattcaacataaactctccccttaagaagaataaggacagtggaagggtaacaggatgcattagagcatttcaggagatggtgtttctctactccagctaggactggcccagaagagactatcagaaagggtttgaagtatgagtgataacgaatgtgcagaaatgatgaggagaggtgttccaggtggagagaaacatatgagcagaggctcgtagataggaatgagtcaggtgtgtgctgataagagttcagggctcttgcaacagacccaag

SEQ ID NO: 685086 - DNA, 603 bp, Homo sapiens
gatggacttgcacttcaattattattattattatttttgagacagagtctcgctgtgttgcccaggctggagtacagtggcacaatctcagcttactgaaacctctgcctcctggattcaagtgattctcctgcctcagtctcctgaatagctgggattacaggcgcccgccaccacacctggctaatttttgtattttcagtagagatggggtttcaccatattggccaggctgatctcaaactcctgacctaaggtgatccgtctgcctcagcctcccaaagtgctgggattacaggcatgagccaccacacctggcctttttwaaaaaaaaaaataaaataaatttaaattttattttattttaaatttaaatttaaaaaatttaaaaaaatttttaaattttaaatttgtaaacttctccacccagctttcatttaaaacaaacaggatgctttatgaatgacttcaagcaaacatcattaagaatgtattgtgcaaaaagaatggctgggctgaacactgtttgggataagagaaatgaaagcttataatccaatggaggtgataagattgaaaaataactgtaacataagacagctt

SEQ ID NO: 685087 - DNA, 1366 bp, Homo sapiens
tgagctcaggaaatggtttcaccactgtggagtgtccacaagtgacactaacagtttttgtaagtaagggcgaaaagactcttcgggaaaacatggaggatataaagtggagccccatgctcgggacaagctctccacaaaccatcgtatcattggctagaactggaagcccccttgagtctgaatcttgagcaaatgtccctggtaggacctctgtcacagacccaggctaaggggattcacagaaaggagagaaacttaatcttcggttttcaatttctctctcttttctgggggctggtgggaaggtacagactctcctgctgccttggtgtgtgggcagggttgtgacttgtggagacagggctggggtgggggttgctggaactgcatgtggagggaccctctggagcagacagaggctgacagcacccttctggggccgatctgcagtgaggtgtggctagaggtaagtttggagaggtgggtggaggcacggaggcagccttgagggaagcctgttcacctgggaagcctagagtcgaggggacagatggaggacagagactcgtgatctaaaagccatcagctgcggggcaccaggtgaagttgcctacgcgtcaactcctcaggaaggctgactgcattactgagtcaaactgcctgatgcaaatcaattcctacttaggaggctgggagaaggagaatattttgattccaaggtaggagatgggggcaaaagtggagaattctgctgtctgtcttcaaagatgatgatactaatgagagacagaatctgaatacgaggtgccaagagtccttcctaacccacagcagtgatgctgtctttgaggttctcaacagattgggtgggatcctgcccattagtagccccaggccaagctgcagagcttcccaaaatgccgagggccaaatgggcagaatgctaaaygaaagcacagcagcatgctgtgggtgagtaacctgaattccctttcttggacaaaggtctccccgccttcgtgagaatgggaaggcaaagactacgatgagctgaagcctggaaaggctgggtgaagaaatgtttccctccagcgttccaggaaatatcctgggagggctcacaccaaaagatgaacaagcaaccagcggctgactctaatggaacaacggcttcccgctgctggccagtgaggatggaggtggtgacactgccacggcagctgaggcgactcagcccagcagccacgtgagcctggctaggggaagtgagtaatgagggggctgggggaggtgcaggctgaaggaaactttggggtttctcaagtcgttcctgtctcttcagctgtcaccctctgctcccact

SEQ ID NO: 685088 - DNA, 1079 bp, Homo sapiens
tgaagggagcagtttcacagtttacaactttatgaactagcaataacaccatgggcaggatagagggaaagtacattcagaggtggcaaagcagtgatgctgaccaatcagacaaagagaccgcagagaggaaggacttcacctctgcagactgctgctccttgagcccaggtctctcgtggacactgctcaggggctggctcaggcagggccacagacgagcatgcacagtgtttcccaggcaggcctgtggcacgatggggccagaaagagccagggcaagggagctgggagtcatgctcattcccacttgccccatatgttaactggggcggggggtttggtagtggcccaggagtcgccctgccccattgttcctagtctgacagctgaagctgcaccaggcacaccaccatgacatctgctgtcttcctctcctcagcctagacaggctggaaggcagaagagcagtaggcagctggcatttcatgctccccatggcaactgtcgcactgatcaattacttgaaatttcaataaataccatgaaaacgaagtgtaaacttttaagactaccatgtacctctcccatttaggctatgaatggtatcatggagggaaaattcaagaygtctggattttagaggtggctctgacactaataaacttggacaaaccatgtccctctttgacacttagttacttcatctataaaccattacggctgatgaggtctgctctgactggtggagactggagctgaagactgactgtgatgttgaggtggtgcaggcagggctgagaggcccagtgagggccaggcacaactgctggctagactctgttagcaccttgctctgacttctccaagcagtcccagagaagggcctcaaaggagtccatcttctgccttggaacaaggttcaaagccaaaggacaactggaaaatacaagacctttcccttctctatcatgatttttttcaaatcaatgccccagaaggcaagtaaaacatctgtagatgaagcatttggagatctctagtcattttcaaaacaaggaattaagagcaagcactca

SEQ ID NO: 685089 - DNA, 600 bp, Homo sapiens
aaccagatttatcattcataaccatttttaagaaatatggaaaaaattgtgataagaaaacagttggctttctcaaagtaataattatattttttcctcccagaattatttaatcattatgaaagttatttttcttctctttcccttttttttcttttcctttttttttttttttgagacagagtttcactttgttgcacaggctggagtgcagtggcacggtctcagctcactgcaacctccgcctcccaggttcaagcaattctcatgcctcagcctcctgtataactgggattacaggcgctcgtcaccacacccggctgatttttttttttttttttttttgtatttttggtagagacggggtttcaccatgttgcccaggctgatcttgaactcctgagctcaggtaatccacccatctcggcctcccaagtgctaggattagaggtatgagccaccttgcctagccaaaagttatttttgcatctttaattgtgaattctttattctttatcaaaatggaatgtaagctttattattaccccatactacacagatacacttgctyattgaccctatttcaaaaaagtcagaaaa

SEQ ID NO: 685090 - DNA, 991 bp, Homo sapiens
gcctagtatgaaaaaatgaactgttaaatgatagaatatatttatgatttcatatagggaaaaatatttctaaaccagattccctccaaaaagtgtgagtaatgctgaatgtttacatcgtactacataagcaatgaacctgcaccaattgactcttctgaaatttaaatgactaattccgaaaggatcaaattaagttttactgaaatcatattttggaagctttctaaaccattctggccatgaagattgggagactaataaacaaattccaaacttcatctgaagttaatttatactttgtggagctcagattcctggcttcagttacacctaagcagcgtgggcaaataagcttgatagttctgctgtttcaactttcttctctttctatttttgcaatatgaaacttgcagttgattacaaatgactgtgaagtgtggtgtacatatgaggcttaagaaaatggcacagaaaaaaaaaagtcagaatttgaratcgatatgattaaaaaacaccaccacaatatcagtggcccttatgagaaccattcagtgtgattttagtgccacctagtgttctatggtgggataaggtcttggaagtgaaaactaatccgtcatgggcaagactcagaaattaggcagctggcataaggctgtgcacggactcaaagcaggcacagtcaagagactgctgctgtgtttcttgtttgccatccggaaaaacagtcgtgcaagagaagccgttcttagatctaaggaattagccaaatatgtacagggccagtcaacagaagtactcattcaagtatcagttttaaacaaaggaaggtttgcaatggaaaccctgatttggtgaaaataagaacgtgatggtgatataagggggcatggcaataacacttgggaataagagaggtcacacacatctaagggtaatttacatatgcatgaatgaggtcatattatgctcttcttagtgctcaagt

SEQ ID NO: 685091 - DNA, 677 bp, Homo sapiens
agatcttctgaaaccacgtacaaaactttctaggtttgggcatttgtttcttcttctgtagatacagtgcatagtgtatcatttgaaaataaagaaaaaaaggtgaaaactaattgagcaaggtccatgaggaagcaggtaagaaaaggaatcaggaagaaagggagaagtaagtcttccttctcagagttacaaaagcctcagttttggtcatcgaagtgaagaaaggtggataggcagagaaacggtcttgaataatcagatcatggaggcctgaaaaattgtttacagaccttcacatttcttcttgatttctctgaagctttctccaaatattttttgctatatatgatygctacatagaaaactgtatttctaaaaccatataatacattgtatagaatatatctataaacaatgattataaactaatttatcaataaatactaagtaagcacttaagctgattgtgatcagtgctatgttttaatattctggtcttgtaccaagaccagaaccctccaaaaagagatctagatgcggtataactttaatgttttgaaaacatttagtatgtttgagaatcttcctttcctttgttgctcatgttacctctctccagcctgtccaaagtcctcattgtactttacaataagcagtcaagttcctaggcagcc

SEQ ID NO: 685092 - DNA, 677 bp, Homo sapiens
agatcttctgaaaccacgtacaaaactttctaggtttgggcatttgtttcttcttctgtagatacagtgcatagtgtatcatttgaaaataaagaaaaaaaggtgaaaactaattgagcaaggtccatgaggaagcaggtaagaaaaggaatcaggaagaaagggagaagtaagtcttccttctcagagttacaaaagcctcagttttggtcatcgaagtgaagaaaggtggataggcagagaaacggtcttgaataatcagatcatggaggcctgaaaaattgtttacagaccttcacatttcttcttgatttctctgaagctttctccaaatattttttgctatatatgatcgctacatagaaaactgtatytctaaaaccatataatacattgtatagaatatatctataaacaatgattataaactaatttatcaataaatactaagtaagcacttaagctgattgtgatcagtgctatgttttaatattctggtcttgtaccaagaccagaaccctccaaaaagagatctagatgcggtataactttaatgttttgaaaacatttagtatgtttgagaatcttcctttcctttgttgctcatgttacctctctccagcctgtccaaagtcctcattgtactttacaataagcagtcaagttcctaggcagcc

SEQ ID NO: 685093 - DNA, 1349 bp, Homo sapiens
tggtaktttgcccctaagtctttgtcaccctgggagccttcaactccagactgggggtccccagcccactttgaggtacccaagtctttaggtcaccatggcctccatatacctataatgtgaacggcatatttttgaaggcaaaagcaagtgaataggggctccccttggtattcttcccttctcatgcctgccctggctattttcttacgcctccaaacagcgacttaatgtattttattaatcctttatcatttttctcaccggtagaattaatctcttaatctttagtttcgttatcataattgaaagtgagagtgcgtttttgaaatgtgtgtggcaaacattatagtgcttatttgaaacacagaagaaataaataatgaagagaaagtaaccatttcctatgatcacaaagcaagacttttgtggaccaggaattcgaattccagtttcaaaacttctgatctcagcactttacatcctacaggtttgaaataaagctgaacttccatggttcaatttgtatcagattatatgttagaggaaaattaaagatccaacaatcttagcttgtagcagaatacaattttgagtgtaaccttatgaatgcctacttaaaggaaaaattctccttgaattagcaaatactgataaaatccacaattagggaaaagacatgtatagaagagtgtggaaataaaaattacttctaacatccctttcaatgaattctagcacatttttcttgtccacaagtgataggacagaaatattgacataaattaatgcatccataatatccaaaccagtggctgagaagtggagcttttaagtgaaaagggcattcattttatgacatgttgtaatgctctatgtgacttgcatttactatctcataagtattttgcaatgacactgtgaggtagttccagtgttctagggaaaaaaaggaaatggatgcacagatatggtttcaggaatttaacagggataatgaagaattcatgacaaatgccagaaatgaatctcaaaatttttgtgtcagtctcagcctcagaccctttttgctgtatttagaaaagctgaatgtattagaaatacagccgaagagttctgccttgccccgtgcctctgaatttgccctcaggcatttgaaaatacaaaatgaactgcataaggaaaggtttctgaagtttaagataaaaatgctgtgggaaatacctactatttaaagcataagtggaatgtgcttcttgtatgatttccatggcactcatagaaactcattccctctgcatagctgctttctctcatcaggaatttgggaagttcccaatgggaatttc

SEQ ID NO: 685094 - DNA, 1349 bp, Homo sapiens
tggtattttgcccctaagtctttgtcaccctgggagccttcaactccagactgggggtccccagcccactttgaggtacccaagtctttaggtcaccatggcctccatatacctataatgtgaacggcatatttttgaaggcaaaagcaagtgaataggggctccccttggtattcttcccttctcatgcctgccctggctrttttcttacgcctccaaacagcgacttaatgtattttattaatcctttatcatttttctcaccggtagaattaatctcttaatctttagtttcgttatcataattgaaagtgagagtgcgtttttgaaatgtgtgtggcaaacattatagtgcttatttgaaacacagaagaaataaataatgaagagaaagtaaccatttcctatgatcacaaagcaagacttttgtggaccaggaattcgaattccagtttcaaaacttctgatctcagcactttacatcctacaggtttgaaataaagctgaacttccatggttcaatttgtatcagattatatgttagaggaaaattaaagatccaacaatcttagcttgtagcagaatacaattttgagtgtaaccttatgaatgcctacttaaaggaaaaattctccttgaattagcaaatactgataaaatccacaattagggaaaagacatgtatagaagagtgtggaaataaaaattacttctaacatccctttcaatgaattctagcacatttttcttgtccacaagtgataggacagaaatattgacataaattaatgcatccataatatccaaaccagtggctgagaagtggagcttttaagtgaaaagggcattcattttatgacatgttgtaatgctctatgtgacttgcatttactatctcataagtattttgcaatgacactgtgaggtagttccagtgttctagggaaaaaaaggaaatggatgcacagatatggtttcaggaatttaacagggataatgaagaattcatgacaaatgccagaaatgaatctcaaaatttttgtgtcagtctcagcctcagaccctttttgctgtatttagaaaagctgaatgtattagaaatacagccgaagagttctgccttgccccgtgcctctgaatttgccctcaggcatttgaaaatacaaaatgaactgcataaggaaaggtttctgaagtttaagataaaaatgctgtgggaaatacctactatttaaagcataagtggaatgtgcttcttgtatgatttccatggcactcatagaaactcattccctctgcatagctgctttctctcatcaggaatttgggaagttcccaatgggaatttc

SEQ ID NO: 685095 - DNA, 894 bp, Homo sapiens
aagaatttgctacagttttatttttctgattttgatagaagcaaattcattgatatctttaaaaatactttggggaaaaactaatcatttaaacaatacacagaaaagcatgtatataggtgcacatatttttttcttttgccttctgctccaatgtgactttcacgtggaactgaggacaaaagtgtggytgagtgaacctgttctacatggttgtgatataagttgaaatctaacagagaactttggctatatgaattcattcaatggaacaacaaaaatctagagaggtttgccttttaaactcttagactaattattccaggaattgcctcagtgcttatgttagcttggtgtcagatatctgtactcgtaagaacaaagtcaaaaaagaagtcatgaaatttagaatggcttcttcctgtcaaatacatttagaacatatttttggaataatttcaagtccattgggaacacaattactaggaatttgggacagaggtgacaatgagaatctgctttgagaaagtagatcataatattacagagctatgccttcatcagtttaaaattggaagtggtttctctgttattttctaccctggagtgttcttaaaattatttttatctcctttaagaaatttgcagcgcttctaaaaatgaaactgaaagtgccacaaatatgcttgtgctccaaatcagttttaagttaacatgcaaagagaattttggctactttttgtttggagtcaaatataaaactaaacaacatgtgcccagatttcctaccatggatttgcaaaagatattttgaaacctttcttggcaaaaatcatattctgttatgattcagtgttgcactgtaaacagagtgtttagaaattggggtttgag

SEQ ID NO: 685096 - DNA, 894 bp, Homo sapiens
aagaatttgctacagttttatttttctgattttgatagaagcaaattcattgatatctttaaaaatactttggggaaaaactaatcatttaaacaatacacagaaaagcatgtatataggtgcacatatttttttcttttgccttctgctccaatgtgactttcacgtggaactgaggacaaaagtgtggttgagtgaacctgttctacatggttgtgatataagttgaaatctaacagagaactttggctatatgaattcattcaatggaacaacaaaaatctagagaggtttgccttttaaactcttagactaattattccaggaattgcctcagtgcttatgttagcttggtgtcagatatctgtactcgtaagaacaaagtcaaaaaagaagtcatgaaatttagaatggcttcttcctgtcaaatacatttagaacatatttttggaataatttcaagtccattgggaacacaattactaggaatttgggacagaggtgacaatgagaatctgctttgagaaagtagatcataatattacagagctatgccttcatcagtttaaaattggaagtggtttctctgttattttctaccctggagtgttcttaaaattatttttatctcctttaagaaatttgcagcgcttctaaaaatgaaactgaaagtgccacaaatatgcttgtgctccaaatcagttttaagttaacatgcaaagagaattttggctactttttgtttggagtcaaatataaaactaaacaacatgtgcccagatttcctaccatggatttgcaaaagmtattttgaaacctttcttggcaaaaatcatattctgttatgattcagtgttgcactgtaaacagagtgtttagaaattggggtttgag

SEQ ID NO: 685097 - DNA, 307 bp, Homo sapiens
cagagttctggagctatcaacatggagggggcgggagccccatgaagagagagcccgcctgagaataaagcacagaatccaggaatgaagattcttgatattatggggagcctgcttccagccatggctgatgagattgacaccttcattcattcactcattcatttattcaccaaaaaattaccaggcatctattatgttacaggtgttattttaggccttarggatacagaagtgaataaactatgcaaaactcctaccttaaggagcttgcaattccttaggaagagacaatcacataagatcc

SEQ ID NO: 685098 - DNA, 546 bp, Homo sapiens
tatgtaatttgagggagtgaactcaacaagctgatggggtttgtgatagttcccctggccaacaaactgggaggatgctgacattttggcaaaaccagggcatgagagacctactttttgaatagatgatatgagaatttaccttacctctcttctcctctgctctaataaaacagaggtcacaggtgtgttgtgraaagtaaatgagatcacacatgagaaggctaacaggctttgatcagagccccacacatactaagtgatcaataaaaggcaggagggaggatggtgaaaaggtgaaatgacatgaggatgaggagattgatgatggtggtggtggtggtggtaatcatagttgtcatggatcaaattgtatccccccaaaactcatgtgctgaatcctaacccccagtacctcagaatgtgactggatttgcttatgtggtctttaaggaggtaattaaggttaaatgggtcaaaaaggtggggccctaatccaatatgactggagtccttgtaaaaagaggtgataagaacacagatgca

SEQ ID NO: 685099 - DNA, 546 bp, Homo sapiens
tatgtaatttgagggagtgaactcaacaagctgatggggtttgtgatagttcccctggccaacaaactgggaggatgctgacattttggcaaaaccagggcatgagagacctactttttgaatagatgatatgagaatttaccttacctctcttctcctctgctctaataaaacagaggtcacaggtgtgttgtgaaaagtaaatgagatcacacatgagaaggctaacaggctttgatcrgagccccacacatactaagtgatcaataaaaggcaggagggaggatggtgaaaaggtgaaatgacatgaggatgaggagattgatgatggtggtggtggtggtggtaatcatagttgtcatggatcaaattgtatccccccaaaactcatgtgctgaatcctaacccccagtacctcagaatgtgactggatttgcttatgtggtctttaaggaggtaattaaggttaaatgggtcaaaaaggtggggccctaatccaatatgactggagtccttgtaaaaagaggtgataagaacacagatgca

SEQ ID NO: 685100 - DNA, 608 bp, Homo sapiens
tattttttcaatggggagatgagttcttataattggtttctaagactgctttgtattttagggatatttacctcttgtcatgtttgctccaaatatttttttctagcataacatttgctttttaaataagtttatattttttgaaggactgaaatctaaaattgtatatattatgtaatcaaatacactagttttttctttcatgtttcttttcttctgatattttagatcatataattttattcttcattttgttaatgtgttgtatcrtgtttacagatttgtgtatgttgaaccatcccagcatcccagggataaatcatatttgatcacagtgaacaattcttttaatgtgctgttgaattcagtttcctagaattttgttgaggatttttgcatctatgttcctcagggatgtcggcctgtaagtttattttcttgtagcgtccttgtctggctttgatatcagggtaatgctggacttgtaaaatgagtttggaagggttcctttctcttcaattttttgggaacagttagagaaggattggccctaattcttctttaaatgtttggtagactccaccattgatgctataaggtcctgtgct

SEQ ID NO: 685101 - DNA, 615 bp, Homo sapiens
gtttattgtgtggttattatgaaaagtatctaaatgttaattacattttctatttagttatttttggtatacaggaacattkttcatttttctacttttatcttacatccaacaaccctgctggactctcttattaattctaatagtttgtcttttgattaagcttgttatacatgtagataatcatataatctcaaatagtgatacttttttctcttttttcccctctgattacacctttttttcaattcttatggcattattcagtacctctaagttcttgttaatgagtgatgatgttgagcttccttatcatattctttaccttaataggaatgtgtccataatttctcaagaagagaaagtccattaacacattgatgacattcccttttacaactagttttccaagagttcatttgagataataaaagggaattaaactttataaaatgattttccaaacacatgcaatgttttacttttagctcaatgtgataagttaaatatatttacatgcctgggatagaacctacttaatatcgatatgtttttacttttttaaacagtaaaatttattgtacatatagaagcctgcataaaacatatatgcaa

SEQ ID NO: 685102 - DNA, 1831 bp, Homo sapiens
aaaactagaattttttacagatgatgtgaatctcttagttctgcaatcttttgttgtgcgtagtttaccttgtcattactactaagtatcttttatttgttacagattaaaagtaagggttttatgtaaaatatgtgtaacatgattatcctagacttttagcttttcagtaatatttgtagttgtttctagattacttgtaatatatgttactaaaaatttagagattctcaaagacgttttaaaaaaaaactatatagaatttgaagagatggaagtggtcttgtaaaaatgtaggtagactttaatccaaaagtaaattttttttcttgcaaatatatgcctttgctgaatatttggaatggcactttgcactaaaatatctgggcttatatcttaatttaagaaraaattatacaatttgcttgcatgttctctctctctggttgaggcactctttttcagtttgtggcattaaactagtttggacttgaggacagagactgtatctttttgactttgtgtctatagtgtgtggcacatcctaaggactcaacaaaatgtttgctgaactaataaattattgtattcccttgtgcgtttttaggaccctcttccactggttgtcctctctggtatcatcagtctttccctttctctatgtagtaaacctcagtctcaaacatactcaaatctgacttatgtctattctagacgttcaaaaacattctctttaaaaaaaacttgagcttttcattggaatcctttgaagttaactttttagaagaattaacatatagctccaaatgctgtgtcttcccatttattcacacttttgtgtctttaggtagagttttatcattttcttcatatagtttctgctctggtcttgttaatattttgtgtttttattattgctgtgtgtagaatatgtttaacttttctaagtgctaacttataataaagttactgaattttgtacatttagccacctcatagagccctgtttgtttctaataattttttagttgatcctaatatatgcctcacagttaattgactatgttataaataacactttttatatcttttttttgtcctgtcaaattggctagaagattttgaacaatgttaagtttaatgggaattctggcatctctgtctttaaaggcatttccctggacgtggggctcatgtctatattcccagcactttgagaggctgaggtgggaggagcacttgagcccaggggttcgaaatcatcctaggcaacatagcaagaccctgtcttaagaaaaataaagacatttcttttaggcttaattacgatgttactcattttttcttgactctcccttcctttggctttttggcatcctttttcctgatccttggaatgtggttgttctccactgttagctactttctctctcacagaatctgcacttattctaagtggtgctattcatcactgtggcttcaaatattatctttacactggggatttctacctttttatctttaatttctaagtgtcaactttaattttttttaaattttatttcagttgtttttgggatacaggtggttttgggttatatggataagtttttagtggttatttctgagatttttgtgcacttatcacctggacagcgtacactgtactcagtatgtagtcttttatccctcacttcctcccagccttcctcaccgacttcccagagtccactgtatcattcttgtgcctctgtgtcctgatcaactattcatttctagtttaccatttaacttgtcctttcgtcccctcttccttcttaatcaagctttt

SEQ ID NO: 685103 - DNA, 1831 bp, Homo sapiens
aaaactagaattttttacagatgatgtgaatctcttagttctgcaatcttttgttgtgcgtagtttaccttgtcattactactaagtatcttttatttgttacagattaaaagtaagggttttatgtaaaatatgtgtaacatgattatcctagacttttagcttttcagtaatatttgtagttgtttctagattacttgtaatatatgttactaaaaatttagagattctcaaagacgttttaaaaaaaaactatatagaatttgaagagatggaagtggtcttgtaaaaatgtaggtagactttaatccaaaagtaaattttttttcttgcaaatatatgcctttgctgaatatttggaatggcactttgcactaaaatatctgggcttatatcttaatttaagaagaaattatacaatttgcttgcatgttctctctctctggttgaggcactctttttcagtttgtggcattaaactagtttggacttgaggacagagactgtatctttttgactttgtgtctatagtgtgtggcacatcctaaggactcaacaaaatgtttgctgaactaataaattattgtattcccttgtgcgtttttaggaccctcttccactggttgtcctctctggtatcatcagtctttccctttctctatgtagtaaacctcagtctcaaacatactcaaatctgacttatgtctattctagacgttcaaaaacattctctttaaaaaaaacttgagcttttcattggaatcctttgaagttaactttttagaagaattaacatatagctccaaatgctgtgtcttcccatttattcacacttttgtgtctttaggtagagttttatcattttcttcatatagtttctgctctggtcttgttaatattttgtgtttttattattgctgtgtgtagaatatgtttaacttttctaagtgctaacttataataaagttactgaattttgtacatttagccacctcatagagccctgtttgtttctaataattttttagttgatcctaatatatgcctcacagttaattgactatgttataaataacactttttatatcttttttttgtcctgtcaaattggctagaagattttgaacaatgttaagtttaatgggaattctggcatctctgtctttaaaggcatttccctggacgtggggctcatgtctatattcccagcactttgagaggctgaggtgggaggagcacttgagcccaggggttcgaaatcatcctaggcaacatagcaagaccctgtcttaagaaaaataaagrcatttcttttaggcttaattacgatgttactcattttttcttgactctcccttcctttggctttttggcatcctttttcctgatccttggaatgtggttgttctccactgttagctactttctctctcacagaatctgcacttattctaagtggtgctattcatcactgtggcttcaaatattatctttacactggggatttctacctttttatctttaatttctaagtgtcaactttaattttttttaaattttatttcagttgtttttgggatacaggtggttttgggttatatggataagtttttagtggttatttctgagatttttgtgcacttatcacctggacagcgtacactgtactcagtatgtagtcttttatccctcacttcctcccagccttcctcaccgacttcccagagtccactgtatcattcttgtgcctctgtgtcctgatcaactattcatttctagtttaccatttaacttgtcctttcgtcccctcttccttcttaatcaagctttt

SEQ ID NO: 685104 - DNA, 1831 bp, Homo sapiens
aaaactagaattttttacagatgatgtgaatctcttagttctgcaatcttttgttgtgcgtagtttaccttgtcattactactaagtatcttttatttgttacagattaaaagtaagggttttatgtaaaatatgtgtaacatgattatcctagacttttagcttttcagtaatatttgtagttgtttctagattacttgtaatatatgttactaaaaatttagagattctcaaagacgttttaaaaaaaaactatatagaatttgaagagatggaagtggtcttgtaaaaatgtaggtagactttaatccaaaagtaaattttttttcttgcaaatatatgcctttgctgaatatttggaatggcactttgcactaaaatatctgggcttatatcttaatttaagaagaaattatacaatttgcttgcatgttctctctctctggttgaggcactctttttcagtttgtggcattaaactagtttggacttgaggacagagactgtatctttttgactttgtgtctatagtgtgtggcacatcctaaggactcaacaaaatgtttgctgaactaataaattattgtattcccttgtgcgtttttaggaccctcttccactggttgtcctctctggtatcatcagtctttccctttctctatgtagtaaacctcagtctcaaacatactcaaatctgacttatgtctattctagacgttcaaaaacattctctttaaaaaaaacttgagcttttcattggaatcctttgaagttaactttttagaagaattaacatatagctccaaatgctgtgtcttcccatttattcacacttttgtgtctttaggtagagttttatcattttcttcatatagtttctgctctggtcttgttaatattttgtgtttttattattgctgtgtgtagaatatgtttaacttttctaagtgctaacttataataaagttactgaattttgtacatttagccacctcatagagccctgtttgtttctaataattttttagttgatcctaatatatgcctcacagttaattgactatgttataaataacactttttatatcttttttttgtcctgtcaaattggctagaagattttgaacaatgttaagtttaatgggaattctggcatctctgtctttaaaggcatttccctggacgtggggctcatgtctatattcccagcactttgagaggctgaggtgggaggagcacttgagcccaggggttcgaaatcatcctaggcaacatagcaagaccctgtcttaagaaaaataaagacatttcttttaggcttaattacgatgttactcattttttcttgactctcccttcctttggctttttggcatcctttttcctgatccttggaatgtggttgttctccactgttagctactttctctctcacagaatctgcacttattytaagtggtgctattcatcactgtggcttcaaatattatctttacactggggatttctacctttttatctttaatttctaagtgtcaactttaattttttttaaattttatttcagttgtttttgggatacaggtggttttgggttatatggataagtttttagtggttatttctgagatttttgtgcacttatcacctggacagcgtacactgtactcagtatgtagtcttttatccctcacttcctcccagccttcctcaccgacttcccagagtccactgtatcattcttgtgcctctgtgtcctgatcaactattcatttctagtttaccatttaacttgtcctttcgtcccctcttccttcttaatcaagctttt

SEQ ID NO: 685105 - DNA, 634 bp, Homo sapiens
ttcatgtggcagtcttggagcacaaaaacagaccataatatctgccctccctgagtaaatagcctatgggggaaaataagggcagattcaccygcaccgcacctcagaagctagtcatagcattggaggagacaaaggacttaataatttggtgattttatagtaatgattttctgctcaaataactcttgcttggggaatggaggcagagagagccttttcgtttatgttccacagcttgacaaccttcaggagccatggcagtgtggggagttctggtaaagcccttttagaatggaaagcttttcttctgagccatccaagtatcattcatcagcaaatatttcctgagcactttctctgtgttactgaatctccaccccaatgctatagacgggcgttttcccctgagctccattttgcagatgggttggagaagtaaaatgtaggcaatggaggtggaattttaattttaaattttaaagcaagaaatttaacaagatgtgtttttttctaaaccccttctaaagacaacattcttactccagcctagacatgctgcctctttagaagtcccctaggcatcattctagtaaagcatcttcatcttagatgtggaaactgagacccaggc

SEQ ID NO: 685106 - DNA, 634 bp, Homo sapiens
ttcatgtggcagtcttggagcacaaaaacagaccataatatctgccctccctgagtaaatagcctatgggggaaaataagggcagattcacccgcaccgcacctcagaagctagtcatagcattggaggagacaaaggacttaataatttggtgattttatagtaatgattttctgctcaaataactcttgcttggggaatggaggcagagagagccttttcgtttatgttccacagcttgacaaccttcaggagccatggcagtgtggggagttctggtaaagcccttttagaatggaaagcttttcttctgagccatccaagtatcattcatcagcaaatatttcctgagcactttctctgtgttactgaatctccaccccratgctatagacgggcgttttcccctgagctccattttgcagatgggttggagaagtaaaatgtaggcaatggaggtggaattttaattttaaattttaaagcaagaaatttaacaagatgtgtttttttctaaaccccttctaaagacaacattcttactccagcctagacatgctgcctctttagaagtcccctaggcatcattctagtaaagcatcttcatcttagatgtggaaactgagacccaggc

SEQ ID NO: 685107 - DNA, 634 bp, Homo sapiens
ttcatgtggcagtcttggagcacaaaaacagaccataatatctgccctccctgagtaaatagcctatgggggaaaataagggcagattcacccgcaccgcacctcagaagctagtcatagcattggaggagacaaaggacttaataatttggtgattttatagtaatgattttctgctcaaataactcttgcttggggaatggaggcagagagagccttttcgtttatgttccacagcttgacaaccttcaggagccatggcagtgtggggagttctggtaaagcccttttagaatggaaagcttttcttctgagccatccaagtatcattcatcagcaaatatttcctgagcactttctctgtgttactgaatctccaccccaatgctatagacgggcrttttcccctgagctccattttgcagatgggttggagaagtaaaatgtaggcaatggaggtggaattttaattttaaattttaaagcaagaaatttaacaagatgtgtttttttctaaaccccttctaaagacaacattcttactccagcctagacatgctgcctctttagaagtcccctaggcatcattctagtaaagcatcttcatcttagatgtggaaactgagacccaggc

SEQ ID NO: 685108 - DNA, 1154 bp, Homo sapiens
ggagataattgaatcatgggggtggtttccccatcctgttctcatgatagtgtgttagttctcatgagatctgatggttttataggggcttcccccttccctgggcactcattcttctcttttctgccaccttgtgaataaagacatgtttgctccccttctgccatgattgtaagttttctgagtactccgaagccctgaggaactgtgagtcaattaaacctctttcttttataaattatgcagtcttgggtatgtcctgatagcagcatgagaatggactaatacaaacacaaagcctattttataataaagtgttgaatatttcatgtgatttattgaatattgtactagaagtgaaaaacagaattgttgtatgggtacttgaattaggtttctactgaatgcatgggacttttggaacatcataaagttgagtcatcttaagttgaggaccatctgtatttccagttttaatttttttagttgcaaagtctgtratgtagaggaaatcatattatagatatatcccatatttgtaagcacccttccctccctcatttctagaaatctgagttcaggttctatctcctgtttattttgtgtgactttgaataagccattgataccgtaacttttaagctcttcacctgtaggactgataaccactcctgccttgctcctgtaccagtctttagaacaatcaataatgggttggaaataaaaccacagactccgtgaggaaaccacagagcaactacactcaaagtgagtagaggttgggagccctaaatttcactctgcagtgatggtgaatatagatgttacttccagagcactggaggagaaaagagattatgtaaatattaccagggactaactttgttgcattgatgctgaaagatcatgactgactcattgattgctgtttccaaggtgccattcacagtgctttgcaaagagtagaccaattctattggtgaaggatagaatgaaatgctcagatatctatggagtgttcatttattagtatttaaaacaccttgtacatttgaactcacattgttagcctgtgaacacatacatgctttgtgactatcttgtcagacacagaaaaaaatcaaagggtaaaacaggagatgcttctaacgtaa

SEQ ID NO: 685109 - DNA, 649 bp, Homo sapiens
tcaactggtgccacaggatagataaaattactgcagctttcaagttcaaggtaataaaggagatggggaagatgccatggtgatggtgggagaaatacagactttkcaatgaatagggaagactacagaaatagaaaaataacataaagggcttgatgcctggaatcccagcactttgggaggctgagcctgacgtgggagcattgtttgaagccaagagtttgagagcagcctgagaaacacagtgagactccacctctaccaaaaaaattaaacaattagctgggcatgatggcacgtgcctgtagtactggctactcaggaggatgcagtgagatgattgtctgagcccaggagtttgaggctgcaatgagctatgatcatgacactacactccagcctgggtgacagagcgaggccccgtctccaaaaataaataacataaaggaaggtggtgagaagacccagcaagtacttcagaatggtgatagtaaaatgtcaaaatgcactcatggctttaaaattttggggcagaattattagaagttaggaggaggctcagaatcagactgcctaggtcaaaacttcactctactattttctagctaaattactgaaacagttagttagctttctttctttctttctt

SEQ ID NO: 685110 - DNA, 1316 bp, Homo sapiens
tgttgaattaataaagtggtaacagtaattctacattatgtttgagatagtttaggaaaacctcctggggacaatttcctatcagttccctcatgctctttccccaaggagtatcttttctcttaaatgctaaaagccaaagcctttgttgtgcttagaaaatccaagcaggtagaagatacttctgaatatgtaaaaagtgtgccaattcagtagccccctccccagactggggttagagggctcccttttgctctcacagtgagtctccttgtgaaaaagaatcaatagttttatcatcttgtcttagcacttctccttctgaacagaaatttgttgttcaacctttgggtttatgctggagaaacagaatgcattgataaaccatccttttgtgtgtatcattgagagccaagatggaagcagtgttagacagctagttaagtttttttctgtagtgtcttttctgagttaaaaagcaaatgcaataaatgcccacagaatgttcttgacttttctttttctttctggtgtatttttttaagctttaatttattgctcttgcactgtgtgccaagaacggaattgcctagatcacatcttacaatatctctatgagataggaactctttctttcttactttttaaaatagagataggggtctcgctatattgcccaggcttgtctcaaactcctgtgctcaagtgatccccctgccttaacttcccaaagtgttgagattacaggcgtgagccactgtgcctgactggccgagagctctcttattcccactttatacatgagcatagtgagttttagcaagctaagaaacgtggcctggttggtggtttgtggagccaggattaaaatccaggtaatctgacttatatcttccacagttataactatactacctctcattatatctttttctcttctcatctttatcatttaaatacttttataaaaggcatttgagatggttaagcataaatatgtttctcaaagcaatagataccaggaaaacagttcctggtggccttgctttgaagccatgttctaatcaatcaagattcttaaggaaragtagcatcatcaattgttcatgtatattagtagatgagtctggaaagtggaaccaaggttctggacttctttgtttctttaagccttctaattatattttgatgattatggtcaagtatatggattctagtttgtctttagtgagagattcaaaaggagcattgtgtttaattctagaaactcgagatactaatattatcacgatgagttcactcctattattttcatg

SEQ ID NO: 685111 - DNA, 671 bp, Homo sapiens
ttacattttgtgaccaggtgcagtggctcatgcctgtaatcccagcactttgggaggctgaggcaggcagactgcttgagctcaggagttwgagaccaccctggccaacatggtgaaacccggtctttaccaacaatacaaaaaaaaaattagccagatgtggtgttaagagcctgtagtcccagctactgaggtggctgaggtgagaggatcacctgagctcaggaggtggaggttgcagtgagctgagatcacaccactgcactccagcctgggtgacagagtgagaccccgtgtcaaaaaaaaaaaaaaattttgagcattctccaagtcttcgccttttctggttttaatttaaaacaaacaaacaaaaaaaacaaaacaaaacatagtgcatatgtagtttttgtctgcccagaatccctcttttctgcagaaaactgccttactcccactccacgtgttcctagtaagataacaatcacagtgccctttcagctacctggctctgggagtgggttcagtatcaacctattctttcagttcttctaaagtaaactgctgatggaatatttctttagtctttcaagagggcagagccatgcttcttccttaatatgtgtgttcatgacataaaacccttcaaacctctcctaatcttaaaagtatta

SEQ ID NO: 685112 - DNA, 671 bp, Homo sapiens
ttacattttgtgaccaggtgcagtggctcatgcctgtaatcccagcactttgggaggctgaggcaggcagactgcttgagctcaggagtttgagaccacsctggccaacatggtgaaacccggtctttaccaacaatacaaaaaaaaaattagccagatgtggtgttaagagcctgtagtcccagctactgaggtggctgaggtgagaggatcacctgagctcaggaggtggaggttgcagtgagctgagatcacaccactgcactccagcctgggtgacagagtgagaccccgtgtcaaaaaaaaaaaaaaattttgagcattctccaagtcttcgccttttctggttttaatttaaaacaaacaaacaaaaaaaacaaaacaaaacatagtgcatatgtagtttttgtctgcccagaatccctcttttctgcagaaaactgccttactcccactccacgtgttcctagtaagataacaatcacagtgccctttcagctacctggctctgggagtgggttcagtatcaacctattctttcagttcttctaaagtaaactgctgatggaatatttctttagtctttcaagagggcagagccatgcttcttccttaatatgtgtgttcatgacataaaacccttcaaacctctcctaatcttaaaagtatta

SEQ ID NO: 685113 - DNA, 671 bp, Homo sapiens
ttacattttgtgaccaggtgcagtggctcatgcctgtaatcccagcactttgggaggctgaggcaggcagactgcttgagctcaggagtttgagaccaccctggscaacatggtgaaacccggtctttaccaacaatacaaaaaaaaaattagccagatgtggtgttaagagcctgtagtcccagctactgaggtggctgaggtgagaggatcacctgagctcaggaggtggaggttgcagtgagctgagatcacaccactgcactccagcctgggtgacagagtgagaccccgtgtcaaaaaaaaaaaaaaattttgagcattctccaagtcttcgccttttctggttttaatttaaaacaaacaaacaaaaaaaacaaaacaaaacatagtgcatatgtagtttttgtctgcccagaatccctcttttctgcagaaaactgccttactcccactccacgtgttcctagtaagataacaatcacagtgccctttcagctacctggctctgggagtgggttcagtatcaacctattctttcagttcttctaaagtaaactgctgatggaatatttctttagtctttcaagagggcagagccatgcttcttccttaatatgtgtgttcatgacataaaacccttcaaacctctcctaatcttaaaagtatta

SEQ ID NO: 685114 - DNA, 1453 bp, Homo sapiens
gtgatgaattattcaataaattgcatgaacttttcaacacttgattataaaacaggctttgtgttagctaatttttgtccaatcgtaggctaatttaaatgttctgagcttactgaaagcagactagactaacctatggtgtttgagaggttaggcatattacatgcattttcaacttactatgagtttatcaggacttaggcccatcttaagtcgagaagcattgtgtgaaatatttccaacaccccgggagttctccatgccttcccagtctgtgccttttccagagatataatagtttctaaccactattttaacttctatcatgattcctttttagctatatgaattagatgaattttggtgttccttttaattctagttttctttgagtctcaatttctaattcagatggagaaataaaactattttgagtaagttcacattgtcatccaaaatttagatattttctgccatcaacatctaccccaactttaacccctcctttggttcttcacctccgcaagtcttcatattctttcttattcttaagctctattgtggctacttcccaagctaggatagaaataaagaatactaaagttacaagtcaagtattctaaccccccttacttgcaacaattccttctacaacatccctggaaagtggtcttttacctctgcttaaaaacttctggtaactgagacctgcttatgtcaaattattggacatttgtctttgctagaaattgctttcatatgttgatcattgtaaaatattatttggtatctttgctcatagttatgccctccagaataaaaagaatatccrgtcttttcttctttatggcaacctttcaaatatttaagacagttgccacatatactctaagactttttttttctctagttattggagtcagaactcccagcactttattggctcttgccatgcctttcaaaacctgaatctgaaagatgctaggtaattgagagttacagtagcctaccaagggagaaattacaatttatgctgtaacacaactgttggagcaataatgtacaagttctaccccagtgggacatgcagaacggcatatattccttctctctctgcagaaccagcttcatggatacccaccctgtgtggtctcactgggctcatgcccggatagtcactatgcttgatttttcactctactgttgccatcttaaaattcttaatattttttgaacaaggggcccacgttttcatttttcactgggttccacaaaattaggtagccagttcttcttttctggttttattgcatttgctaatgtcctaaatatttttatttttcttcttagtaatatctcctctaacagagctattaagagtgtattatattttatagtcctttttaacttatttcaaataacttttccttagagcaatgaacataggttcaat

SEQ ID NO: 685115 - DNA, 1313 bp, Homo sapiens
attccacaaccaaaaggagagaccactggggttaactttgcatactctcaccagttctcaatgcctattcatagtgcagttaaaagctcaatgttcatcgtccagcggaggcaacatgacaaccctagaagatgccttactggtcctcactgtggtcatgtgtgaccttccttgacatcaacgatacccctcacttgaattctgaagctcacacctcttagggcaatccgaccttaaccatccctactccaagaactgtgcgatttcccttttcaattgcggaagcaaaaagggtcttgttttgccaactttgagggatagtgtagagttatccacccattatcctaagagctactactatcttatttgtcttcaggaagctctttctatttcctaccctgatctgagggaggaaaatactgacagcaccctaaagttgatctgccttcccaaggtaatatttctctcaactctctggctgcagcagggatcctaaaagtaccatttgctaaattatcagtacagtatcctgtttgaaacaggccttcataacctacaagaaaattacttccagtgatttctttaagaaaaaagtgactttaactttcagattttcctctgcccatcagctcttttgcaattaaagtaacaatgacttattttctcaactctctgtacagaaaaccatgaacactatggatagattgaactactgggacccaataagccattcaacaaatgaaacacaccttgaggtttaggaaatagacccaaagattgtagaaaggccataggttaggctttattatgctaattcaaaataaaattaaagatttctaaggaaacagagttgatccctcacctgagaatgacgaagtaagagagtgttgcagaaataatctataaagcagcacaccaacatggcacatgtatacatatgtaacaaacctgcacattgtsgtcatgtaccctagaacttaaaatataataaaaaattatatattaaaaaaatgaggctgatatatatacactgacattgaaacatatttaatgtagacatttaagagaataaaaacaagctgtagaataaaaaaaaagtgcacaatgttatttgtgccatccgttggaaattaacatgattccttgaagatgcatagcaatccaagaccaggttgcatttgcagaaatgaacttttaatcccatcagcagcattcagaacagaaaatcgttattcatagtctaatctgacctggactggaggtttgctttaaatatgaaatagtctcagccataagacaagtctgtatgccaa

SEQ ID NO: 685116 - DNA, 1313 bp, Homo sapiens
attccacaaccaaaaggagagaccactggggttaactttgcatactctcaccagttctcaatgcctattcatagtgcagttaaaagctcaatgttcatcgtccagcggaggcaacatgacaaccctagaagatgccttactggtcctcactgtggtcatgtgtgaccttccttgacatcaacgatacccctcacttgaattctgaagctcacacctcttagggcaatccgaccttaaccatccctactccaagaactgtgcgatttcccttttcaattgcggaagcaaaaagggtcttgttttgccaactttgagggatagtgtagagttatccacccattatcctaagagctactactatcttatttgtcttcaggaagctctttctatttcctaccctgatctgagggaggaaaatactgacagcaccctaaagttgatctgccttcccaaggtaatatttctctcaactctctggctgcagcagggatcctaaaagtaccatttgctaaattatcagtacagtatcctgtttgaaacaggccttcataacctacaagaaaattacttccagtgatttctttaagaaaaaagtgactttaactttcagattttcctctgcccatcagctcttttgcaattaaagtaacaatgacttattttctcaactctctgtacagaaaaccatgaacactatggatagattgaactactgggacccaataagccattcaacaaatgaaacacaccttgaggtttaggaaatagacccaaagattgtagaaaggccataggttaggctttattatgctaattcaaaataaaattaaagatttctaaggaaacagagttgatccctcacctgagaatgacgaagtaagagagtgttgcagaaataatctataaagcagcacaccaacatggcacatgtatacatatgtaacaaacctgcacattgtcstcatgtaccctagaacttaaaatataataaaaaattatatattaaaaaaatgaggctgatatatatacactgacattgaaacatatttaatgtagacatttaagagaataaaaacaagctgtagaataaaaaaaaagtgcacaatgttatttgtgccatccgttggaaattaacatgattccttgaagatgcatagcaatccaagaccaggttgcatttgcagaaatgaacttttaatcccatcagcagcattcagaacagaaaatcgttattcatagtctaatctgacctggactggaggtttgctttaaatatgaaatagtctcagccataagacaagtctgtatgccaa

SEQ ID NO: 685117 - DNA, 1246 bp, Homo sapiens
tttctcacctgtctctctgatccacatgctacatgsctagcctagattgtagaatcattcccaggacactctcaggcatatcctacagctgggccctacgtcatctttaaaatcaaggttttggccgggcatggtggctcacacctgtaatcccaacactttgggaggccaaggcgggtggatcacaaggtcaggagtgcgagaccagcctagccaacatagtgaaacctcgtctctactaaaaatacagaaaattaaccaggcatggtggtgggagcctgtaggcctagctacttgggaggctgaagcaggagaatcacttgaactcgggaggtgaaggtcgcagtgagctgagattgcgccactgcactccagcctgggtgacagagcgagactccatctcaaaaaaaaaaaaaaaaaaaaaaatcaaggtcttgaaagaaatggaagacgatcgtacttgtcactttcatatgttcaaaatactcatttcttggaaattacagatgatctactccttgtttgctccagattctatcgccctggaggcagtccctgtatttgtttcctcattatttttgcaggacccagcagattcccggcccacactaggtgcctaatgcatatttgttgaatgactaaatgaatgaatggacagtatcagcaggaaattaatttccaaattagtgtttccccaaatcccacatatatatttacactaatttcttcagttatctcttcagagatgagcactcatttattatgcactaacccaagtaataatccaaagattaatcagctgaaaaaaatagtggacccacttcaaatagtctgatttgaattagaagagaacttcatgggctttggattaggcagactagggttcactgttcacccttttccaatgttgtatggggctgtgtatttacctcttcgagtttctttcttgtttctatcttacaggattgtttcacaaagtaaatgaataatacagatgcttagtgacttacatttatacatgtatattatgtggacacacacacaaacacacgcacacatatacatacccctcacgcctttccaagtagaatcccttattcttaaaaaacattttttcggctgggcgcagtggctcacgcctgtaatcccagctctttgggaggccgaggcgggcggatcatgaggtcaggagatcgagaccatcctggctgatatggtgaaaccccatctccactaaaaatacaaa

SEQ ID NO: 685118 - DNA, 1246 bp, Homo sapiens
tttctcacctgtctctctgatccacatgctacatgcctagcctagattgtagaatcattcccaggacactctcaggcatatcctacagctgggccctacgtcatctttaaaatcaaggttttggccgggcatggtggctcacacctgtaatcccaacactttgggaggccaaggcgggtggatcacaaggtcaggagtgcgagaccagcctagccaacatagtgaaacctcgtctctactaaaaatacagaaaattarccaggcatggtggtgggagcctgtaggcctagctacttgggaggctgaagcaggagaatcacttgaactcgggaggtgaaggtcgcagtgagctgagattgcgccactgcactccagcctgggtgacagagcgagactccatctcaaaaaaaaaaaaaaaaaaaaaaatcaaggtcttgaaagaaatggaagacgatcgtacttgtcactttcatatgttcaaaatactcatttcttggaaattacagatgatctactccttgtttgctccagattctatcgccctggaggcagtccctgtatttgtttcctcattatttttgcaggacccagcagattcccggcccacactaggtgcctaatgcatatttgttgaatgactaaatgaatgaatggacagtatcagcaggaaattaatttccaaattagtgtttccccaaatcccacatatatatttacactaatttcttcagttatctcttcagagatgagcactcatttattatgcactaacccaagtaataatccaaagattaatcagctgaaaaaaatagtggacccacttcaaatagtctgatttgaattagaagagaacttcatgggctttggattaggcagactagggttcactgttcacccttttccaatgttgtatggggctgtgtatttacctcttcgagtttctttcttgtttctatcttacaggattgtttcacaaagtaaatgaataatacagatgcttagtgacttacatttatacatgtatattatgtggacacacacacaaacacacgcacacatatacatacccctcacgcctttccaagtagaatcccttattcttaaaaaacattttttcggctgggcgcagtggctcacgcctgtaatcccagctctttgggaggccgaggcgggcggatcatgaggtcaggagatcgagaccatcctggctgatatggtgaaaccccatctccactaaaaatacaaa

SEQ ID NO: 685119 - DNA, 1246 bp, Homo sapiens
tttctcacctgtctctctgatccacatgctacatgcctagcctagattgtagaatcattcccaggacactctcaggcatatcctacagctgggccctacgtcatctttaaaatcaaggttttggccgggcatggtggctcacacctgtaatcccaacactttgggaggccaaggcgggtggatcacaaggtcaggagtgcgagaccagcctagccaacatagtgaaacctcgtctctactaaaaatacagaaaattaaccaggcatggtggtgggagcctgtaggcctagctacttgggaggctgaagcaggagaatcacttgaactcgggaggtgaaggtcgcagtgagctgagattgcgccactgcactccagcctgggygacagagcgagactccatctcaaaaaaaaaaaaaaaaaaaaaaatcaaggtcttgaaagaaatggaagacgatcgtacttgtcactttcatatgttcaaaatactcatttcttggaaattacagatgatctactccttgtttgctccagattctatcgccctggaggcagtccctgtatttgtttcctcattatttttgcaggacccagcagattcccggcccacactaggtgcctaatgcatatttgttgaatgactaaatgaatgaatggacagtatcagcaggaaattaatttccaaattagtgtttccccaaatcccacatatatatttacactaatttcttcagttatctcttcagagatgagcactcatttattatgcactaacccaagtaataatccaaagattaatcagctgaaaaaaatagtggacccacttcaaatagtctgatttgaattagaagagaacttcatgggctttggattaggcagactagggttcactgttcacccttttccaatgttgtatggggctgtgtatttacctcttcgagtttctttcttgtttctatcttacaggattgtttcacaaagtaaatgaataatacagatgcttagtgacttacatttatacatgtatattatgtggacacacacacaaacacacgcacacatatacatacccctcacgcctttccaagtagaatcccttattcttaaaaaacattttttcggctgggcgcagtggctcacgcctgtaatcccagctctttgggaggccgaggcgggcggatcatgaggtcaggagatcgagaccatcctggctgatatggtgaaaccccatctccactaaaaatacaaa

SEQ ID NO: 685120 - DNA, 1246 bp, Homo sapiens
tttctcacctgtctctctgatccacatgctacatgcctagcctagattgtagaatcattcccaggacactctcaggcatatcctacagctgggccctacgtcatctttaaaatcaaggttttggccgggcatggtggctcacacctgtaatcccaacactttgggaggccaaggcgggtggatcacaaggtcaggagtgcgagaccagcctagccaacatagtgaaacctcgtctctactaaaaatacagaaaattaaccaggcatggtggtgggagcctgtaggcctagctacttgggaggctgaagcaggagaatcacttgaactcgggaggtgaaggtcgcagtgagctgagattgcgccactgcactccagcctgggtgacagagcgagactccatctcaaaaaaaaaaaaaaaaaaaaaaatcaaggtcttgaaagaaatggaagacgatcgtacttgtcactttcatatgttcaaaatactcatttcttggaaattacagatgatctactccttgtttgctccagattctatcgccctggaggcagtccctgtatttgtttcctcattatttttgcaggacccagcagattsccggcccacactaggtgcctaatgcatatttgttgaatgactaaatgaatgaatggacagtatcagcaggaaattaatttccaaattagtgtttccccaaatcccacatatatatttacactaatttcttcagttatctcttcagagatgagcactcatttattatgcactaacccaagtaataatccaaagattaatcagctgaaaaaaatagtggacccacttcaaatagtctgatttgaattagaagagaacttcatgggctttggattaggcagactagggttcactgttcacccttttccaatgttgtatggggctgtgtatttacctcttcgagtttctttcttgtttctatcttacaggattgtttcacaaagtaaatgaataatacagatgcttagtgacttacatttatacatgtatattatgtggacacacacacaaacacacgcacacatatacatacccctcacgcctttccaagtagaatcccttattcttaaaaaacattttttcggctgggcgcagtggctcacgcctgtaatcccagctctttgggaggccgaggcgggcggatcatgaggtcaggagatcgagaccatcctggctgatatggtgaaaccccatctccactaaaaatacaaa

SEQ ID NO: 685121 - DNA, 1246 bp, Homo sapiens
tttctcacctgtctctctgatccacatgctacatgcctagcctagattgtagaatcattcccaggacactctcaggcatatcctacagctgggccctacgtcatctttaaaatcaaggttttggccgggcatggtggctcacacctgtaatcccaacactttgggaggccaaggcgggtggatcacaaggtcaggagtgcgagaccagcctagccaacatagtgaaacctcgtctctactaaaaatacagaaaattaaccaggcatggtggtgggagcctgtaggcctagctacttgggaggctgaagcaggagaatcacttgaactcgggaggtgaaggtcgcagtgagctgagattgcgccactgcactccagcctgggtgacagagcgagactccatctcaaaaaaaaaaaaaaaaaaaaaaatcaaggtcttgaaagaaatggaagacgatcgtacttgtcactttcatatgttcaaaatactcatttcttggaaattacagatgatctactccttgtttgctccagattctatcgccctggaggcagtccctgtatttgtttcctcattatttttgcaggacccagcagattcccggcccacactaggtgcctaatgcatatttgttgaatgactaaatgaatgaatggacagtatcagcaggaaattaatttccaaattagtgtttccccaaatcccacatatatatttasactaatttcttcagttatctcttcagagatgagcactcatttattatgcactaacccaagtaataatccaaagattaatcagctgaaaaaaatagtggacccacttcaaatagtctgatttgaattagaagagaacttcatgggctttggattaggcagactagggttcactgttcacccttttccaatgttgtatggggctgtgtatttacctcttcgagtttctttcttgtttctatcttacaggattgtttcacaaagtaaatgaataatacagatgcttagtgacttacatttatacatgtatattatgtggacacacacacaaacacacgcacacatatacatacccctcacgcctttccaagtagaatcccttattcttaaaaaacattttttcggctgggcgcagtggctcacgcctgtaatcccagctctttgggaggccgaggcgggcggatcatgaggtcaggagatcgagaccatcctggctgatatggtgaaaccccatctccactaaaaatacaaa

SEQ ID NO: 685122 - DNA, 2297 bp, Homo sapiens
tcaataaagtattgtattccttgcccacagtgattagttcaggaatgaccatatgacccaacccagccaatgaaacatttgctgggaccactgggctcgatttcctactggacttgaacttggaaacatgttaagtctggaatagtggctgccatgtacgtggctatcataaaaggagttcctatgcaagttcataacaatggagccagcataggctcctatgctatgtcccatgacgtcatttgagctcctaaatcaagccacacctgaaataagacctacccctaggcttcaataaattacattttggtttaatccagatttcgaggggttgccacttgtaacaggaaaactcctagccacactggtatcttttctttccattttgagcctgtccctttaagcctgatgtctttagacgctattctctttttaatacatactcaattatttgggtttgaatgacccaaattgcattttttaaaactttccatccctttcttgagcagtctttccccctagagtgtcatgccatggatcatttgtatcattcaccaaatgtatctatcattcctgtcatttttcagaatgtttaaaatatttctcattctaactcaatgctttctgcctgtggattgactcaaatagattcttttgcagctactgtttctctgagagagggacagataaacagacaccaacagaaaggccaggatacaaatcgttgtcaagcctaccctgaggcagaaattctgccaggtatatatcttttcacgttttatcttcggtaaccccgtgagatcaattttaaaatgcccatcttagacatgaggtcagcaaatcacttccccaaattactataaagggagaagaagccagaggtcaaaagcaggtctgactgatctcaaagcctttccattcttcctgtgtcaccaaactgcccactctgggccattgtttcttcaggaatagaccctggggcgccctctggataaaattctgggaagcagcccatgtgggcaagtggaagctcagggtaagggtgacaaggttgactcagtttccccagagaagaagcaagaagtttgggatccagatgcacccattaaaggcctctgggaatgtggccaggctgtcctgtcctgcccctatggagtcctccaaacacccaccagcgtcatacaggctgagaaggcaccaagccttctgtctggcaccttacaggaacagtgaggagaccagggaggaggtgtcacatgcagcctctgcccctgtgtgtcttcatgtcccagaaggccctccccaggacctgaccatgtaagaaactgcccactctggatggatgtcactcgcatgcctcctgcttccacccagggagctggagcccttggcaggatatctatccccagccgcaggacagaacccaccttcgggccagtgaccccaaacccaaagccctgctcttcactgttctctgtttgaataaggactctgggaaacgcacccaatgggagacacattggagagaggaacgtttccttgtggggagacggactgtctcgggatatttcatgtagtgacaattgaagttggagcttgacacatgagggtttgttctgttagtcccaaagatgccattgtcagcaaagagtgactctcccagaatcccccaggtagatcccaacccctgctccacctcccgaaagcatggcatccagacccccacccaaagaacccccacccaaagtgatcatgcttgctccagtgcctataagagtactgccttccactggacatctattagaccagatggtttacatgtattatctttaatgtgaacatcagcccctatgcaataggtattgctatctccatttcatgtatgaagaaactgaggctcagagaagtcgagaaatccataacctctctctctctctctctctctctctctctctcttagagctgggccactggaactagatatacacatgcagtggatggtggatggtccatgccccttcaagtccatttactcacctgacgggtcttatgtggatatttgtctaccccactagataggagcacytccaagagccggatccaattctaattccaagagtgcagaataatagacattggagactagggagggtgggagaatgtgggggtgagggctgagaaattacttaaggagtgcaatgtacatgatttgggtgatggttacaccaaaaagctcagacttcaccactatgcaatatatccatgtatcaaaactgtacttgcatctcataaattta

SEQ ID NO: 685123 - DNA, 629 bp, Homo sapiens
ggacatgggagttcagaaagcctttgaccagtgctagggaaaatatgaatattgcctttgtagttttgccacactcatattaaggaaatttggaacctagtggggttttagttcacgtaaggagcaagaaaaaacaaacaatcccatcaaaaagatgggctaagaacatgaatagacaattctcaaaagaaaatatacaaatgggcaacaaacatgaaaaaatgctcaacatcactaatgatcagggaaatgcaaatcaaaaccaaaatgcaataccaccttactcctgcaagaatggccataataaaaaaattaaaaaaatagaagatgttggtgtgggtgtggtgaacagggaacacttctacactgctggtgggaatgtaaactagtacaaccactgtggaaaacagtatggagatttccttaaaaaataaaagtagaactaccatttgatccagcaatcccactatggggtttctacccagaggaaaataagtcattatacraaaaagatacttgcacatacatgtttatagcagcacaattcgcaatcacaaaaatgtggaaccaacccaaatgtcattaaccaatgagtggataaagaaactgagatatatatatatatatat

SEQ ID NO: 685124 - DNA, 629 bp, Homo sapiens
ggacatgggagttcagaaagcctttgaccagtgctagggaaaatatgaatattgcctttgtagttttgccacactcatattaaggaaatttggaacctagtggggttttagttcacgtaaggagcaagaaaaaacaaacaatcccatcaaaaagatgggctaagaacatgaatagacaattctcaaaagaaaatatacaaatgggcaacaaacatgaaaaaatgctcaacatcactaatgatcagggaaatgcaaatcaaaaccaaaatgcaataccaccttactcctgcaagaatggccataataaaaaaattaaaaaaatagaagatgttggtgtgggtgtggtgaacagggaacacttctacactgctggtgggaatgtaaactagtacaaccactgtggaaaacagtatggagatttccttaaaaaataaaagtagaactaccatttgatccagcaatcccactatggggtttctacccagaggaaaataagtcattatacaaaaaagatacttgcacatacatgtttatagcagcacaattcgcaatcacaaaaatgtggaaccaacccaaatgtcattaaccaatgagtggataaagaaactgagatakatatatatatatat

SEQ ID NO: 685125 - DNA, 1361 bp, Homo sapiens
tggtttactagatggagttaaggagatggcatatgtatacatatgtaacaaacctgcacactgtgcacatgtaccctaaaacttaaagtataataaaaaaaaawaaaagtacacagcatgggcaaagacactcaaaaataaagggctggcttttggaggaagtaaaccatcctggtgtgaggaaagacccatggcaatgatgtaaaggaaaattcaactcagattctggaagcctttggatatctatctaaaggatttggaccttattctgatagatgtaggaaaacaactaaatctttaaggaagaatatgcctgcttggttttttgttcatagatgtatgcaggtatgcatgtgaattctttcattaacgtttcatttattccctatcttacctctgcaaaggatctgaggtttataagaacagaaacctatagcatctgaaagaacagataggtaagaatgtcaaaggtaattttgaggagtacaagaaactagacttatgaaattgataattcatattttcaaggcaaaataatctcaaatgtagtgaaggtataagaataaacataaattggtggttaagaacagacagcaaaaagtagatcttaatatacataatgatgtaatatataaggagtcataataaatatgatttgaatatattataatttataaatacatgtataaatgagtataataagtatattgaaagataatcacatttatcacaaagctcagtatctctaggtttatccccactcactgcagaaattcaaactgtggaaccctcagcaagtgtcttacatgctcattttatggactagtcctttaagctataacatggcatatattactggacttttgtttgtttaaggcctcctgatggaatgcctagtgaaggcaatgccacagctaacaatgatccatgcaaaagctaccctggctgcagccacccgtctgtctgtctgcaggcagccagttaaagtgatgaggctaagctgtctgcatggagggccctggcatgtgtcactactacaggtcttagtcttagtgctgcctacaatcatggtaggtgtccctagcacatctcctttggaacactgtgccatcaataagttacagagacaataatggaaaaaaaaaaacttggttttcagtcttttatttattgcagcctcctcaaccatgagccagcaaaaagaaagtgagtgggagatttgttacattcagaatcttccttgcgttttgacaactgtccttgagccattgtggcctcttctctctcctcctccttctctctctctctctctctctctgtgtctctctctctttagaatttagtactcaaaaagacttaga

SEQ ID NO: 685126 - DNA, 1062 bp, Homo sapiens
ttaccctgtgccaagatattgaagagggggattcccacctgtatacatgagttaccagtgagatgtctgctgtccctttccatgtggccccttcataactcacatctctctatttctgttccagtcttggtatacgagcctgttccttaaaagtggtgggtgatcccatctgtaccacgcagctggcttcactgagagtgacctcactgcctcccagtggcatagccaggaagttgggctcagctctttgttattctgggctcttcaacctcttctcctcccattccccagtctgagggaataagttctagggtgaggttgagggtggagttggggaagcctatccccttgtgttgtttcaagaggctttttatctaccctctccctttgaaaaacaggtttcttaaaataaaaaacaaaaaaagacctagaagggaattgttttgctgacaacatctgccttttaccctattatataccttccttgagkcaatgagcacagagcttgtattaataggaagaaagaataggggaaaatgcaaaaacgaaaaaagacataaattagagttgcaaagtcttacccagacacacacacaaatagcaccttcctgggcttggaaaggaggaagtactctgcaggttaggcacaatttcaggaggggacaagcatgtgtctatctgccccagcggccagaggggcatttcagcatggtaattccaaggcagtcttagaccctcaaataatgggaggcttggagctctccatcatcaatgaatagaacctaaaacacacaactgacctcataagcatggggctgggaacaggcagtcaggttctcccaagagcatcaccagcaatggaaattgctacacagagatatcagggtgtgggctctgtttccgtgctcaaaaaggacaatgttttagctgagacacaccgcattggacacaccaaaggaggggattgatgaggagtatctaggacacacgaggtagggcacagagtcagggtaagaggagcccccgtcagaaaactgtgggaggctttggtcccatactccc

SEQ ID NO: 685127 - DNA, 1873 bp, Homo sapiens
ctatgtcatgcagcatttgggaaataatttgtatcaaaataaaacttctgatagcttgaagaggtgccaagcattccctgtagcccatactttaagcagatattatatcacagtggaaatacaggcttttctcaatccatcctatttcagtcaagtcaaattgctctgtgttcataacatgctcaaaaccatattcactttattgctttcttgaagaaaaccttaggtaaatttttttttgagaaaacatacatagctaaaaaggttttcctcactcctccttcccttggatccctgctttgaaataaaataaattagtggaagaactgaccataaagaatgagaaagagcaaaaaaacaaaagaatgactcctctgcaagagctcttcaagtttggcattaaaaaagtctctgagaaggcagaattgactacttagagaaagtattatacacaaatttatattccaataaacagtgatgtttctcaaagtagcctttttaaaacaaattcttagctctacttaagaaaagtataaagcaccatctgaagaagaaaacattttggaagaataggtttgcatcaaaaccctggaaaatactacatcctaacctaaggatatttagatactgactaatggtatttaattttaattaggaacatatgtgaactgaaaacaaggacaaawagtgagacccaccctttatgtatcctctgccaagaatgccttccccacacataccaaactaagttaggagatccctgctcttctcccatctttttctttttcttcttgccacttagcacaatttataattgggcatgacaatgtgtgatgtcttgtttcccccattagatagcaaactctatttcaccactatagccctactggctagcatagtgccttggaaaaatagtaggtgttcagtaaataattgctgaatgaactaaatggataaatgaggacgtgtggattccaggtgatgggtgcagcttcccatttgatctctcctgttctctagcaatttctccaacctttgagtggagaaagtacttttctggtgtggtacaggatggtcaatcagcttgtgcacacaggcaaaataccataaccacaaaaacctacactgagtatgtggacatggtatgtgtctgtacaaacttcaggctgcctaaaccaaaaagcagagaaatactggctgcctgagcaactcatattttttatttcaaatgtttgtcccctactgtcttaattagtgtcatttatacatttagttagaagagcatgtaactgaacctctcagcttagaaatgcattttaaaactttttttgtcccctgtcttaaactacagccttaaaatgtaccttaaaattcactgtttccctctctttcccactccctggcactctgcacttatctaaccatatgcttgcttagaaattcaaggggtaatcttgaaatgaaccaggcatgaagacttaggtatggaattctcccccagttagaggtacctcaaggcagtgaatctacaacccagccgcaaccaaaatggcaccagctctcactccaggcgtgtaagaactgaagacggccatcagaaagtgacatgcagacccacagcatgcaccactcctgcgtgtttcccatacgaagcttccctcttaaactccttcactccgcctaaaattttgagatggttcctttgaggcttcagcctggtcatgtcttctgttggcatttgaataaaactgccttccttgcaccatatctcacctctcatgtatttggtttttcaggtggggagcagctaaaccggaattcggttacaagcagtacaaattggaagctgtgtattatgaacaatactacctca

SEQ ID NO: 685128 - DNA, 635 bp, Homo sapiens
ttatagttccaaatgtaacgaggatgcatattccttcttggtaggccattttaaagtcaaacttccacagtaaaagcactcttacaccatgcttgtgatcataaataaaacataatataaatatagcctactacttaaaaaagaaaaccaacaacaaagtttcttgaagacttgattgtaaccattatggggccatttgagtagaaagactaaccaaaactcaaaacttttacagttagacagtggatacattcaaataggctaatagccaaacayagacaatacaaagaattaaaaaaacttctttctttgctgaatattctccttttgccccttcagaatcattctctccctttctcttctctgctgggctctgccctgagaggctgacctgcacagcctgcatcaactgggctcacttaccttctggattctcgtaggtttggccaaggggaggcaagagatcagagggtaagaggagagcaaagttggggtattcatctccttggattcttccctgacagaccacaagcagcggctgcattcctgctccagctgggcattccctccgtcatatgttcagctcctgctagtttccaggaacatgattccctcctcttgcccttacatgcttg

SEQ ID NO: 685129 - DNA, 2039 bp, Homo sapiens
ccccatgttgtttaagggtcaactgtaaaaggaatagtaaagcacatattttgcatctaactttatccctagcttcatctcaattttaccatcttacttttcttagcccagagttcctaaaacttgcctacataaaatatttatgaaaccatagactttaccaaagagcaaaggcttactgggggtttgcaaggacacatctacaaaacattgataatcatacctaccttgcagggttggtgagaattaaatgaagtaattaatataaaataccaagcacagtacctggtacatagtaaatactgcatacatggtagctgttaaatgtatgccttcagagagctccgccaacccacatagaagggtaaatcacattacttctgatttctccagccctccttgcagataggtggaaaaacccctgaagatgtaaaaactctctcttgattacccagatttcatcttgtggaactgagtcctccctgtgggaaatactaggccactctatacatttgagtatttttttttcctactcctctgtttgtgggcaactttctgtgtggaataggaccacgtatccacacaggaaaataacaaggtgggatttggagtggggagaccattgggcttctttcctttgcctttgaaagtgccactttcttgtcatactgggcaatttccatgcaattcttaaaagttcattttaattttattccactgagttttggggcaagaattttacaaattgagatgaatgatttgaagttagttgatgcttatcaattgatgctattttagcccacagttcccttcataaaataatatcttttctgacttaaaaaatgactggtataagacacccagatattttacaattctacatgctatagcaaagaatcaaaatggtgtacattctacacttgagagaaatgtgaaaggagagttgccaacactaaagcagcagcatgagtaagaaagagaaagagtgaaaaatacacaaagtgttaactggcaagtcaggagctcattaggcctaaccttgttcttaactcagactcttcatcataaacccattttratgaaaagaaattcggaaactaatttttccccacaacaaatagaaagttagtattggttttagctgggcaaatgtagtgatatttctcccttccttaatgttcctcagcagtcccaatggccggtatctagcacctcagagcaattttgaagccttttctcctgtaaaatacaacttctattcacccatggctctaatttatccacatttttgaaaattcatatcaataaaatatactgtttttcctgtctgtgttagcttcttcttgctccttatccctttgtctgtgaacctcctcatcattttttagatcttggctttacatcactctctcaggaaaccctcttctccccattcctccttcacccccaaccaggctatttaggttctttgttttatctcatcaaagaatcttgttcatttctatctccccactagaccataagcaccatgagagcagggacatgtctacttctgcccactccccaagaacagctaaaagagcacacccgtctatgtagcaaaatagtgggaagattcatgggtagtggtgacaagccctccaagcctggtgatagctggttgtccaagatagaatcttagttcaactttaaatttacctacagaaccacttaattcccctgtaaatttaactgttagtctaaagacggacagctctttagacactaggaaacaacctttatgtagagagtaaaaaatattatttccataattggcccaaaagcagccatcaattaagaaagcgttcaagctcaacacctaaccacccaaaattctaatcgcaccactgaactccttacatcacattggactaatctattactttatagaagcagtaatgttaatataaataaccatttatctctagcacctagcacagtgtccagcacatagtcgacatccaataaatattaattaaaaggatatacttctagcttat

SEQ ID NO: 685130 - DNA, 663 bp, Homo sapiens
agttcactggaatcattttagaaatttctcctgactagtactgtgtagagaagacattccttagttggttgttggattttctataaatactttacacagctcaaagatatatctgattaaaacctctttaatccttyagtgaccacattaaaagctatactgagtgctttctttcaggaaacagaacaccagatcattgaagatttaattttaattcctaagattcagtttacttcctaagattttaaactcttcctaggcatttaatttcaagaatataacttgagtctacttcaaattattgagatttaagatctgtaaataactaatatttctgattgagtctagtaacaataatcatttgtttctgtcagttattctgttcttctagaaatcacaaactatttaaatttagctaactctcagaggatctatgggctagattgcaaaacaaaacaaaaaacaaaaacaacaacaacaaaacaaacaacaagaaaatacccaaggaactaaaagtctatagttttttgttttttgttcttttgggagagtctcactctgtcgccaggctggagtacagtggtgcaatctctacttactgcaacctccaccttcccgggttcacgtgattcttgtgcctcagcctcccgagtagttgggact

SEQ ID NO: 685131 - DNA, 758 bp, Homo sapiens
gaataaatatttgtgggctcctttcaatagttggttataatgaatttccagaagtagaacacgtgattatttacaggtttatttatattaattggatggctgccacggaaagatatttccaatttccattccctctagctgactaggagtctgtctgcttacctgcatagaaggtaaattttccttattctaacagaaacatacatgttaattgaaataaccatgacacattattaaagctaataatttaaataccttctctttgcctttcattacattattttactattgtctaaaacaaccagcaggatttacaatccactgcagtttgctagagctttacaggactcaggggaaattacttatgctttcagatgtctrccttctccagagccacaaggtctccactgagtgaaatttggactctggtggctttcaataacacaaaaccaaacttgtaaaaatggctaacaagtgctggcatatggaggaggtctgttcatgtagttggaagtaaaatcattagacaactttgtctttttaggttatagtgagaacctattattatctaagttcataaaaacctgtatgcttctcctgtttttaccagctgggaatatgaatagaggtatttcactgaagttctaaatgttggcgttactgtaattatggtggttatgtgagagtaagggtgctagttaatctgggctgctgagactgtttgatgaaattatcttgatttattataagggtgaatc

SEQ ID NO: 685132 - DNA, 585 bp, Homo sapiens
gatctatttcaagttaatttttgtatattatgtgaaataaagtttgaagtttattttttacagttgttccagttcatatttattgaaaaggcacacctttattgaattatcttgaaaataagttgactataygcacacagacacatgggtttatttccagattttatctggaattttaaaattccattctttttcaccgatttatatatgtattattatgccaatactatacacggttaattgctgaaactttaagttttgaaatcagctaatgtaagccttcaactttgttctttacaaaattgttttgcaggaaatactgagcttaatgacttctgggattatttccattgctaatgtcaaaacaattaattgccataaacagaaaaaattgagttgaacacactatctaaatttgttaaaataatctcttttagaattggaattgttaagagaaaaatgtcgtgttttataggaaagatacaaaacaaggctacacaaggctatgtatatatatgtgcgtgtgcatatatatacatatatatatctctgaacaaatttacatgttttgataacaaatttaaa

SEQ ID NO: 685133 - DNA, 911 bp, Homo sapiens
atgaaaacttgcttaggaccttcctcctccttgcccaataaagcttgataacttatttaactcaggcccaggaccattataactcaacaacttgttctgttctcagcggttagtacaggcttaattctcaaacctttctttgagatgtggggaaacatgagccttctattctgcaaagaaaaggaagaaggcaaaacagtttttgtattaactagcaacaatctagatgctagattggatcatctctaaggtctctttcagctgtgacatactataaatttgaagccaagagcaacagaaggttgcttttctttctggcaacactatggtgagaaaaccttagcctttttaggacttggaagtattaaaacttttagactccaaggtacaaaaaggaatgaatggtagcatgtaacccaaatctttgggatcatggtttggtggattttttgtaccaaactgctatgtgccactatttagaatgatggtcttggaaaagccagtctgtaaatgtatttcttatgaatttgatggttatctaacttaattagcatgctgattccttacttttagagttcccaggaattattggaaggggtttatgtgggcaagtgagttaggaaaaaatgacagagaaaccataatcaattacttcacggtwtgagagtcataagcaaacatctgagaccttccctctatgtagactgacattttcctttatagctcagtctgtttaatctagtttcacaatgctgcctgaatcatgacaagtattgccattctgaatttgttcagccaactgaaataatctagaaacatctgtgggccattccttgatgcagagagaacataggatacagtctttgactcagtgctttatgcctgttttgaagagagcttagtttttcatt

SEQ ID NO: 685134 - DNA, 661 bp, Homo sapiens
tggcttattgagagacccaaacttacttcttccaacacagcacaacctaacrtgatacttaagaatgtcttctatgtattataactgactaggttcaaatcctagtccttcatgtaatccttttaaaccttagtttctttgcttcatcatggaaatagtaagacctaacttgtagtgttgttgaaggataatagagcacataaagcaattaacctaacacttgactcttaataagggcttcatacataatggctatcatatttgtggtttgtctcttcctttcatgctttctcctatgcacaaaaccttgtggattaaacaactccatggactttgtgaaggaaaatgtttgcagaacctctataacagatgatcattggaatggagcctgcagtttccctaggctagtcttctagctaaggatctcctttaccaattcagatgaggctcaggaaagtctgaaaccacccaaagctaaggagtaagggattcactattttaggacatagggcagatgctgcctgttctctctttatatcccttgggtctttctactttaataatcttcagttgaattctaactgtcaacatctacatctctccctccaagggctttcacagaagctggagaaggtctcttggcaagataggctaggagtgc

SEQ ID NO: 685135 - DNA, 661 bp, Homo sapiens
tggcttattgagagacccaaacttacttcttccaacacagcacaacctaacatgatacttaagaatgtcttctatgtattataactgactaggttcaaatcctagtccttcatgtaatccttttaaaccttagtttctttgcttcatcatggaaatagtaagacctaacttgtagtgttgttgaaggataatagagcacataaagcaattaacctaacacttgactcttaataagggcttcatacataatggctatcatatttgtggtttgtctcttcctttcatgctttctcctatgcacaaaaccttgtggattaaacaactccatggactttgtgaaggaaaatgtttgcagaacctctataacagatgatcattggaatggagcctgcagtttccctaggctwgtcttctagctaaggatctcctttaccaattcagatgaggctcaggaaagtctgaaaccacccaaagctaaggagtaagggattcactattttaggacatagggcagatgctgcctgttctctctttatatcccttgggtctttctactttaataatcttcagttgaattctaactgtcaacatctacatctctccctccaagggctttcacagaagctggagaaggtctcttggcaagataggctaggagtgc

SEQ ID NO: 685136 - DNA, 625 bp, Homo sapiens
tattgcccaatattgtagagtagttgagaataatgatgattttgtaataaattatcattgatgaccttggagcaatttcatttgattggtggaaagctagattgcagtgggtcgaaacaattaaaaacaaacaaacaaacaaaaggagtggtagcttggtgaagaggcaggaaagctttctataggccaaaataaaggaacagaaggttaaaccaaagctgtaagaaaggaatcagaattgaaaaagtaaggtctattagaagatagatacagtcttgaatgaaccttttcctctgcaactacaaggtcttcccattagactgcaaagtcttgaagatttgatgcctgagatgtaagaagtacttaataaatgaaagatgactattgaataaatgaaagatcatagagaaaaagttgaaaatacaaatatgcttggagacaaagcagagggaagttgataggattcatctttgttttcttttttcctctctgaggtagaaagccaggggataaggcctttctccaacttaccttaaagcattgctgtgaggaaccagtgggaagatcgatgtgaaacattsttaaactagaaggtattggtcaaatggaaggaagtaatacttca

SEQ ID NO: 685137 - DNA, 627 bp, Homo sapiens
cctggtgcctgtgcccttttgctggagcagccacagacaactgcctgatggagaaagaatgaacgctctgccttgcttatgctatcgatgggaataaagctaactgtgtttcttctattatatgggaaacctggattaatcaagctgtattctagtaccaagagtcgtattgtctcttgtggtctgactcatcacatgtaaacgtactgcagctttgctattaatgcagagtggtttttttttttttgtttttkttttttgcccctttcccaaacactgaaagaattgttaacctctgagcttcattttcaggatttgtgctgagctctagatcttttttctgtgaatagtatctgcattaaaccagtgatgaagaaatgaagacaaattagaagtggaaacagaatagtgagattttattttttattttcaattataagcaaaacagctactggtaactatatgaccttgcaggcaagagtgggtatcgctgtgatcatctctgtcacagcagttgtttctcatttcattctatattgtgtggtgttgtgtcaccaaaaacaatgattgttttgtgcaagtaaatttcagagatagagcaataagactattttggtagaggaaaaa

SEQ ID NO: 685138 - DNA, 819 bp, Homo sapiens
gttaaggttaattaaacaaaaaaattcaggtgctacttgtatggccaatatagagacttagtgatgctactttcctacaaaaaagtttcacaaccacttttctttttaacagggcaaattttagaactttaacagaaagctgcatataattcatacaaaggtatacctcataaactacatctattaagttttaagggctcaacttgataactgagtaacttagtttctgtctatattctcatgttgcattcttaatggcttgtaaagattcagctaaatttatggattgaaaattccaaaatcaaatgcatacttttaaaaaaatgtatatttttgaattgtcaaataaataacaatggccaggcgtggtggctcacacctgtaatcctagcactttgggaggccaaggtgggcagattgcctgagctcaggagttcaagaccagccgcaacatggtgaaaccccatctctactaaaaatacaaaaaaaaaaaaaaaagggtctggtgtgctggtgcatgctgtggtcccagctacttgagaggctgaggcaagagactcgcttgaacctgggaggcagaggttgcagtgagccaacatagcgccactgcacacggtctgcaagactctgtctcmaaaaaaaaaaaaaaaaaaaacactggattaaccaaaaggaaattagaattggttgatgattaggtagggcaaagtgtatgttaagttggggttacttgttagaaatgcaatttccctagccaactggatgaattctcctttcttccttccaaagaagacaggtgtcatttcctataggataaaa

SEQ ID NO: 685139 - DNA, 965 bp, Homo sapiens
tgttgtgagtgtgtatacagcacatagaagtggctccagtaactcacactgtactgttccgtgtggtaccctgtgaaggatggtagtgattttgccctgtgacctgctgcagtttggagctgttagactaagtatggattctgatgtgatttkcatgataaggccccattgggagagaagggttctctctatggcttgtgggccgtcagctcagtgtgggagtccagtgtacaggtttgtgtcagatgcgggttccaaagtcgtttgtcacccgtgaccatgaagagggagccccacgcccagcactcagccctggtctgcacttcagtctttgcatctcaaatggggcaaagacgccggctccaaagggtgttgcaggccatgtcgtaaagggctggtaaagggctagtgccactccgagaacccagcgtgcacacaccacatggtgtggcgctcactcactgtcatgagttttctccaccacctctgatgctaggggagaggcagagtgacacgtccacagtccatgagttagttgaagtctagcttcccatggaccacgtggcagctcaggccctgagagttcttgctcttctgcctcctgttacagactgaactctttgtgtccccccaaaactcatacgttgaaatccttacctccagcatgatggtgtgaggagggggctttgggaagtgtcaggtcatgagggcagagcctttggagtgggattcaccatgtgaggacacagtgagagggcactgtctgcaaactcggcctcttcagagccctactgtgcgggcaccctgatcttggacttccagcctccagcactgtgaggaatcaatgtctgttttttataagccatccagtctacagcattttgttacagtagtctcaacagactgagacatgtccccatctgtagacaggcagcgaggctgcagtaggaggctgaaaaggtggg

SEQ ID NO: 685140 - DNA, 2424 bp, Homo sapiens
tgagatatgtataaatattatatccttatagaggaaaaaaacagagatttaaataacttgtccaggatcatccaagctagcccgtggcagagctgggattcagactctgaaattctggctccaaagccgtgatgctggtcttggccatggtagcttcctgttcatatgcactctactactccttctcacatgagcagccgggggtagggagagggcaggcagggatcttcccacacactgacagggtccggacaaaccccatgggcgtggtacccccagccgtgttgctgtgtccggcctaccagagtgagggcgtggcagtatggggcctggcctttgctcgctcttggtgtccagtctgccatgctccccctgtcagaagggctaggctgctgttgatgtctgcaatgtagtrtttgggtatccaagattgatatatgcagttgcaagagaatatctgtctgtggtcaggttccctagaagcagcatctaaggtaaaaattcttgtgcaagtgatttattgagggaatgttccagaaaatcatgcgaggcagtaagggcagaggaaagcaaagcaaaagtaaaggttcaggagaagtctagcctggggctgctcccagggtgggttttggagtattaactgcaccctccaattatacctgcctgtccccacctctgtcagcctttggtttcagtggcccctggggtggggtggaggacccaccaggcataatccctcggcctctttgtgtacaggagctcttatccatccacagcaagcaaggatgggacagtgcaggccgttatcatccagcccttgctgcagctggaggacagggcaccagccacaggggtctgagcagggcacccacagcatctgtccagagacctgcaaagacaggaatgcaaagaaggcaattaagtgtcttaagaggaagctggggttatcagctctctcacaagagctttgtccactgtccagaggtggtcagggtgggaggggagtgaggagagaccagctgagcacacacaccctgctccccacagatcaacccagaagaccctgggttgaagcatctctcagccacgccctgtggagtctggctgggctttagcttgcagaaagctccagaacatctttgaaaggcaatggggcgagggtcaggccgagaggcaagttccagttctggcagagcatgcatacagagtaccattcttacacagccactcttaacgcacagtgacatgcacccacccatgagcttatccataactctttttgtacatgtgttttttttcctggcccctaacaaaagcatttgttgaaaaactattgataaacaagcaggccccaaacaattcaaacatcttattaaatacagtaaatctgaggcagacactagagtagcccagagtcatgagctacaatgggggcagttcatgtctggcagccagaatccccttgaactgatggctggacgcaggctctacctgggaccagcttgaagtgctatcctgaagctgcagactgcagggccggccagaccctttttcagcctctcctcttcccacctctgtatcccacacaggcatctggtgatgttctccaggtgtttctgtggcagttctgggagctactgggtgattgcaagattagtttttttttctaagttgactttctatgtggtgcctgaatgacgttttctttttttgttcagtaggaatccttttttatagaagtaataaagtcattacacttaaaaacaaagtgaaagtgtggtgggagtgggtgatggaaaatcgagcagctggtaggggacacaagctctgcaattccctctgtgtccctggaatagtggcctccccactctgaactcatcactaatctgagactccctgcttcttcctcatctgaaggttggagacaaggctggagcgcccagcacagcaccccttgtgggacaccttcatcactgcctcaggtccgaccacaggaactgtgaaatccttccttttggccgggcgcagtggctcatgcctgtaatcccagcactttgggaggccaaggtggatggatcatgaggtcaggagttcgagaccagcctgaccaatgtggtgaaaccccgtctctactaaaaatacaaacaaaaattagtcgggcatggtggtgcgcgcctgtaatcccagctattcaggagggctgaggcaggagaatcgcttcaacccgggaggcggaggttgtagtgagccgagatcgcaccactgcactccagcctgggcaacagagcaagactctgtctcaaaaaaagaaaagaaaagaaaagaaatccttccttttgcagctgctggtgaagaatattcagctggaggatggcaaaatgatcctggcctcgaacttctttaagggggcagccagcagtgtcc

SEQ ID NO: 685141 - DNA, 587 bp, Homo sapiens
ttaaatgcttacataacttccggtgggcatgtggagttctgattctgtgccactgcattcyggcatcaggaattcaatttttaaaagacttttagctttaatatctgataaggcaaatctcattccctgctgctctggttttcttttcaaatatttattgccagaaaatggacatttttgcaatattgtgtcttcctatccagggacatgtatacatatatctctccatttactaaataatttgtgcttctcaggtaatagttggagccctctgactttaggtcctgtatgtgtttccttgtttagtttactcctaggaatttctaatttcttattgaattgtgaatggggccttttttcccccaatatattttgttacgactattttggggcacttggcaagccgcaaagttttgtatatttattttgtaactggccacctcactgaattctcttttcaacttgaatagctccttttcccctgtggttttctctggatgtttgacttctgtgccttttgtggcagaagccaggctgtccaggctgagtcccagcactcttggggggacggctgaccctcctggaat

SEQ ID NO: 685142 - DNA, 587 bp, Homo sapiens
ttaaatgcttacataacttccggtgggcatgtggagttctgattctgtgccactgcattccggcatcaggaattcaatttttaaaagacttttagctttaatatctgataaggcaaatctcattccctgctgctctggttttcttttcaaatatttattgccagaaaatggacatttttgcaatattgtgtcttcctatccagggacatgtatacatatatctctccatttactaaataatttgtgcttctcaggtaatagttggagccctctgactttaggtcctgtatgtgwttccttgtttagtttactcctaggaatttctaatttcttattgaattgtgaatggggccttttttcccccaatatattttgttacgactattttggggcacttggcaagccgcaaagttttgtatatttattttgtaactggccacctcactgaattctcttttcaacttgaatagctccttttcccctgtggttttctctggatgtttgacttctgtgccttttgtggcagaagccaggctgtccaggctgagtcccagcactcttggggggacggctgaccctcctggaat

SEQ ID NO: 685143 - DNA, 587 bp, Homo sapiens
ttaaatgcttacataacttccggtgggcatgtggagttctgattctgtgccactgcattccggcatcaggaattcaatttttaaaagacttttagctttaatatctgataaggcaaatctcattccctgctgctctggttttcttttcaaatatttattgccagaaaatggacatttttgcaatattgtgtcttcctatccagggacatgtatacatatatctctccatttactaaataatttgtgcttctcaggtaatagttggagccctctgactttaggtcctgtatgtgtttccttgtttagtttactcctaggaatttctaatttcttattgaattgtgaatggggccytttttcccccaatatattttgttacgactattttggggcacttggcaagccgcaaagttttgtatatttattttgtaactggccacctcactgaattctcttttcaacttgaatagctccttttcccctgtggttttctctggatgtttgacttctgtgccttttgtggcagaagccaggctgtccaggctgagtcccagcactcttggggggacggctgaccctcctggaat

SEQ ID NO: 685144 - DNA, 618 bp, Homo sapiens
aattatgctttttctcccttttgagaattattttgtgatatatatgtgtatataacatactgtatacgcatgtacatacagacacaggcattttcccaactaatgacaaattctgccaaacacacctggaataacaataagctcatgtggacatcaccactaacaaattaaccaagtggtttttctaaaggtaccaactagttgattatttttaatcagtcatatacccccttgtcttcccttcccttcttaataacaacatgttttggttaattttgttaggtatgagaatttttagttgaatatcatggattatatcagttgttctcaaaatgtgggtcctaaataagcagcataggcatcatttgggatctttctagaaatacaaattcaaccccatcctagacctattgcatcagaactctggggtgagacccagaaatcggtgctttaacaaccattctaggtgattctgtttctggctaaagtttgagaaccacaggattagaagaaaacttcacattgtgatgaattgtctrggaaaatttttagtgagctaacatgaaatcaatatttttcatgttaatgtggcattgaaatccacaatcaaaacttaca

SEQ ID NO: 685145 - DNA, 1176 bp, Homo sapiens
attgtaggcaaccagtgatgagttgactctcagtcagtaacgcttgttggggttatcagtgaggcatagtagttagaagctgaggctgtgggcacccagtgcaaatcccagctctgctacttattagctggttgttcttgattaaattacataagcattctctgccttaattcctcatctataaagtggggataataattgtatctacgtcatagaattgttgtgcagattaatccacataaagcatttaggacatgcctggcgtagactatttccctacattccatggaagaaagtgcttgggaaaccatttcttggtgtagtgaattcaaccaggccatgttcccaggtcactatttgcttatttggttggtgttttcaacaaagacttttaaaactctaggagagcttacctttctcatcttctttctccttcgtgtctttttctttttgtgaatgatgagaatgtggatgagatctttccaatagacattttgctttcattcattttccactcatttcctctccacattttaccccaaaataaaagtgactcttttgaccttgactcacaatacattcacaaatatcaggggatcttctgcagctaccagctatggctctcaagtacttgcttgcctgatttcatgtgcgggggtggggagataaataaataagaaaatatttgtttttattgctatgattcttagagctcaaaacagcctgttttataaatcatctttcttttaaattttgatataataaatactattaaaagcagtacctggtattgacacatttaaaaattctcttcttagtaatttcaagctatatattcccattgcaattcttactttgaaagtatgggtttaattagaattacaataatcctgtaaacatgttgtgacatctttccctgtaggctaatcaagtaatactcatctgaaaggcgcaatgctataatgcatttttctttgtcctttcagcaagcagaataaaaaatgtattttccacaatctatttaactagatatttgattaacacatttttcattgtattgttatcgtgacagcaatggatcctccagcaatttagcataatatatgaggagatggatcattcwaatgtgttggttatgttttcctcacaaaaaattagacatcccaatgtagagga

SEQ ID NO: 685146 - DNA, 671 bp, Homo sapiens
tcccagcttcttgggaggctgaggcaggagaatcacttgaacctgggagacagagattgtggtgagctaagatctcaccactgcactccagcctgggtgacagagcaagactctttgtcaaaaaaataaataaataaaaataaaaataattaaatcaaaagtcaaattaaaaataacaaacttttctttttttctatttcttatgtcaaggccaatggtcctttgtttgtgaatttcaaaattcatagagaataaggcaaatgacaagggaagaatagtgttcactgcatggactacctttgagctcccaacttagtgtttacttgaccagaagttttatatattaarcatatattctagaagttaaaacttgctcagtctctggatagtaagtttatggggtttttaattttgtcaattttgcttatttgtatgtcctagtatttctgcaatggaagcagttagtagcaaagaacagcttaatatttttcaatgagcaaagggatgtaatagtgtcagtcagttagaccataccactactaggttcacaaaaataaaaggattctcttttagctattgcattaagttcaaacttctctacttaatccagcattaccctctccatctaattccatttcccacacatttaagaagcacaacttcactccagt

SEQ ID NO: 685147 - DNA, 2091 bp, Homo sapiens
tatctccttccaagtgagcacagatcttgtcacccttgaaagtccctattaccccagcatgccgaatggtgccttgtacacagtaggtggtcagttaatctctgttaaaggaagaagccatgatctgtgtggtgttgatgtgttatggtgtctggtgaccatgctttggtgtgtctgagagcatttattattttggactatggatgcactgattaaaacatgttctgtaataacagtatgttttaccttcaccgaatacaagattcttatcttcaagtgtgcaataaaaatgcagaaggtttttttcatcatttataaagtacctctgtaattaactgccaacacttcttttatactctgccaagaaaataataacttttttgctggaaaatgtaaaactcaacccaaaatggggcatctatctatttcagaagccccttggtgatgattgttgtggccctaattaatgacggctttctaaagtgagaggtaattgctgacacacataacgcaaagggttcaatgaggaatatgagcagtaatgaatattcacttcgaagcctgcatgacagagtgcttagattacagaaagttgaggaactatcctgaatatggctgataaatgggattccctttctgaccctcacttccatcagtacttaagcagtatcactttttaacacctcagtttggaagccttgcctctaaaagtcaaagatttatggtgagtgaaaaatgtccatattaaaaaggtaagaggagatccagatgatatccacttttgaccactataattaatagctgaatcttcggtggtaactaattgaatggaggtcagtgtgttgccatggtaatgtcctagccaagcaattttacccattttccagtctgctgcccctttgcataactgaagttataaaatgctttaattgcaagatttgcaaatgatgcaacatctgggcttgaatttacatataaagggagaagtttaatggagttattagcatatctgtgtgaacgcctcgatttttatatttaattataaaacctgcagtttcactgatgaactctgtgtgtataattwaaaaaaaagcaggatagtaagatataagaatcagcattttcctccatttcactttaagaaatataatttttgaaatagtaaatcattactttggctttgtcgaataatttgagaaacttagtagatggcaaaattcactaggcatttcaaaacctgcatcattctcatgaatatatatttaatattcatatatattatatatattttactatacgtataagcagagcatgctttagaaaattcagcagacaaatatcaaaagtaaaataaggtagttacttcacatttgcaagagaatataagtttattatctaattataagcatgtgagaattcctatgacagtattactcaaaaagaagacaatatataggttttatgaatgaattaattgatacataatacagataagcaatatttctacaataatgttgacctaagggaagatggtaggatgtgtgtgttagtaagtttggtgtaatttggtatatgtaaaacaaaacaaaacaaaaaaagcaaaatggtgtcattagaatcaatttatagggctactgaataatgaaattaactctctcaaggaacctcagaaaatttgtaataaatggcaaatatcatgaatatattttagtcaacatgatagttaaaaagcaactacttataggtcccatatgtagaaaaatattgaagaatagaaatcacaatgccagaatgctagaattaaaaaaagaggccataacccttcattgtttttctaatggtactattctttatttttcaagcatcattgaactctctagcagaactttatgcctagctcttttttttttccaccaaaaccatgactttcagctgtattttccaggatgctgacacagctaattatctgagatttcattactctgtttcaatgtttgcagaaaagttggattacaaaaagcaaaaagtcatgaagtataaagacttaaagatataaatttagtcatatatatcttaaactgctaaattgca

SEQ ID NO: 685148 - DNA, 1289 bp, Homo sapiens
  misc_feature 394, 395, 396, 397, 398, 399, 400, 401, 402, 403, 404, 405,406, 407, 408, 409, 410, 411, 412, 413, 414, 415, 416, 417,418, 419, 420, 421, 422, 423, 424, 425, 426, 427, 428, 429,430, 431, 432, 433, 434, 435, 436, 437, 438, 439, 440: n = A,T,C or G
  misc_feature 441, 442, 443, 444, 445, 446, 447, 448, 449, 450, 451, 452,453, 454, 455, 456, 457, 458, 459, 460, 461, 462, 463, 464,465, 466, 467, 468, 469, 470, 471, 472, 473, 474, 475, 476,477, 478, 479, 480, 481, 482, 483, 484, 485, 486, 487: n = A,T,C or G
  misc_feature 488, 489, 490, 491, 492, 493: n = A,T,C or G
gaatgcactcttttgcgcaagtacaaaattactttcgtatagatatccagtttgttaattatgttttagaaatccaaggagagttctttctaaagtcttgatagggaccaagattgaaggagaagtaactgattttacccaagaatcaagggaaacacatttggaactaaaataagtgcctgaacacatattgcttgatatgagtctggaataaataaaatattttcctgtctgtggtcctttttctccaagatttggcttaaaaaaattttttttgagagatgactaagaaatagaaaaatccacttcctgaactaaattggattttttatttattattatttatattacatattattattattattattattattattattataactggagnnnnnnnnnnnnnnnnnnnnnnnnnnnnnnnnnnnnnnnnnnnnnnnnnnnnnnnnnnnnnnnnnnnnnnnnnnnnnnnnnnnnnnnnnnnnnnnnnnnncttgaggcagcaacattctttaagagcacaatgggaattccaatagattgccaagagttgatatcacacagaacatagtcaattattaaaatcaagtaaataaataagaaattaattaatatttaaaaacaaatttaaaagcaaagcaacatttaacaacttataaagagataatcatagtataaaatataaaatagttttaaacaaaggaagtatgtataagcactgtgtgatgcgtttaagaaaaatgctataaacaagtaggataaagtttcaagtcaaaaagctaaaaaataaaaaaagcacaaacagaatgtaaaaaaggtaaaatcagaaattaatgaaataaaaaataaagaagaaattataaaatgtaaaaagctgatgattttaataactaataaaacagacatatgtgaaaaaaattgagaaaaggagagcaaatgcaaataaatacygaaaggaatatgagaataaaaatattataaatacaatttaattgagagtgtatatgaaagataccgtgaacaatttttgctaataaattaaaaaatttggataaggtacaaaatataaaatatataaatgataaaattgacaaaacaggattttttttatattgacagatcgaagactttaaaaaattgtattaatagtaaaaaaatttctctagcagttttgtaggtgaattctttcaaatataaatggaaaagataattccttttatatgtaaactgtttcagaaaatagaaagaagaggtaagttacgtaactcattttttaaggctaaaattat

SEQ ID NO: 685149 - DNA, 1289 bp, Homo sapiens
  misc_feature 394, 395, 396, 397, 398, 399, 400, 401, 402, 403, 404, 405,406, 407, 408, 409, 410, 411, 412, 413, 414, 415, 416, 417,418, 419, 420, 421, 422, 423, 424, 425, 426, 427, 428, 429,430, 431, 432, 433, 434, 435, 436, 437, 438, 439, 440: n = A,T,C or G
  misc_feature 441, 442, 443, 444, 445, 446, 447, 448, 449, 450, 451, 452,453, 454, 455, 456, 457, 458, 459, 460, 461, 462, 463, 464,465, 466, 467, 468, 469, 470, 471, 472, 473, 474, 475, 476,477, 478, 479, 480, 481, 482, 483, 484, 485, 486, 487: n = A,T,C or G
  misc_feature 488, 489, 490, 491, 492, 493: n = A,T,C or G
gaatgcactcttttgcgcaagtacaaaattactttcgtatagatatccagtttgttaattatgttttagaaatccaaggagagttctttctaaagtcttgatagggaccaagattgaaggagaagtaactgattttacccaagaatcaagggaaacacatttggaactaaaataagtgcctgaacacatattgcttgatatgagtctggaataaataaaatattttcctgtctgtggtcctttttctccaagatttggcttaaaaaaattttttttgagagatgactaagaaatagaaaaatccacttcctgaactaaattggattttttatttattattatttatattacatattattattattattattattattattattataactggagnnnnnnnnnnnnnnnnnnnnnnnnnnnnnnnnnnnnnnnnnnnnnnnnnnnnnnnnnnnnnnnnnnnnnnnnnnnnnnnnnnnnnnnnnnnnnnnnnnnncttgaggcagcaacattctttaagagcacaatgggaattccaatagattgccaagagttgatatcacacagaacatagtcaattattaaaatcaagtaaataaataagaaattaattaatatttaaaaacaaatttaaaagcaaagcaacatttaacaacttataaagagataatcatagtataaaatataaaatagttttaaacaaaggaagtatgtataagcactgtgtgatgcgtttaagaaaaatgctataaacaagtaggataaagtttcaagtcaaaaagctaaaaaataaaaaaagcacaaacagaatgtaaaaaaggtaaaatcagaaattaatgaaataaaaaataaagaagaaattataaaatgtaaaaagctgatgattttaataactaataaaacagacatatgtgaaaaaaattgagaaaaggagagcaaatgcaaataaatactgaaaggaatatgagaataaaaatattataaatacaatttaattgagagtgtatatgaaagataccgtgaacaatttttgctaataaattaaaaaatttggataaggtacaaaatataaaatatataaatgataaaattgacaaaacaggattttttttatattgacagatcgaagactttaaaaaattgtattaatagtaaaaaaatttctctagcagttttgtaggtgaattctttcwaatataaatggaaaagataattccttttatatgtaaactgtttcagaaaatagaaagaagaggtaagttacgtaactcattttttaaggctaaaattat

SEQ ID NO: 685150 - DNA, 1672 bp, Homo sapiens
  misc_feature 1110: n = A,T,C or G
tgaagatcaatagctttcctacacattagcaaagccaattagaaaatacaaaataaaaatcacaatcacaacagcaaccaaaactgtaaaatttctagaaatgcaagaactatattacttatgaaaatgcataaacaaagacctgaataaatggaaagacaagcagtatttcaggaagggaagactcagtgtaaataagcagcgccaggtgaacaattaaaacaataaggcaatcctattactgggtatatacccataggattataaatcattctactataaagacacatgcacacgtatgtttattgcggcactgttctcaatagcaaagacttggaaccaactcaaatgcccatcaatgatatactggataaagaaaatgtggcatatatacaccatggaatactatgcagccataaaaaaggatagattaatgtattttgcagggacatggatgaagctggaaaccataattctcagcaaactaacacaaaacagaaaaccaaacatcrcatgttctaactcataagtgggagttgaataatgagaacacatggacacagggagaggaacatcacacaccaaggcctgttggggggtgagggggctaggggaaggatagcattaggagaaatacctaatgtagatgatggttgatgggtgcagcaaacctccatggcacgagtatacctatgtaacaaacctgcacgttctgcacatgtaccccagaacttaaagtataataaaaaaatgaaataaaaaaaacaagaacaaggcagcttcaggcattctgagatgcaaagattttctggacgttctattaagtggggaaaaaatgtaacagaataatataaaaagaaattattcatttttctaaaaaacaacaaaaccacatacagttgatttttgaataagcaggagttaggggcgctgtcccctgcacagctgagaagccatgtataatttttgactccctataaacataatgactaatagtctactggctaatggaagccttactgataacataaacagttgattaacacatatcttgtatgttatatgaattatatacttcattcttccaataaagtaagctagagaaaaganaatgttattaatgaaattataaggaaggggaaatagttttatagtaggtactgtattatagatacgtatatctgtttacaaaccgaatcatcagtctgaaatggtgggcaaccatagccgcagacctcaatcttaccaagcaattcgactttttcttctaaagtcttgacttttctctgctccttggaagcactactgacatcactagtggcacttcatatgggtcccttggtgttattcaacgttgactatatcacacgggaaatacaggagaaccaccccgaaggatcacttgttactgcaacatgcgatttgctggagagaggaaccactcgcatgcagacccatgtcactgggtgttttcagcggatatttgctctactcctcactacaccgtaacacgagaggtctgcaaaatgattacagtagtgcagtatgtactacagttaactttacgcggttatgatttaatactgcttctttacttgtttacatttctcttgactgcgggtggtgcgatgcatggtaagtaaatgtttatgtgagttttgacaaattttaa

SEQ ID NO: 685151 - DNA, 1672 bp, Homo sapiens
  misc_feature 1110: n = A,T,C or G
tgaagatcaatagctttcctacacattagcaaagccaattagaaaatacaaaataaaaatcacaatcacaacagcaaccaaaactgtaaaatttctagaaatgcaagaactatattacttatgaaaatgcataaacaaagacctgaataaatggaaagacaagcagtatttcaggaagggaagactcagtgtaaataagcagcgccaggtgaacaattaaaacaataaggcaatcctattactgggtatatacccataggattataaatcattctactataaagacacatgcacacgtatgtttattgcggcactgttctcaatagcaaagacttggaaccaactcaaatgcccatcaatgatatactggataaagaaaatgtggcatatatacaccatggaatactatgcagccataaaaaaggatagattaatgtattttgcagggacatggatgaagctggaaaccataattctcagcaaactaacacaaaacagaaaaccaaacatcgcatgttctaactcataagtgggagttgaataatgagaacacatggacacagggagaggaacatcacacaccaaggcctgttggggggtgagggggctaggggaaggatagcattaggagaaatacctaatgtagatgatggttgatgggtgcagcaaacctccatggcacgagtatacctatgtaacaaacctgcacgttctgcacatgtaccccagaacttaaagtataataaaaaaatgaaataaaaaaaacaagaacaaggcagcttcaggcattctgagatgcaaagattttctggacgttctattaagtggggaaaaaatgtaacagaataatataaaaagaaattattcatttttctaaaaaacaacaaaaccacatacagttgatttttgaataagcaggagttaggggcgctgtcccctgcacagctgagaagccatgtataatttttgactccctataaacataatgactaatagtctactggctaatggaagccttactgataacataaacagttgattaacacatatcttgtatgttatatgaattatatacttcattcttccaataaagtaagctagagaaaaganaatgttattaatgaaattataaggaaggggaaatagttttatagtaggtactgtattatagatacgtatatctgtttacaaaccgaatcatcagtctgaaatggtgggcaaccatagccgcagacctcaatcttaccaagcaattcgactttttcttctaaagtcttgacttttctctgctccttggaagcactactgacatcactagtggcacttcatatgggtcccttggtgttattcaacgttkactatatcacacgggaaatacaggagaaccaccccgaaggatcacttgttactgcaacatgcgatttgctggagagaggaaccactcgcatgcagacccatgtcactgggtgttttcagcggatatttgctctactcctcactacaccgtaacacgagaggtctgcaaaatgattacagtagtgcagtatgtactacagttaactttacgcggttatgatttaatactgcttctttacttgtttacatttctcttgactgcgggtggtgcgatgcatggtaagtaaatgtttatgtgagttttgacaaattttaa

SEQ ID NO: 685152 - DNA, 641 bp, Homo sapiens
ttttaaattctacataagaacagacatttgaggaatataacgtaacatgacatttagcaaacacaagaaatgatataggaactatatatacaacatatttctaggcaaattcacatccatagacaaaaaatatatatgtatatatccctagaaagtattggaaagaaatacattatttaaaaaggtttttatgtgcaggaagtaagataatgggtgatttaaattttatttatattttaytttctaacttatccctaataaacatgtattactctaacaagaataaaatggcagttaaaatctactagtgcttcactatgtgaacctcataaaccatgatgacagttggcccttgataaggcttctccttcacatggttaaaacatgacacaaattgcttaatcctatattaattactcaccttatgtgctgaagttaggcaggtggaagtgacagtgatttcgtccactggtataaattgaggctttatgggaaagcaaaccattaaggcaaatgtaagtaaaaataagcttcaactggcatagggtaataattcagcattctccatttcttaaagaagggtcaagatagcaaaccctcatgaataattgttcaaggagtgcatttaagtttagatatcc

SEQ ID NO: 685153 - DNA, 641 bp, Homo sapiens
ttttaaattctacataagaacagacatttgaggaatataacgtaacatgacatttagcaaacacaagaaatgatataggaactatatatacaacatatttctaggcaaattcacatccatagacaaaaaatatatatgtatatatccctagaaagtattggaaagaaatacattatttaaaaaggtttttatgtgcaggaagtaagataatgggtgatttaaattttatttatattttactttctaacttatccctaataaacatgtattactctaacaagaataaaatggcagttaaaatctaytagtgcttcactatgtgaacctcataaaccatgatgacagttggcccttgataaggcttctccttcacatggttaaaacatgacacaaattgcttaatcctatattaattactcaccttatgtgctgaagttaggcaggtggaagtgacagtgatttcgtccactggtataaattgaggctttatgggaaagcaaaccattaaggcaaatgtaagtaaaaataagcttcaactggcatagggtaataattcagcattctccatttcttaaagaagggtcaagatagcaaaccctcatgaataattgttcaaggagtgcatttaagtttagatatcc

SEQ ID NO: 685154 - DNA, 641 bp, Homo sapiens
ttttaaattctacataagaacagacatttgaggaatataacgtaacatgacatttagcaaacacaagaaatgatataggaactatatatacaacatatttctaggcaaattcacatccatagacaaaaaatatatatgtatatatccctagaaagtattggaaagaaatacattatttaaaaaggtttttatgtgcaggaagtaagataatgggtgatttaaattttatttatattttactttctaacttatccctaataaacatgtattactctaacaagaataaaatggcagttaaaatctactagtgcttcactatgtgaacctcataaaccatgatgacagttggcccttgataaggcttctccttcacatggttaaaacatgacacaaattgmttaatcctatattaattactcaccttatgtgctgaagttaggcaggtggaagtgacagtgatttcgtccactggtataaattgaggctttatgggaaagcaaaccattaaggcaaatgtaagtaaaaataagcttcaactggcatagggtaataattcagcattctccatttcttaaagaagggtcaagatagcaaaccctcatgaataattgttcaaggagtgcatttaagtttagatatcc

SEQ ID NO: 685155 - DNA, 641 bp, Homo sapiens
ttttaaattctacataagaacagacatttgaggaatataacgtaacatgacatttagcaaacacaagaaatgatataggaactatatatacaacatatttctaggcaaattcacatccatagacaaaaaatatatatgtatatatccctagaaagtattggaaagaaatacattatttaaaaaggtttttatgtgcaggaagtaagataatgggtgatttaaattttatttatattttactttctaacttatccctaataaacatgtattactctaacaagaataaaatggcagttaaaatctactagtgcttcactatgtgaacctcataaaccatgatgacagttggcccttgataaggcttctccttcacatggttaaaacatgacacaaattgcttaatcctayattaattactcaccttatgtgctgaagttaggcaggtggaagtgacagtgatttcgtccactggtataaattgaggctttatgggaaagcaaaccattaaggcaaatgtaagtaaaaataagcttcaactggcatagggtaataattcagcattctccatttcttaaagaagggtcaagatagcaaaccctcatgaataattgttcaaggagtgcatttaagtttagatatcc

SEQ ID NO: 685156 - DNA, 641 bp, Homo sapiens
ttttaaattctacataagaacagacatttgaggaatataacgtaacatgacatttagcaaacacaagaaatgatataggaactatatatacaacatatttctaggcaaattcacatccatagacaaaaaatatatatgtatatatccctagaaagtattggaaagaaatacattatttaaaaaggtttttatgtgcaggaagtaagataatgggtgatttaaattttatttatattttactttctaacttatccctaataaacatgtattactctaacaagaataaaatggcagttaaaatctactagtgcttcactatgtgaacctcataaaccatgatgacagttggcccttgataaggcttctccttcacatggttaaaacatgacacaaattgcttaatcctatattaattactcaccttatgtgctgaagttaggcaggtggaagtgacagtgatttcgtccactggtataaattgaggctttatgggaaagcaaaccattaaggcaaatgtaagtaaaaataascttcaactggcatagggtaataattcagcattctccatttcttaaagaagggtcaagatagcaaaccctcatgaataattgttcaaggagtgcatttaagtttagatatcc

SEQ ID NO: 685157 - DNA, 632 bp, Homo sapiens
tactttattcagtagattcctaatatttaaattaatctaatgaattgttcaggagcctctttaaaccaagcacctggggaaaaaaaaaagggaaatacttgtaatcccagcactttgggaggctgaggcgggcggatcgcgaggtcaggagatccagaccatcctggctaacacagtgaaaccccatctctactaaaaatacaaaaaattagccaggcatggtggcgggcacctgtagtcccagctacttgggaggctgaggcaggagaatggcgtgaacccaggaggcagagyttgcagtgagccgatatcacgccactgcactccagcctgggcaacagagcgagactccacctcaaaaaaaaaaaggaaatactgcaataatttactgaaaatttgccaaaaaccagtaactacaagagcagctgacacatattttgcctcttaaaaataagagaaatgtgtggggcatggtggctcatgcctgtaatcccagcactttgggaagctgaggtgagcagctcattcaaggtcaggagttcaagaccagcctgaccaacatggtgaaactctgtctctactaaaacacaaaaaattagccaggtgtggtggcgggcatctgtaatcccagc

SEQ ID NO: 685158 - DNA, 1027 bp, Homo sapiens
tctgttaaacagtaaaaataccaacaagggtaaccaagtagtagatgaaagacagtttttccttatagaagtattagagctgatgaagaaaacataatagaatgagaatataattttttgaactcctaaggaatctacgcattgatcatgactgctaatatcattaaaagagagacaatcagcctcacaatggaagaacacactaccacctatgaaacatcttgacaaaaagccacatctgaatgggcaagctgctagtctaccaatttaaataaaaatgaacacaatggaagaacctgttgaactactcctagtaatgcagtgagcaaaatctagactgtgtgataactataagacaaccaatctggttttcttacaaataaacttaaggaagaacagagaggaggggagtggaagagggagagagtgtgagacagcgatagagaaagaaccttgcagtttatgacaggagataattagaaatatgaacaacagactggatattttattatattaagaaggtaataacttttaggtaatgatatttgtaatgtggtttttaaacagtacttacttttagaaatgaatgctaaaatacttagggatataattatacagggtctgagactgccttcataatccagttgtgggggaatagttgggctacagatgaaaccagttcacctacaagttgatcactgaggctggctgatgggtttatagagtttcattataatattctctttaattctaattttgaamtctcccatatgtattagtttgctagggctgccgtgaaaaaataccacagactgggcggcctaaacaacagaagtttatttattttctcactattctggaggctggaagcccaagatcaaggtattggcaggcttggtttcttctgaggcttccctactttgcttacagatggtcaccttctccctgtgtcctcacatgtttttttctttgtgtgcacctatccctggtatgtctctttgtgtatgaatttcctcttcttatgagg

SEQ ID NO: 685159 - DNA, 1608 bp, Homo sapiens
taattttaagtgttacataaagaaataactttctctcgagaggtttttattattgttgttccttaagcatccatcatgatcctctgtgcacttgattttcagactcctcaacatcagcttcatagattttacttactctgcagatacttgcctgaaaacaagtgattactatcatataaccatgattagatgaaactgggaaggtgggaatataagacatgtctatccacaggaaaatggctaaataaattgtggcgttcatcacaatggaatatcatccacgggcagttacgatacagtatacaggtaacaaaatacacagcataacctccactgtataagagaaacttttcatagaacagaagtctggaaggaaagacaaatgatattaattatggtatttctgagtgataggattatgagtgaattttattttttctctatagactttttcccccaaattttctaaaataaatgttttcctttatataatacaaagtagaggttgttaaagaatattattgcctggagytttcaatggtgatgtctcatagtggtaacagtgaagctggcatttactttcaaaatatgaaattttaagaacatatgtttgctgtgattaattatacaaaactcagtatgtttctcaactctttttcttggccatctgatggtaatgagatgacttacctgataaaaagttgttataactagtagctagaagttacgctttgcacttggacttcacttaagataattattaacatttgtaactaagctgcttaaacatgtggtattgtgcaacgatcatgtaatcaaaaacaaaagccaattatgcacccccccaatagtaagatacggttgttttggaatcactgaaaactattataaatggatctaatttcttatcaaaggaaattgacacaatgttttaaaacacaacaaaatcatctactttttaactcgtctgaaacccaacctagaacgccagggaaggtctttctttgatttttggttttcgacgtctaggaatttccttgaccaaaagttctcctttgcataataaaaatatgtgagattataaactataagcagaacacttacaattgtctagagcaggggtgtccaatcttttggcttccctgggccacagtggaagaagaagaattgttctgggctgcacataaaatgcactaacgatagctgatgagctttaaaaaaaatcacaaaataatctcataatgttttaagaaagtttatgaatttgtgttgggctgcattcaaagctgtcctgagccacatgtggctctctggctgtgggttggacaatcttggtctagaagattcacaggcaagtggggcagattttcaaaaaagtgccaaaactcttacaaaataaagttcataagttttacacatttagtcagaatttttcctgattctatattagcagaaaattcctgtttgaatactggtaaagttcaatattatattgttatgtttcttcagagcttacaaaactaggaataactttgctgaagcccatagatgggggaaaaaaacaccctcctgaatctgaggaatgcacattgataggcttgtattgca

SEQ ID NO: 685160 - DNA, 1608 bp, Homo sapiens
taattttaagtgttacataaagaaataactttctctcgagaggtttttattattgttgttccttaagcatccatcatgatcctctgtgcacttgattttcagactcctcaacatcagcttcatagattttacttactctgcagatacttgcctgaaaacaagtgattactatcatataaccatgattagatgaaactgggaaggtgggaatataagacatgtctatccacaggaaaatggctaaataaattgtggcgttcatcacaatggaatatcatccacgggcagttacgatacagtatacaggtaacaaaatacacagcataacctccactgtataagagaaacttttcatagaacagaagtctggaaggaaagacaaatgatattaattatggtatttctgagtgataggattatgagtgaattttattttttctctatagactttttcccccaaattttctaaaataaatgttttcctttatataatacaaagtagaggttgttaaagaatattattgcctggagctttcaatggtgatgtctcatagtggtaacagtgaagctggcatttactttcaaaatatgaaattttaagaacatatgtttgctgtgattaattatacaaaactcagtatgtttctcaactctttttcttggccatctgatggtaatgagatgacttacctgataaaaagttgttataactagtagctagaagttacgctttgcacttggacttcacttaagataattattaacatttgtaactaagctgcttaaacatgtggtattgtgcaacgatcatgtaatcaaaaacaaaagccaattatgcacccccccaatagtaagatacggttgttttggaatcactgaaaactattataaatggatctaatttcttatcaaaggaaattgacacaatgttttaaaacacaacaaaatcatctactttttaactcgtctgaaacccaacctagaacgccagggaaggtctttctttgatttttggttttcgaygtctaggaatttccttgaccaaaagttctcctttgcataataaaaatatgtgagattataaactataagcagaacacttacaattgtctagagcaggggtgtccaatcttttggcttccctgggccacagtggaagaagaagaattgttctgggctgcacataaaatgcactaacgatagctgatgagctttaaaaaaaatcacaaaataatctcataatgttttaagaaagtttatgaatttgtgttgggctgcattcaaagctgtcctgagccacatgtggctctctggctgtgggttggacaatcttggtctagaagattcacaggcaagtggggcagattttcaaaaaagtgccaaaactcttacaaaataaagttcataagttttacacatttagtcagaatttttcctgattctatattagcagaaaattcctgtttgaatactggtaaagttcaatattatattgttatgtttcttcagagcttacaaaactaggaataactttgctgaagcccatagatgggggaaaaaaacaccctcctgaatctgaggaatgcacattgataggcttgtattgca

SEQ ID NO: 685161 - DNA, 659 bp, Homo sapiens
cccccaccaatgccaaatggctgcatcaagttcaccttcattactaatgtacgctgctcatccaaaaagcagaaagaattggcagtcactgaaacatgaaaacaggccctaacattgtaaacagttttaatttttctgactgattaccagtttcaactgtcacatggttgtctgaacaggtgatatttaagacaggtaagatgcaatcagttaatatcaaaatttgcttgactttcttgggtaccaataaactggaataattgctccattacaggattttgagtcccagcttgttccatcataagtgttttaaaagagtgacacatcaaagatcacaaaaacttggttgaaggcacttcatgcctattttaggttgtgtcaagtgccrcggtgcctcaaaggtatctgctttttaatttcaacatcaagttcatattaacaacttgggaattttttttttttctggccagtgcgatgtgttgattttgatggagtaagaattggtgatctcaggatgcctagtctgctgtcccagcaatcttaacccagtgttttctacacttaaatcattagagtcacgtcttcacaattgtttttgccatatcctggtaccaaatgttctattattacttaatttttcttaaactgattaactttct

SEQ ID NO: 685162 - DNA, 963 bp, Homo sapiens
ctagagaagatggaccttggctctactctataacctagggaaagataatgaattcatatcatytaacaggtccacatattcataagttaaaagtcaacaataaaggaacattttcacttctataaaatgttgctaaacgcatattaacatgacaaatatatttagagccaaaatcacttttatgacaatgactgaatagtttttcctactaaaatggactcaaatcaatagaagaaaagacccctataaggggatttccagtctaaatgattatatacaactatcatctaagtaactcataaggcccaggcaatactctcatctgaaacatttgcattcttatacaaaggagtctttggaaaaattataaatactcagacgcacgaagtagtaacacaaacaaaggaaaacagacaaatgagacaaataattctctgatgtcttatatattaaaagaaaacttcaaaggggatattattaaggttcacaggcccctcatacttgacactactattcttctatgcctcagagagagttatatgagtctaaccagggaaaataaaaatgtcggctttattagttgtattacagataaaggtgatgcaaaactgcttagatgagcgacaatggtttcctgacatttcactccagaattaggcaggcttagccttcctggcacaggcagaccacctcaggccctccccataagggcaagccccattattgcgtggtaaagagaacagcaaaatacgtccactctctatgtgcagcaaacaccaaagagaaagaaggggaaaagttgagctagagtgtcagggtcttctacagaaatttaggagacagactctttctctggggagtcattagagaaatatccaaatgttactccagtgattgtccttctacttagagactagaagccctggaatggaagtcattccacactaatgtcaaagtgcaaga

SEQ ID NO: 685163 - DNA, 963 bp, Homo sapiens
ctagagaagatggaccttggctctactctataacctagggaaagataatgaattcatatcatttaacaggtccacatattcataagttaaaagtcaacaataaaggaacattttcacttctataaaatgttgctaaacgcatattaacatgacaaatatatttagagccaaaatcacttttatgacaatgactgaatagtttttcctactaaaatggactcaaatcaatagaagaaaagacccctataaggggatttccagtctaaatgattatatacaactatcatctaagtaactcataaggcccaggcaatactctcatctgaaacatttgcattcttatacaaaggagtctttggaaaaattataaatactcagacgcacgaagtagtaacacaaacaaaggaaaacagacaaatgagacaaataattctctgatgtcttatatattaaaagaaaacttcaaaggggatattattaaggttcacaggcccctcatacttgacactactattcttctatgcctcagagagagttatatgagtctaaccagggaaaataaaaatgtcggctttattagttgtattacagataaaggtgatgcaaaactgcttagatgagcgacaatggtttcctgacatttcactccagaattaggcaggcttagccttcctggcacaggcagaccacstcaggccctccccataagggcaagccccattattgcgtggtaaagagaacagcaaaatacgtccactctctatgtgcagcaaacaccaaagagaaagaaggggaaaagttgagctagagtgtcagggtcttctacagaaatttaggagacagactctttctctggggagtcattagagaaatatccaaatgttactccagtgattgtccttctacttagagactagaagccctggaatggaagtcattccacactaatgtcaaagtgcaaga

SEQ ID NO: 685164 - DNA, 1424 bp, Homo sapiens
gcgtaagccatgctggctggggccagccaaagctgtcttggaaacaagagagccagccatgggagaaggaaggggyggggcctctggcaggagctcttggcttcgttcccattcttacaatggaggaaattcccagtctctgggtgaaaaaaagccacatctggcctcaagagaggacacccccaccacattctgtgtgttctcccaattgggtgggaatgtggccaccatgtgtgatccacttcagggactgctttttcctgggactttggatgctggagcttggtcctaggaagccctgcagaaaactctgcctccattgagaaaaagtattccattcctttgcctcctggacttggcttcccaggtgcaagaatattctttgaatgacaaggtccctggttaaccccaatagacacactctaatttttccaatgtcccctttaaaattcagctcccacattaagcctcttatgacagctatgctcaggccagcaatgcacacagtggggctaccattaccttcaactggcaccaggactgctccaaatggcagacatcagtctggccttccctgcatttgcatcccacggtcagccccgtgaagatatggccagtcatacacaggtccccatcacttgaagcactgcctacccctgccttgttacataatgaactgtttgcacctaaaggcaaacacagaccattaacatttgccacatttgtttaaaggcaaagctcttgatcagcagataagtcagaatcttgactcctacatttgtcatgtaggctgtccttcgtgacactgggaaatgtattggacatgcctgtctccaccagaaagagcaacaagtgggacagcatgcaagcatgcatggagataaggatgtgccacgatgggaccccagcctcattctattgtcagagcagcatctcaaatggaggggggggcgcgttcagccccactgacactgaggacaatggatgggacaaaggagctccctggaaaccctcacagctctccctgcccttcccagcaattttcacttcctgaacacttgtcaggacctagggggtgggaaggaatcctcttgggctcctccatcactgcccggagccggacatacacagggaccacctgtattctcttgaggatctctggccagggctcacctgctccaggctcctctttgacttgctgctctttggtcccccaaccccacacttccccaaaccacctcctctacctcccccatacagcttgctttaaacaatgatttatcaggtgcttatcacgtgcacaactcactggtttgttactttaaaaagctaccctttttctttttgaacatttgcccctcctcattcccactcctccccaccccagctccattctctggtttctcaacagtctgtgagtctgt

SEQ ID NO: 685165 - DNA, 2555 bp, Homo sapiens
tattccctgggctaccctgtttctcctagcctgaggacttactacactttcattctcagaatgcttggagataaaaaataatcatagccatttcctttctgtgcagagaggaagcaaatctctacattgtagttactacttacttagctgcatgagatggtttgagtttctctccctgggatggtaccaaacttgataaataagatttaccagaaagtctacgaaacctccattattttgacatgatcgaggcacttcattatgccatattactaaaattcacaaactgccttaatctctttttggcttttttcatgcaccatattaaccttactccctctaaaaactgtctacaaatagtaaaattagaaccttgttttctcggtactcttgatgaacaaattacggctgttgtgaatgtagggcaagttgtctaaagtgtcagcaacaacaaccaaaaaatctgaagttggcaaatgggataatttttgaaataaattagtggatactaaatactcaaatgttatatacagattcagtaatttctaatgcacatgtttaatactgcccttgacatattttccccatatttagttaaaggaaagacctttgctttagagggctagggccttatgacaaatgtcttcaatatatcactggagaaccaatcactgaagttgctctcagttgataaaagtgctggatatgaagtatggactaacagacttttcattttccttctaatatcccaagtagcaaaggaggaaatgcattcattcattctgaaattaaaaaaaaaatcttcaacattacctaagaattggataactttctattttaccttccaaactaacacttttgaaatcctaaggaagtactattaataattattgcaggacagttccaggaaattcaggctgaatagtccccttcctccccctgtaactctaagtagtctagcctctaaaattgtctctacagcctcttctttgtcacttcaatcataatattcaacccacatttcctcaggcctttcttcaggtcctgaaatgtaacacgctcttttctttttttagggcctaaacacagtttgttctctatttctggaatgcactcgaaatcccctccaccatatgccagttcctcttagggacttggaactcccatttaacaagtgtttatggagctactactatttggcaggaaggcaacacagcactgtggtaaagataatgggcttagtcagatggcctcggttgtctctgttctgctacttttattatccagatgattatctacttttattattaaattattacaggtccttcagccattttagcttcagctttttcatctgtaaaatgaaggtttaaaaaaagcctttgtctttggtttgttatgaagcctgaacaaatgatctttgtaaagtacagtgaaaagtaaaggaagtagttcataaaagaatcactgttattaggaattagaagtagtatagtaaacaagaaagactttgaattttacttctgcatctgatcttcaatgagtttaatggctgtcaatttttaattcctttgactatcaaatagttaatgatcttcaagaggacaggcatggtggctgacgcctataatcccagcactttgacaggccacgaggtcgggggatcccttgagctcaggagttcgagaccattttgggcaacatggtgaaaccccatccccaccaaaaatacaaaaattagccaggcgtaatggtgtgcgcctgtagtcacagctactttggaggctgaggtgggaggattgcttgagcccaggtggtcaaggctgcagtgaaacatgattgcaccactgcactccagtctgggcaacagagtgatactctgtctcaagaaaactaataataataataacaataataataataatcttcaataaccctgtcccatatataaaatttttcaggccttaatgtcttggggtcaatcaattactatgcaattgctaaaagcgatcatcgctatgaataagcgagtagggatttatatataatataattctaaaaacaaacacatttagaggtactattttatgttatacagtactaatatccatggttcttyccaatctaaaagtataaattttgcccagtgagttttacctagttcattttaaaagttgattttaatatgacctttaattttgctctgtttaattgataacaaacttagatatttgtttttcacttttcaaccagctctagttgttgagactacctctgtgaggtaacagaagagttttatttctcaatcacccactttttaaattcaagtatgtactgcacatgttgttccagtctctatatagcacactttaggagtacaagatatttcaatgaaagatggtcccctcatggtgctaaagagatttaggaaagttaccatacctaactcaaaaaccacaaactgaaagatgaaagtatgaattattggggacaagtatacttaaaatgccataaggtaaaatggaggaaactttgttttcataaggaaggctttt

SEQ ID NO: 685166 - DNA, 1430 bp, Homo sapiens
tgtaggatgctagtaagcatggccttaacttgagcctgatcaaagtgtacaattcaactaatgagtttttttcaaagatagactaaaaattcacaaactttgctattgagaaggacatttcttttcatttaacattaactgaaggcctattgcgagctaggcacaagagacataaagacgaattcgatgacaaccttttgatttgagacttaggtcctttcagtgcctcaacagaatattgagtgaggaggttctaaaggaaggagcaagtattactaactgtgttttagttgagagcggcttacagttattaatacatcttctatagaacctaaaatatcaattattacccaaaattatcaattttataaaaagttatttttctctctcaaattataagttgtgagtgtataaatctatttcatgtaagtaaatcaggccaggcgtggtggctcacgcctgtaatcccagcactttgagaggccgaggcaggtggatcacctgaggtcagaagatagacaccatcctggccaacatggtgaaaccccgtctctactaaaaatacaaaaattagctgggtgtgrtggcacgggcctgtaatcccagatatgggaggctgcggcaggagaatggcttgaacccaggaggagaggattgcagtgagccaagatagtgccactgcactccagcctggcaacagagagagactctgtctcaaaaaaaaaaaaagtacatcaagaaaattataaatgattcctcctttaaaaaataaaaacttataatgatacttcatagagatttccttaaagaaaattttttttaaaaatctaatattataaaatattattttctttgatatgctatgtcttttatatttcatatggattgaatatacaaaaacaaaaatatcattaatgtttttaaagtgtgatgaagaatatatctatgtatagcataaatataatgttattcaaccattagcacaatttttcatacaggatacttgatggtttatcataaaatgtattatattccatctttaaacaatataactcttggtgaacttttctcaataccagtaaattcaattttgtctaatccttggatctataataatgttggctcattaaaatgttagttaaaattcattaaaatgcatactgagaggtaacagcttcattactgtaatatgatgtaaagaaaaaagaatgttttattatcatttagttatttttagaactgaataaatttgcataataaaaagttcactctatattttcaatagatctcaaatattaagcagcccaataattaaattgcaggttctaaaaacatattattttttaccacagagtcccagttgttgttgtttttttcaattataaaaaatagtcatatgaaagatggtgtttattagtaattgaaaatca

SEQ ID NO: 685167 - DNA, 1430 bp, Homo sapiens
tgtaggatgctagtaagcatggccttaacttgagcctgatcaaagtgtacaattcaactaatgagtttttttcaaagatagactaaaaattcacaaactttgctattgagaaggacatttcttttcatttaacattaactgaaggcctattgcgagctaggcacaagagacataaagacgaattcgatgacaaccttttgatttgagacttaggtcctttcagtgcctcaacagaatattgagtgaggaggttctaaaggaaggagcaagtattactaactgtgttttagttgagagcggcttacagttattaatacatcttctatagaacctaaaatatcaattattacccaaaattatcaattttataaaaagttatttttctctctcaaattataagttgtgagtgtataaatctatttcatgtaagtaaatcaggccaggcgtggtggctcacgcctgtaatcccagcactttgagaggccgaggcaggtggatcacctgaggtcagaagatagacaccatcctggccaacatggtgaaaccccgtctctactaaaaatacaaaaattagctgggtgtggtggcaygggcctgtaatcccagatatgggaggctgcggcaggagaatggcttgaacccaggaggagaggattgcagtgagccaagatagtgccactgcactccagcctggcaacagagagagactctgtctcaaaaaaaaaaaaagtacatcaagaaaattataaatgattcctcctttaaaaaataaaaacttataatgatacttcatagagatttccttaaagaaaattttttttaaaaatctaatattataaaatattattttctttgatatgctatgtcttttatatttcatatggattgaatatacaaaaacaaaaatatcattaatgtttttaaagtgtgatgaagaatatatctatgtatagcataaatataatgttattcaaccattagcacaatttttcatacaggatacttgatggtttatcataaaatgtattatattccatctttaaacaatataactcttggtgaacttttctcaataccagtaaattcaattttgtctaatccttggatctataataatgttggctcattaaaatgttagttaaaattcattaaaatgcatactgagaggtaacagcttcattactgtaatatgatgtaaagaaaaaagaatgttttattatcatttagttatttttagaactgaataaatttgcataataaaaagttcactctatattttcaatagatctcaaatattaagcagcccaataattaaattgcaggttctaaaaacatattattttttaccacagagtcccagttgttgttgtttttttcaattataaaaaatagtcatatgaaagatggtgtttattagtaattgaaaatca

SEQ ID NO: 685168 - DNA, 627 bp, Homo sapiens
cattgaaggctttgagaaaggaactggctggggaaacccagaccacaaaatgttagttgaaacttacagcctgaatttaatcgggttaatgctcactaaaacaaaccaatacaaaatcaacattcttcattggagtgaaataagatgcagagtctcctaacrtaatattcatggtgtccagaatgcaattcaaccttactaggatatgaagaaccaggaaaatggcaactcacgcaggaaccagccagcccatgcccgtaccaagatgactgagatgttgtgatccgctggcaaaaaacatgaaaatagctgtgataaaaccactgcagccctagtcacaaacactcttgaaacaaatgagaaaggagaaaatctcaggaaggaactagaagatgtaaatataaaccaaatggacatcttagaatggaggggcaataagttctttttgaaaaaaacctcactggatgggattatagaagacagtaaagaaatatcagaatggaacaaagagtctgtggatttgaatataggttaatggaaattatccaatcttaacaacagagaaaaacatgagaaaggaatgttttaaatgagaatatcttctcgtggagactcagtgcgcagacc

SEQ ID NO: 685169 - DNA, 421 bp, Homo sapiens
cactggaatcttttccaaatttaaggtttaatgattttcttaaatctaaaaatagtaggttgcagatgtatttaaacagtgtgcctaggtagtatgtttatatattaggattaaaatgctcttctaaagtttactaattctaacacagcctttattgtttcatggagacatatctttccgattcccaggttaatttaaacaattaattcaaagcaactattgacttagttctacattgggatacctatttatgcatttgaagccttagatatgtatttcaaattagaaacgtgtrctggtcatggaaagttgtgactgagagtctcaggtaagttttgtttccatgtgaacacactgcttccaattaatgttatgcccagagcagacaattaataaacaccctttgaagtgaatgagtgat

SEQ ID NO: 685170 - DNA, 657 bp, Homo sapiens
tgtatatatttggagagtaattttaaatgggaaaaatgatatcagtaaatcccactgaggtgaaaaccctcttaaacagttgatatccaaacctgcagactctcattagtaatctaatttcattttgtatcttttgagatatactgtacaaattaaagaagtcaaaattttaatggtggttttattaaaccatctttcatatsacaaaatttcttaaatttaatttaaaatcatggtgcagtaatgtaaaaattattcctaatattgcattttagagagttagcctttggttcaataacagggcttattcatgcttacttataatagaaaaccagatgattttccatttgtagtttctgaagtgtgaacacaaactggtatctggcaattgttttaagcttaataaaatcactctaaagaagtattttaaaagatgtgcaatattaaccatatatttcctcggattatattttaatatgtttcatacagtcaatatgcattactttgagcctgattttataagattttaaagttaacctgggaaaaaataaatttatttcattctgtacacatctggtcaattgcattgctggcaattttcttagcaaactgaacaccattaatacagtgtgtctcatctattaatttaactcagca

SEQ ID NO: 685171 - DNA, 622 bp, Homo sapiens
ggtaatcatctaccacgtatagctatatcaaatcatcacattacacacattgaatgtgtactttttttatttgtcaattatacctcaaaaaagcaagaaaaaatatttcattaaaactacatcagtcaaactgaagggattttcattagttacagttgggtaagaactgcaccattttggaaaacagacaacaacagtgtaacatctatacatgtgtccatccatatgcttatttacttatatgggagagaaaaagaataggacaaggttcatgctaggttcttaaatggtataactagtagggtcatggattggttgctaatgtgaatggagaaatagataaaggccatacttttatcatttcacgcytttatcaattcaccttcctggctgaatgatcctttaatacctttctgcctgctctgtagacaccttatgaggatagatgagaagcagcagcatacaacaatagctaagaacctaaattctgcaacttaaggtcttagttggaaaccagactctattatcaatggctgtataccctaagagaggctacttaaactctctgaagtggttttttcaactgtacaatatgaataaaaatatctattacacaagttta

SEQ ID NO: 685172 - DNA, 622 bp, Homo sapiens
ggtaatcatctaccacgtatagctatatcaaatcatcacattacacacattgaatgtgtactttttttatttgtcaattatacctcaaaaaagcaagaaaaaatatttcattaaaactacatcagtcaaactgaagggattttcattagttacagttgggtaagaactgcaccattttggaaaacagacaacaacagtgtaacatctatacatgtgtccatccatatgcttatttacttatatgggagagaaaaagaataggacaaggttcatgctaggttcttaaatggtataactagtagggtcatggattggttgctaatgtgaatggagaaatagataaaggccatacttttatcatttcacgcctttatcaattcaccttcctggctgaatgatcctttaatacctttctgcctgctctgtagacaccttatgaggatagatgagaagcagcagcatacaacaatagctaagaacctaaattctgcaacttaaggtcttagttggaaaccagactctattatcaatggctgtataccctaagagaggctacttaaactctctgaagtggttttttyaactgtacaatatgaataaaaatatctattacacaagttta

SEQ ID NO: 685173 - DNA, 645 bp, Homo sapiens
gaaatttaattgactgagcctgcctagtaaaggaaatctttgtcatgccagtgtgaagttctgcttcccactttactattttcctcttaatgcrgtactaatatatgttgaaccaaaaacaaaaacctgggcttatagcataacacacctggtattaaattgtggtaccaccatttgttatcctggttagttaacaactttctgaaaataaaataaggataataatatctatcttaatgtatctttttttcttatgaggtatctaagatagaagaatttctttttctttgccttcgcttaatagaggttagcattattttattttatataaacatagaaataaacatctgctggaaactcatttgagagaaaacaacccatgttggatcttagggaggtagatacacttttccattctttcttcaatctacagaggttcatgtcatacccacatcttcatctaaaaatcaaggaatgaggctggataccgtggctcacgcttgtaatcccagcactttgcgaggccgaggcagacaaatcacttgagctcaggagctcaaaaccagcctgtccaacatggtgaaaacctgtctctactaaaaataaaaaaattagccaggtgtggtggtgggtgcgtgtaatctc

SEQ ID NO: 685174 - DNA, 645 bp, Homo sapiens
gaaatttaattgactgagcctgcctagtaaaggaaatctttgtcatgccagtgtgaagttctgcttcccactttactattttcctcttaatgcagtactaatatatgtkgaaccaaaaacaaaaacctgggcttatagcataacacacctggtattaaattgtggtaccaccatttgttatcctggttagttaacaactttctgaaaataaaataaggataataatatctatcttaatgtatctttttttcttatgaggtatctaagatagaagaatttctttttctttgccttcgcttaatagaggttagcattattttattttatataaacatagaaataaacatctgctggaaactcatttgagagaaaacaacccatgttggatcttagggaggtagatacacttttccattctttcttcaatctacagaggttcatgtcatacccacatcttcatctaaaaatcaaggaatgaggctggataccgtggctcacgcttgtaatcccagcactttgcgaggccgaggcagacaaatcacttgagctcaggagctcaaaaccagcctgtccaacatggtgaaaacctgtctctactaaaaataaaaaaattagccaggtgtggtggtgggtgcgtgtaatctc

SEQ ID NO: 685175 - DNA, 598 bp, Homo sapiens
ataaggaggacatgctttccagaaccaattaaaaatgattttagatgatctgctatttcatattccccacaccattgcttttcctattagcaggtataagtgagaattaatggcaaataatggcaacacaaatcagtactaaagtgcatagtcatttttcatcatgcagctaaaacggtattattaatgtcaatttattggttatatataatgaactactatgctggagttttgtagaaattattttttattccaatatagttacttgatcaaggagactaagttccttttataaaataccagaggatgtcatgaatgaagaaatatggctagtccggtgcaggctgtgtatgcaggagaatgaggttttctctctcacaattacgtgagcctctgcagagtgtactttttcctggcctccagttgtggttaggtgctactggtagatttataaatatgtcatagttatatcaaatattttaatcattctgagccttttcgcctcatccaagtaaaacaattgtcttctccaaatgaagtattgtaaatatttatttgcagattttaatcaacctrtgacagccctctcatatgataa

SEQ ID NO: 685176 - DNA, 613 bp, Homo sapiens
tctccctagcctcagtttcatccctaataaaatacagtgactttatcttctactaagtatctcccaaaatatatctcatagaatactgattattaaatacataggaggagtgagttctatcatccagatatgggaacaattctgtttgaaacagtgataaatttttagctgtaagacttctcagggtatttaacattaaaccatccattgtatctattatggaagacggacagtatttctcmatttatttgacgttagaatgatttttaattaaaatattacagtaggttgattaagccttctcatagttattgaacattaaatatcatgaattttttaagtttatatgttatataagcacttattttcatttactagctctaaaagtattttcatagaccattacagcattttcagattcagagcacaagcccttgagcaatcaccacatgtttccatgcttggctgacttaccctgttccctctccttgtttgtctctctcctgacgggtcatactttatttaacctttccttttatttaatgactttattctctggataatcataatttcctttccaggactgtccaatggaaatataatgcaagacaca

SEQ ID NO: 685177 - DNA, 613 bp, Homo sapiens
tctccctagcctcagtttcatccctaataaaatacagtgactttatcttctactaagtatctcccaaaatatatctcatagaatactgattattaaatacataggaggagtgagttctatcatccagatatgggaacaattctgtttgaaacagtgataaatttttagctgtaagacttctcagggtatttaacattaaaccatccattgtatctattatggaagacggacagtatttctcartttatttgacgttagaatgatttttaattaaaatattacagtaggttgattaagccttctcatagttattgaacattaaatatcatgaattttttaagtttatatgttatataagcacttattttcatttactagctctaaaagtattttcatagaccattacagcattttcagattcagagcacaagcccttgagcaatcaccacatgtttccatgcttggctgacttaccctgttccctctccttgtttgtctctctcctgacgggtcatactttatttaacctttccttttatttaatgactttattctctggataatcataatttcctttccaggactgtccaatggaaatataatgcaagacaca

SEQ ID NO: 685178 - DNA, 613 bp, Homo sapiens
tctccctagcctcagtttcatccctaataaaatacagtgactttatcttctactaagtatctcccaaaatatatctcatagaatactgattattaaatacataggaggagtgagttctatcatccagatatgggaacaattctgtttgaaacagtgataaatttttagctgtaagacttctcagggtatttaacattaaaccatccattgtatctattatggaagacggacagtatttctcaatttatttgacgttagaatgatttttaattaaaatattacagtaggttgattaagccttctcatagttattgaacattaaatatcatgaattttttaagtttatatgttatataagcacttattttcatttactagctctaaaagtattttcatagaccattacagcattttcagattcagagcacaagcccttgagcaatcrccacatgtttccatgcttggctgacttaccctgttccctctccttgtttgtctctctcctgacgggtcatactttatttaacctttccttttatttaatgactttattctctggataatcataatttcctttccaggactgtccaatggaaatataatgcaagacaca

SEQ ID NO: 685179 - DNA, 658 bp, Homo sapiens
ttttaggttatcatagcatgcataatcctagtatgcataaccttgataaatgtacaaattgataatgttggcatcattacatctcaaactattcacaataatcactcatttcaaactgtagtcaaaagacaaatagaacaggcaaaaataaatcctttttgtctctgaaatgtataaacttacgggtgttctctgccacttggttcttttgttagttctgagtaagctctgagacagcagatgttatctatacaacagataagccaagataaataagaactcaatttttccaagtatggcctttttttccccaaaaaaataaactcagggcaatactgttcaaagcaagtaaacagattttgtcaaagcttcaagcaacaagaaagacaagtttctggtctccagttagcataaacttgaatcttttgtgagtgagaaaatactgaaaatacaatcacatgttcctctggcaaakaaattggtgctacttcttaaacaagagaaaaagagaagagaaaaaagtaaaagagaaatatgctctttgtgacgatcacactcataaaatgatcaagcttattttggagtcgctgataaagattcaaataaaatttctttatgacaaaggcaatcaacaatgcatctgcctcatgctaaagaa

SEQ ID NO: 685180 - DNA, 591 bp, Homo sapiens
ctttttatgtgatttatcataaaaatctgtctgccttatctctaagatttatttttacagatgctctcctyaacaactgttacaattctgcaaatgaaagggtctctacctcatctaaataaaaacccaatgcaaagcttggtgctggtggcataggaaaaatttatatgtgtgtgggaggtgtatgtatatagagggtgggcatttaaaagagccaaactttcatattttattacaaggaactcgttgcataataggtaaactagcaattcaagaaacagtaggtacatccttaaagatgtgtcttacaggaacttaaagatgtgtcttatggaactatgaacctgttccatagttcagaacattttatatggatgtaccccccaaatcgccaccatataaagtatattcactgtaattctctagagtagaaagtatcaataatcgatgcactatttgattttcgaccaaataagagagaaaggagatgaaggcaaggattacagcagtagcagctttgatatgcaatatttataccattattccatgcacatgaagagatgcttaaggaataggtttgatcttgtaatc

SEQ ID NO: 685181 - DNA, 591 bp, Homo sapiens
ctttttatgtgatttatcataaaaatctgtctgccttatctctaagatttatttttacagatgctctccttaacaactgttacaattctgcaaatgaaagggtctctacctcatctaaataaaaacccaatgcaaagcttggtgctggtggcataggaaraatttatatgtgtgtgggaggtgtatgtatatagagggtgggcatttaaaagagccaaactttcatattttattacaaggaactcgttgcataataggtaaactagcaattcaagaaacagtaggtacatccttaaagatgtgtcttacaggaacttaaagatgtgtcttatggaactatgaacctgttccatagttcagaacattttatatggatgtaccccccaaatcgccaccatataaagtatattcactgtaattctctagagtagaaagtatcaataatcgatgcactatttgattttcgaccaaataagagagaaaggagatgaaggcaaggattacagcagtagcagctttgatatgcaatatttataccattattccatgcacatgaagagatgcttaaggaataggtttgatcttgtaatc

SEQ ID NO: 685182 - DNA, 629 bp, Homo sapiens
gtgcatttttggatctaaaaaatgatagcttttctagtggctgtgctgtaatataaagctattggttaaataaaactttcttaatctctcttcccaggtttacctaaacatcaaagccccaaagcacgtaaacgttaaggcccaccaargggggcaatccttatgcacatgatcatatggcaaggcatgacttatttctgtggccagcctcaggtaagagtacaagaaatcacaccttaagaatctgcactcactcagaaagccataactaggagttcatgttacttgccaggctcctatccaccttttaataaagacacctccataggccacagaggtgacctcactttcatatgaatttttttgataattctgttttcttatgatatccacagagttgtggaactatcactattacctaattttagaacattttcatcaccccccaaaaagctctggacccattagtggtcactctccaatcctttcccccagctcccagcaactactaaccaactttctatcactatggatttacctgttctgggcatttcatgtaagtggatttgtacaatatgtggtctttcgtgtttgacttctttcattgagcacagtattttcaaggttca

SEQ ID NO: 685183 - DNA, 648 bp, Homo sapiens
tatctttactatataccaggsacttgacatatacattttctcatttaatcctaacgataactcgagagatagagaccattagcatgtccagtcctcatatgtggagactgaggcacagagagggtaggaagcttgccaggtttagggagaactagctttgacccaggttttctgacattagagaccatgtgttccctcctttcaagggagccactggccaattccctcccatgttctgcctttattgagtggaaggctcccttcccaaagtgttgagacagaggccatcaatggagggaatgtcactagctaactctgtggctgtgtgacttccagtgtccctgaacctcaggttcctcattgggtaaaggaggagactgagttaggacccctgccttcccttccaacgtcatcattctgctgttcctgtgactcccagggagcagatgtgagtagaagagagaggaccacttgttgctaggcaaccagcacccacctcacccatgttgccatggtgatgatgaaagttgggctgatgggattaccagctcctgctaattgcatatgagtgctcaggtttctgtctctttcttgcctgcttgctcgctctgactttctcattcttctaggaactgtagagcgatttcc

SEQ ID NO: 685184 - DNA, 648 bp, Homo sapiens
tatctttactatataccagggacttgacatatacattttctcatttaatcctaacgataactcragagatagagaccattagcatgtccagtcctcatatgtggagactgaggcacagagagggtaggaagcttgccaggtttagggagaactagctttgacccaggttttctgacattagagaccatgtgttccctcctttcaagggagccactggccaattccctcccatgttctgcctttattgagtggaaggctcccttcccaaagtgttgagacagaggccatcaatggagggaatgtcactagctaactctgtggctgtgtgacttccagtgtccctgaacctcaggttcctcattgggtaaaggaggagactgagttaggacccctgccttcccttccaacgtcatcattctgctgttcctgtgactcccagggagcagatgtgagtagaagagagaggaccacttgttgctaggcaaccagcacccacctcacccatgttgccatggtgatgatgaaagttgggctgatgggattaccagctcctgctaattgcatatgagtgctcaggtttctgtctctttcttgcctgcttgctcgctctgactttctcattcttctaggaactgtagagcgatttcc

SEQ ID NO: 685185 - DNA, 648 bp, Homo sapiens
tatctttactatataccagggacttgacatatacattttctcatttaatcctaacgataactcgagagatagagaccattagcatgtccagtcctcatatgtggagactgaggcacagagagggtaggaagcttgccaggtttagggagaactagctttgacccaggttttctgacattagagaccatgtgttccctcctttcaagggagccactggccaattccctcccatgtkctgcctttattgagtggaaggctcccttcccaaagtgttgagacagaggccatcaatggagggaatgtcactagctaactctgtggctgtgtgacttccagtgtccctgaacctcaggttcctcattgggtaaaggaggagactgagttaggacccctgccttcccttccaacgtcatcattctgctgttcctgtgactcccagggagcagatgtgagtagaagagagaggaccacttgttgctaggcaaccagcacccacctcacccatgttgccatggtgatgatgaaagttgggctgatgggattaccagctcctgctaattgcatatgagtgctcaggtttctgtctctttcttgcctgcttgctcgctctgactttctcattcttctaggaactgtagagcgatttcc

SEQ ID NO: 685186 - DNA, 607 bp, Homo sapiens
tccaaaataaatttgaggggttcagtgtaaggtgcatatatgctattaggtctttaaaatagaaataggaataaatataaaaatagtgatgcttcttcattggctaatattggtgctgtgattgagcaccaaatgtaattatgagcagcctggaagccaaagcaaaaagagagaaaggtatataattgctattcagtaaagaaaaactgccagactgttcctagttctaaattctggagggaattttttcatgtggtacacawtccttttacagaaactgcagataaaaattcttgactagcccttttttgctgaggatattgttaaaggacataaggaaggagctaaacttgacagtttgactagctttaatcattagaaagcaaaacttcctttctacccatgccttggaattttatacagatatgtgtcacttcgtaaatataaattttcagaatcaaccattatttatatatcagctatatataaattcatgtaaccactttgcaaagcaatttggcaatatgtatcaaatttttaaatgcagccaacaattcttctccaaacttattctgagattagcttgtgtagatgaagaaagccataa

SEQ ID NO: 685187 - DNA, 1557 bp, Homo sapiens
aaatggaaataaaaaataaagaaatcactaacttcaacttttgcaacttttatattgcaaaggcaatttctttctcctgaaggtgggtacctcctagacatcatatatctttacccaaaagagtttttgaggattttctgtgagtcccaaggggcacawatgtgaaggtcaaagataatgggtccccatctgacactgggctgatttgccaagcacccaggatgcatttttatttctttttcatggtaaaagccagagagaacactgtagagtttaaacacggtttctttatctggtgcccgcatggggagatgaaggtaaagaggccaatttatccagcaaatgtgcccaagcaagtcgggaataattacctcccttgacatctgacaaaactttgctgcatccccacaaaaattctataggcagtccttccaagtcattttcagagaccccaccatggcaggtgagcttatttatttatttctattttgagagatccacctttctagactctcttttaaggtttgcctcctgtgtaatgaatggagatcagtgggtatttcattaccaggtatctccctgctgcaggcagtgcctggagaagtttctctctgtttagctttcaagcctcatttattttctcatgctttctactgtgggcagagcctggccgactacattattaaattactattattacactgtgatgtcttggcatgatcaggggctaagttggaaaagatagtgttgggcagggaacatgtcttgccccttccctaagctgccccagatggaccttggctggcttgttgggtctgtttcagcagcggaattctctgaagacaaagggaaggtctgatcatatttgaagcagtttttctagtaagtgtaaggaatgaacatttcacttttaagtaagtggcttttgatttaagatcaactggataattcatggtggtcatgtttttggggagaggggatggcatttcatattcaaaggatttgacattttaaaagttataatgttatttaaaaagctataatatcatgaatatatttacatgtagttcatttatgtttacacaagctttcaaaggctgtctattctcagcagagaagttttaattaaaagtattttattgccattcgaaccctccttaagtgaaggcactgttcttcacttctctgtttttctttctcatgcactcttgataatcaacccagccttatttacaataaaaaagttattgctattatattttaagtgatttctcatacaccaccatgtcaccaaagctatacaataccagcatatagtcagtgctcagtaaattcttgtgaaaggagtggttcaatacggcccatgcattttatggttcagccataccgaaaaatgttttagcaaagacactgcctggtccacctttggaattttacccaccactcagaagtgtcgtttgcctttcaagtcttagcactttttagactgcttatttgtgagttttctcctccgtcccctatctatgcacagttccggtgtatgcattaggtgcttaa

SEQ ID NO: 685188 - DNA, 1557 bp, Homo sapiens
aaatggaaataaaaaataaagaaatcactaacttcaacttttgcaacttttatattgcaaaggcaatttctttctcctgaaggtgggtacctcctagacatcatatatctttacccaaaagagtttttgaggattttctgtgagtcccaaggggcacaaatgtgaaggtcaaagataatgggtccccatctgacactgrgctgatttgccaagcacccaggatgcatttttatttctttttcatggtaaaagccagagagaacactgtagagtttaaacacggtttctttatctggtgcccgcatggggagatgaaggtaaagaggccaatttatccagcaaatgtgcccaagcaagtcgggaataattacctcccttgacatctgacaaaactttgctgcatccccacaaaaattctataggcagtccttccaagtcattttcagagaccccaccatggcaggtgagcttatttatttatttctattttgagagatccacctttctagactctcttttaaggtttgcctcctgtgtaatgaatggagatcagtgggtatttcattaccaggtatctccctgctgcaggcagtgcctggagaagtttctctctgtttagctttcaagcctcatttattttctcatgctttctactgtgggcagagcctggccgactacattattaaattactattattacactgtgatgtcttggcatgatcaggggctaagttggaaaagatagtgttgggcagggaacatgtcttgccccttccctaagctgccccagatggaccttggctggcttgttgggtctgtttcagcagcggaattctctgaagacaaagggaaggtctgatcatatttgaagcagtttttctagtaagtgtaaggaatgaacatttcacttttaagtaagtggcttttgatttaagatcaactggataattcatggtggtcatgtttttggggagaggggatggcatttcatattcaaaggatttgacattttaaaagttataatgttatttaaaaagctataatatcatgaatatatttacatgtagttcatttatgtttacacaagctttcaaaggctgtctattctcagcagagaagttttaattaaaagtattttattgccattcgaaccctccttaagtgaaggcactgttcttcacttctctgtttttctttctcatgcactcttgataatcaacccagccttatttacaataaaaaagttattgctattatattttaagtgatttctcatacaccaccatgtcaccaaagctatacaataccagcatatagtcagtgctcagtaaattcttgtgaaaggagtggttcaatacggcccatgcattttatggttcagccataccgaaaaatgttttagcaaagacactgcctggtccacctttggaattttacccaccactcagaagtgtcgtttgcctttcaagtcttagcactttttagactgcttatttgtgagttttctcctccgtcccctatctatgcacagttccggtgtatgcattaggtgcttaa

SEQ ID NO: 685189 - DNA, 1557 bp, Homo sapiens
aaatggaaataaaaaataaagaaatcactaacttcaacttttgcaacttttatattgcaaaggcaatttctttctcctgaaggtgggtacctcctagacatcatatatctttacccaaaagagtttttgaggattttctgtgagtcccaaggggcacaaatgtgaaggtcaaagataatgggtccccatctgacactgggctgatttgccaagcacccaggatgcatttttatttctttttcatggtaaaagcmagagagaacactgtagagtttaaacacggtttctttatctggtgcccgcatggggagatgaaggtaaagaggccaatttatccagcaaatgtgcccaagcaagtcgggaataattacctcccttgacatctgacaaaactttgctgcatccccacaaaaattctataggcagtccttccaagtcattttcagagaccccaccatggcaggtgagcttatttatttatttctattttgagagatccacctttctagactctcttttaaggtttgcctcctgtgtaatgaatggagatcagtgggtatttcattaccaggtatctccctgctgcaggcagtgcctggagaagtttctctctgtttagctttcaagcctcatttattttctcatgctttctactgtgggcagagcctggccgactacattattaaattactattattacactgtgatgtcttggcatgatcaggggctaagttggaaaagatagtgttgggcagggaacatgtcttgccccttccctaagctgccccagatggaccttggctggcttgttgggtctgtttcagcagcggaattctctgaagacaaagggaaggtctgatcatatttgaagcagtttttctagtaagtgtaaggaatgaacatttcacttttaagtaagtggcttttgatttaagatcaactggataattcatggtggtcatgtttttggggagaggggatggcatttcatattcaaaggatttgacattttaaaagttataatgttatttaaaaagctataatatcatgaatatatttacatgtagttcatttatgtttacacaagctttcaaaggctgtctattctcagcagagaagttttaattaaaagtattttattgccattcgaaccctccttaagtgaaggcactgttcttcacttctctgtttttctttctcatgcactcttgataatcaacccagccttatttacaataaaaaagttattgctattatattttaagtgatttctcatacaccaccatgtcaccaaagctatacaataccagcatatagtcagtgctcagtaaattcttgtgaaaggagtggttcaatacggcccatgcattttatggttcagccataccgaaaaatgttttagcaaagacactgcctggtccacctttggaattttacccaccactcagaagtgtcgtttgcctttcaagtcttagcactttttagactgcttatttgtgagttttctcctccgtcccctatctatgcacagttccggtgtatgcattaggtgcttaa

SEQ ID NO: 685190 - DNA, 644 bp, Homo sapiens
aatcagttgcatttctatacattaacaatgaacagttttaaaagaaaattatgaaaataattgcatttataatagctttgaaaaaataaaatacttagcaatcaacttaagcaagtaggtaaaatacttttacaaagaaaactacaaaacattactgaggaattaaagaaaagaaagcataatgaaaacacatcctatgtatgtggattggaaatcaatattattaaaatgccagtacactacaaagcaatatatagattcagtgcaatccctatcaaaatcccagtgaatttttttgcagaaatagtaaaacccatctgatatgtgattatatatacagtaggccctccacatcaatcaaaaatactccaaaaaaaatccacaaagtttcaaaaagcaaaacttgaatttgttgtgcactaaacattacattgaattcatgcaagtgaagtgatgtgtaggcattgtattaaatattataagtgatctagagatggtttcaagtatatggaggatgtggataggttataatcaaatatgtcattttatrtaagggacttgagaatcttgagaatctgtggatttttgtttctgtgggggtgctggaatcagttccccttggagactcaggagtggctgcatgt

SEQ ID NO: 685191 - DNA, 621 bp, Homo sapiens
ctgggactcatgactaccagaaacccctcagaagtcagttttgcagagccaagctggagcctgctcataccccacacacacccctcaggcccatcagtggcaattgagagctagaaagacatgaccagtgtttctcagataggagtagcaccaggtggtcacaggaagatggagaaacccaaacaacagctaaaacgagaacagggtaaagaaaccacaaaataaccaaaaacccaaaataagggagagaaaacggcccaaatcctggtcacggtgacacgtccataacatgtctgtgtcttatttggatttccagacaaacccaaataagagagaaaggggcagtaactgggggtccctgagatcccctccttttccagaatacctggtgattattccacccactgattagacacccataaaattagaaacccaaaccctcggttcattctaactcctctgtgaaytctttcttggacggtatcaagaacctgggaacttgctgggctgggatctcactggcctctggagaccctcctgagccctctggcaacgtttccctcggccccggatccccgacccgctcaggctccacgaagacagcaatgtgtgtccccaacc

SEQ ID NO: 685192 - DNA, 591 bp, Homo sapiens
ccagctgctacggtttcaatatcccctctaaaacttgtgttgaaatttaatccccaatgyggcagtactgagaggtggagcctttaagaggtgattggatcatgcagtctctgccttcatgaatggattaatccatttgtggattaatggattaatgggctaagggattaatgtgttctcgtgagagtgggactagtagaggaagtgcggcctgagatcgcatgctcaacccccttgccacgtgaggccctgcaggactctgcagagtgtccgctgcagcaagaaggcccttaccagatgcggcccctccacctcggatttttcagcctccagaactatggaaacaaattcatctttttaaattgcccagcttcaggtattctatttataagcagcagaaaatcgacaaggacaccacctctttcatataaaagaatggaggagcagtcactgggcacaggagacagggagggatgagggctcttgcctgtctatacacataatctagtcaacaaattaagagaaagcggatttggttgctaacacttaaaaaaatgagagattatacattaaaagctcagacctgcaagt

SEQ ID NO: 685193 - DNA, 659 bp, Homo sapiens
ctttcacattggtgaaagcatccatgggctgagagaatggccctaactctctgggacagaagctcctgccttcaggacctttccagacctcttcctatccgcctcttcatctgggtattcttctgtatgctttataatatccttgattttaaaccattcaatgtaagcaaattctttttctgccttttatcagctgttctaataaattgtgaaacataaggagggtgacatgaaactcctaatgatgtgtagccaattgatcaaaagtatggatggcctggacttgtaatgggcatctgaagcaggagcagtcttgtgagactgagcctttatcctgtgggttgttacatgaactctggatagtttgcatcagaattgaattgagtctagttggtttccagtgagttccaatagtggatgttaatatgagaaaacaccacacatttcgtgtaagaagttttgtgagtagaaatgtatcatagtaatagtagtttgtctcaaaagtatgatttrctagactggctttgaatcaaggaaatgtgttttgggaagagaaatgataaaaagtcagaagataatagttggttcctggatgaatacctagtcacccatggtataaaactgtagctgtactgtaatctgttactaaaagtaaaaat

SEQ ID NO: 685194 - DNA, 604 bp, Homo sapiens
actcacaatttatctaaacattcagctgatgattgtacatgatccaaggacaatcttcttgaatgatttttttaaagttaacatttccagtcagagaggaaaaggatgatgagagaaaaggctgagaaaactgactataaaagctcacataaaatatgaagattaatgataacaaaagagtgttaaaaggtgtggctgaaagaaacatttaaaattaaaacatggaaagggcatgtaagaaattaaacgtaatcagtattttcattyaatttagtaagtatgtattgatcacttatggattataaaccttagaagtcagaatgttctccttctagcagtttacagtttaccataaactgtataaacaaactacggagcatttaacagaaaactaggaaaaatagaagtagacgagactactttcaggactcaaacttggaaatgtttttgttgattaagccataaaatacaggatgatcataggaaggtgaaggggagattccaggttgtaaaaacacaacaggccaagtttcaggtatttaggttaccaaaagattggaaaatcctggaagctgttaatgaggtattaaagtcaccagagcta

SEQ ID NO: 685195 - DNA, 2660 bp, Homo sapiens
tgaggacatttccaggcgttgatataaaatgttttaattttacaacatgataccaggagcaacgtttatagttctggtactatatcttgatagatattaacaagttagaaaatatgcagtatagaatggtacctgaagctctgtataactatgtgtgttcccttctctacatattatgacttttaaatgtctatctgacctatccagtttcattattgttctttatacttgtgaatgatataattatgtagctctgaggatttcacaaatacatttgctttataacaaatatatgtcactgtatcattcatgcagatatatttttaatttttgacaaatttatacttcaaagattaccgataatgaacttcaaaatgtttttattaccaatttttaaatgtatatctaacccaatcattgtaaccaaaaatgcatactctactatagtttatactttttaagtatatttataatggctgaaaagaccaatttttaaaggaataatgttaaayataagtagtatttttgtaaatttccagctatgaaaagctgagtatcagattaaaaagccttaatcatcagagatttaagtttactgtgttaagaacctcaatttttaaaactataaaaacacacttatgtacttttgttattaattcattttttaaaatgaatttcattttgatgaaagaataaaatgtatgagctatattttatatggaaattaaagttgtaattatttaacttctgttgatacgttaagaatacatattttcatgtgatagtcattttgaggcaattatccagaatttcctagatacagtagtggttgtgtggaagcatacaaaaaaaaacccagaaaatcaagggtcatataaggaagtctacattataaaaagaattaatatttgggtggccagatatatgaaaatttattgataacactaaacagtaaatgtgtataatttcatctacataggtagagcactaaataatgaaaataattaagatgtaggatattaagcaaaagataatctgtagaaggcctaagaatccaaacgtccagatataatgggaaatattttccacataaaaatgaaggacaacagtcagtagtaactcagatacctacatatgtcaaatattaatatttaatctcttgacaaaacccctcagttttaatatttaatctcttgacaaaacccctctaacaacaaaacaagtagtttcaaggtggtattcacatatttgctataaaattaaatgtcaagatgtttgactgatttctcacgattgacatccaataaatagtggtttgttttgtgtgacttgagtattaatatcctaaaatctgtttgggattgtgaaaactcagtgtataaaagacaatgttaagaatattagggagaaaagcagactagaactttgcaacactacattttggggttggtctccatcaacaaatattatgtgcatatttatatgtatcaaaatatacatttaagttgcttcattaatggagcaaacaccttcaactttctcaatcaacaatcaggacagatgtgacaaaattaagacaatataaaaccatagtcttcatgatttactaagtttcctgaaatatattctgggaattattactgttgagataactttagatcctcaaaattaatttagttagaattgcttcttatctaatttatgtatgtcacaagtgcatcatttagagcacttaaaaattaatacaatactcaataccgtgactcactgaagatttatacttctgcttcctgaaacttttgttattacctgagactaatgcggcaaaaatgaacagaaaccattcatgtctttaggatacatcagaatacaaggaaaagactactggcttgggaatcagaaatctccctcagactctacagtcaaaattatctttgaatcttcacaaatacaaacatcctggccctcacagttttgttactttttcaaggggtgagggctttaggtattgatttaatacctattttatgtccaacaaaatattatctcatgataattttagtcatatcatattaatataaatagaaaacttattaaataattttcaaaaatattttgttataatgaaaattatgagaaatttttgtaagaattaggcaagtgtaggctttatttactttttaaaaaatctaatgcaggtagccgatttaatattttattttttaacagaaggtaaactattaaaatagggatcattaaaatgttttaaagctacacacaatatctacctttttaaacttaacgaaagtagggctgtatttaaaaattaattttctttcaactgttctttctttaggtagtaactagaaaagccaggtaatgtgatgtctccaactttattattatttttcaagattgattgagctattgtagttcctttgtgtttccatataaattttggaatcagctgtcaacggtaaattctacagaatttctttctttttttttttgatttacatttgagtattttgcttttggggtaattttaaatgatttttttttaaaaaaattatgtgtccttttgtaccttgctaatatacacaaacacaattgatttaatgtgtttgtcttgtatcgtaagatctgcataaactcactta

SEQ ID NO: 685196 - DNA, 2660 bp, Homo sapiens
tgaggacatttccaggcgttgatataaaatgttttaattttacaacatgataccaggagcaacgtttatagttctggtactatatcttgatagatattaacaagttagaaaatatgcagtatagaatggtacctgaagctctgtataactatgtgtgttcccttctctacatattatgacttttaaatgtctatctgacctatccagtttcattattgttctttatacttgtgaatgatataattatgtagctctgaggatttcacaaatacatttgctttataacaaatatatgtcactgtatcattcatgcagatatatttttaatttttgacaaatttatacttcaaagattaccgataatgaacttcaaaatgtttttattaccaatttttaaatgtatatctaacccaatcattgtaaccaaaaatgcatactctactatagtttatactttttaagtatatttataatggctgaaaagaccaatttttaaaggaataatgttaaatataagtagtatttttgtaaatttccagctatgaaaagctgagtatcagattaaaaagccttaatcatcagagatttaagtttactgtgttaagaacctcaatttttaaaactataaaaacacacttatgtacttttgttattaattcattttttaaaatgaatttcattttgatgaaagaataaaatgtatgagctatattttatatggaaattaaagttgtaattatttaacttctgttgatacgttaagaatacatattttcatgtgatagtcattttgaggcaattatccagaatttcctagatacagtagtggttgtgtggaagcatacaaaaaaaamcccagaaaatcaagggtcatataaggaagtctacattataaaaagaattaatatttgggtggccagatatatgaaaatttattgataacactaaacagtaaatgtgtataatttcatctacataggtagagcactaaataatgaaaataattaagatgtaggatattaagcaaaagataatctgtagaaggcctaagaatccaaacgtccagatataatgggaaatattttccacataaaaatgaaggacaacagtcagtagtaactcagatacctacatatgtcaaatattaatatttaatctcttgacaaaacccctcagttttaatatttaatctcttgacaaaacccctctaacaacaaaacaagtagtttcaaggtggtattcacatatttgctataaaattaaatgtcaagatgtttgactgatttctcacgattgacatccaataaatagtggtttgttttgtgtgacttgagtattaatatcctaaaatctgtttgggattgtgaaaactcagtgtataaaagacaatgttaagaatattagggagaaaagcagactagaactttgcaacactacattttggggttggtctccatcaacaaatattatgtgcatatttatatgtatcaaaatatacatttaagttgcttcattaatggagcaaacaccttcaactttctcaatcaacaatcaggacagatgtgacaaaattaagacaatataaaaccatagtcttcatgatttactaagtttcctgaaatatattctgggaattattactgttgagataactttagatcctcaaaattaatttagttagaattgcttcttatctaatttatgtatgtcacaagtgcatcatttagagcacttaaaaattaatacaatactcaataccgtgactcactgaagatttatacttctgcttcctgaaacttttgttattacctgagactaatgcggcaaaaatgaacagaaaccattcatgtctttaggatacatcagaatacaaggaaaagactactggcttgggaatcagaaatctccctcagactctacagtcaaaattatctttgaatcttcacaaatacaaacatcctggccctcacagttttgttactttttcaaggggtgagggctttaggtattgatttaatacctattttatgtccaacaaaatattatctcatgataattttagtcatatcatattaatataaatagaaaacttattaaataattttcaaaaatattttgttataatgaaaattatgagaaatttttgtaagaattaggcaagtgtaggctttatttactttttaaaaaatctaatgcaggtagccgatttaatattttattttttaacagaaggtaaactattaaaatagggatcattaaaatgttttaaagctacacacaatatctacctttttaaacttaacgaaagtagggctgtatttaaaaattaattttctttcaactgttctttctttaggtagtaactagaaaagccaggtaatgtgatgtctccaactttattattatttttcaagattgattgagctattgtagttcctttgtgtttccatataaattttggaatcagctgtcaacggtaaattctacagaatttctttctttttttttttgatttacatttgagtattttgcttttggggtaattttaaatgatttttttttaaaaaaattatgtgtccttttgtaccttgctaatatacacaaacacaattgatttaatgtgtttgtcttgtatcgtaagatctgcataaactcactta

SEQ ID NO: 685197 - DNA, 2660 bp, Homo sapiens
tgaggacatttccaggcgttgatataaaatgttttaattttacaacatgataccaggagcaacgtttatagttctggtactatatcttgatagatattaacaagttagaaaatatgcagtatagaatggtacctgaagctctgtataactatgtgtgttcccttctctacatattatgacttttaaatgtctatctgacctatccagtttcattattgttctttatacttgtgaatgatataattatgtagctctgaggatttcacaaatacatttgctttataacaaatatatgtcactgtatcattcatgcagatatatttttaatttttgacaaatttatacttcaaagattaccgataatgaacttcaaaatgtttttattaccaatttttaaatgtatatctaacccaatcattgtaaccaaaaatgcatactctactatagtttatactttttaagtatatttataatggctgaaaagaccaatttttaaaggaataatgttaaatataagtagtatttttgtaaatttccagctatgaaaagctgagtatcagattaaaaagccttaatcatcagagatttaagtttactgtgttaagaacctcaatttttaaaactataaaaacacacttatgtacttttgttattaattcattttttaaaatgaatttcattttgatgaaagaataaaatgtatgagctatattttatatggaaattaaagttgtaattatttaacttctgttgatacgttaagaatacatattttcatgtgatagtcattttgaggcaattatccagaatttcctagatacagtagtggttgtgtggaagcatacaaaaaaaaacccagaaaatcaagggtcatataaggaagtctacattataaaaagaattaatatttgggtggccagatatatgaaaatttattgataacactaaacagtaaatgtgtataatttcatctacataggtagagcactaaataatgaarataattaagatgtaggatattaagcaaaagataatctgtagaaggcctaagaatccaaacgtccagatataatgggaaatattttccacataaaaatgaaggacaacagtcagtagtaactcagatacctacatatgtcaaatattaatatttaatctcttgacaaaacccctcagttttaatatttaatctcttgacaaaacccctctaacaacaaaacaagtagtttcaaggtggtattcacatatttgctataaaattaaatgtcaagatgtttgactgatttctcacgattgacatccaataaatagtggtttgttttgtgtgacttgagtattaatatcctaaaatctgtttgggattgtgaaaactcagtgtataaaagacaatgttaagaatattagggagaaaagcagactagaactttgcaacactacattttggggttggtctccatcaacaaatattatgtgcatatttatatgtatcaaaatatacatttaagttgcttcattaatggagcaaacaccttcaactttctcaatcaacaatcaggacagatgtgacaaaattaagacaatataaaaccatagtcttcatgatttactaagtttcctgaaatatattctgggaattattactgttgagataactttagatcctcaaaattaatttagttagaattgcttcttatctaatttatgtatgtcacaagtgcatcatttagagcacttaaaaattaatacaatactcaataccgtgactcactgaagatttatacttctgcttcctgaaacttttgttattacctgagactaatgcggcaaaaatgaacagaaaccattcatgtctttaggatacatcagaatacaaggaaaagactactggcttgggaatcagaaatctccctcagactctacagtcaaaattatctttgaatcttcacaaatacaaacatcctggccctcacagttttgttactttttcaaggggtgagggctttaggtattgatttaatacctattttatgtccaacaaaatattatctcatgataattttagtcatatcatattaatataaatagaaaacttattaaataattttcaaaaatattttgttataatgaaaattatgagaaatttttgtaagaattaggcaagtgtaggctttatttactttttaaaaaatctaatgcaggtagccgatttaatattttattttttaacagaaggtaaactattaaaatagggatcattaaaatgttttaaagctacacacaatatctacctttttaaacttaacgaaagtagggctgtatttaaaaattaattttctttcaactgttctttctttaggtagtaactagaaaagccaggtaatgtgatgtctccaactttattattatttttcaagattgattgagctattgtagttcctttgtgtttccatataaattttggaatcagctgtcaacggtaaattctacagaatttctttctttttttttttgatttacatttgagtattttgcttttggggtaattttaaatgatttttttttaaaaaaattatgtgtccttttgtaccttgctaatatacacaaacacaattgatttaatgtgtttgtcttgtatcgtaagatctgcataaactcactta

SEQ ID NO: 685198 - DNA, 657 bp, Homo sapiens
gacatgttaaacaataaatatgattagaaaactgtacatctgcatgttaaaaatgtaaaagtaaccactagaaaaatatagatagaaggtataatttccaaaccactagaggaaaaacaaaatagaaccaagacagtttgatcaatttaagagtgaaagaaaacaaaatcataattaactgaaaatacaaaggaagatggctgaataagtcccaacagatcaacaactacaataaatgtcaatgtyttcaactcacctattaagaggcagagagtctcagataggcttttgatgaagtccagcttctatgtgttgataagtaaggtgaaagcatcacaagagctccctggggttgaagttcctgcctgccaacttctctgcactcctccttacctctcccatcctgatgctcctagccttaaatcctcagagctaacgagctgggtcccttgctctctgggtagctgaggagcaccctgtggtcactccagatagagtgggctggttgtcgcagtcacttgtccttcacctcctttctgcaaatcaggaaggatgctcattcctgaattgaatcacattgcaggacgaggtaactggctacaagttgctggagaccctaggacagctgcacactgccctcttggaggattacagatc

SEQ ID NO: 685199 - DNA, 657 bp, Homo sapiens
gacatgttaaacaataaatatgattagaaaactgtacatctgcatgttaaaaatgtaaaagtaaccactagaaaaatatagatagaaggtataatttccaaaccactagaggaaaaacaaaatagaaccaagacagtttgatcaatttaagagtgaaagaaaacaaaatcataattaactgaaaatacaaaggaagatggctgaataagtcccaacagatcaacaactacaataaatgtcaatgttttcaactcacctattaagaggcagagagtctcagataggcttttgatgaagtccagcttctatgtgttgataagtaagrtgaaagcatcacaagagctccctggggttgaagttcctgcctgccaacttctctgcactcctccttacctctcccatcctgatgctcctagccttaaatcctcagagctaacgagctgggtcccttgctctctgggtagctgaggagcaccctgtggtcactccagatagagtgggctggttgtcgcagtcacttgtccttcacctcctttctgcaaatcaggaaggatgctcattcctgaattgaatcacattgcaggacgaggtaactggctacaagttgctggagaccctaggacagctgcacactgccctcttggaggattacagatc

SEQ ID NO: 685200 - DNA, 552 bp, Homo sapiens
ccctatgtgtcatgggagggaccctatgggaggtatttggatcatggaagccgttaccctcatgctgttctcattacagtgagtgagttctcacaaaatctggtggttttataagaggattttctcacttttgctcattcttctctttcctgccaccatgtgaagaaggacatattttcttccccrtctgccatgattgtaagtttcttcagatctccacagccctgtggaagtgtgagtcagttaaatctttttcctttataaattacccagtctcaggtatgtctttattagcagtgtgagaatgaactaatacagagtgacgctggttctccaggtgccatccccataactggttgttgagtatcccaaatgagtttacttctgaagtctgtgggccaggatactgaggagaacttccttaaataccactttgatactaatttttctctgactgcaggaaataccagttatgtgccaactaatgtcacaccaggcctccatggtccttagaacccatcaccgttgttccttcaaattgagcaaggatgt

SEQ ID NO: 685201 - DNA, 722 bp, Homo sapiens
tgaactctctgtttacaggaaccaatggctacttgagtgaccattttaaatcttccagggaaaagagagtggtgaagacaaatgtgtccatttaaattccagactgataaaggaagtggaaagctcacaagagccacgtttaaaaccaccttgtcctttttgttggttttgttgtagctgttgagaaaaaattggacccccatcagggaataaacttttttcaggtggagagaaaatgtacctggggcaattctaaaccagagtttcaaastttgttccatttatttataattttgggaaatttcatttcactcagtcctgtggatgataactagaaggatgtttaacgtttcaaatccaagttttatttgaggtgaaaaactttgtaatgttccttctcacccgcctcctggtcacgcttctactccatcccatctctttttcttccagccttctcttcatctttgtcatttccccagtttgagaaacaatgcaggatgtgatttaataaggaataaacacctgacacaagtacaagccgtcttcttctcttgtaaaattacaaaaataataaaataaaataacaaaagcaattgttaaaaacaacaacaacaacaatgtgatttataaagtataaagtcccttcccacatccttgtagccccatttgtcagttatcagtctagacagattcatctaattcggtataatggagctttccgc

SEQ ID NO: 685202 - DNA, 622 bp, Homo sapiens
tctgtctcaaaaaaaacaaaaaacaaggaatccagaggaagataaagggaatccagaggacctaaacactagctcatttggagaatggttgaaggagctggcagatttaacctggaaaagagaaatctaaaggcgaagtaataacttttaaaataattaaagggcttcaagcagaagtagatggaaacatattctttctgacttagaaagcaaaacaggacccaaagacagaaatgacagaggtgctgttcagctcagtagtagaaaggactctcagtcccgtggagctcttcacctaagggaatgggccgtgtagtgaggcggtgcaggcagccaggcmctgcagaagctgagcagaagctggatgactcctgggtccaggattcctgtactgggttgggctgggattagctgccctatgaggtttcttctgagtcaaactttaagacagccctgattttcataatcctgctaaaattgttttgtccttgttaaatcatattttatcaatctcaagtccctcaaaatggctgaagaggtgattatgcctgaatacattaaaagccagaggaaatagtgaatttagggctcttggagctgttttctttttgtcattagattc

SEQ ID NO: 685203 - DNA, 642 bp, Homo sapiens
tttttataaacttttattctatctttttcttgctaacattctgactgaaataacaagatgagtaagaaattcttcatggggaaattagcctctttagatttccattatgatatttccaaaggtaattttatttttcatttgggctattgatatattcttaaaacttccagataaatttggaaatttagcagtattcattgggcaacaatattttgttgatgtttgtttttcaaattatctaaaccaaaaagcttatttaagttctactatcccaggtttctatgtagaactagaaattgttagtccaaattttatttaaaaatgatttataaaggatgattcgactctatctttgmaaacaaataatttccagtttgaataatgatatgttaattaaattaaaattgattaagtcaggcggcattacatatttgctagtgcttcaattttagtcaggagaggaatggatatgctttaatattcaaatgccactgtcatgtttaaattcattgctgtgctgtggaaagagaaacaacagaagcagctgtgtgctcccaccgcattgagcagagaattcaataactctcagagtaggcaggattagctactcactgtcaaacacagttgcccaattctgtgcag

SEQ ID NO: 685204 - DNA, 1394 bp, Homo sapiens
gggtctgatcctccaagatctctgctatggcatccgtggtaatgagatcatcagatgacctgtgcaggttttctgtgacgtgaataactaacccaaaccaaacaaagctttggtttggtgaatagaggcctgatttgaaccaccgtagtagacatagcttatcttccaattcataggcctgagattggtaacagaaccagatgcacagaatggaaaggacaccaaatgcctacaagraaggacccatgtaacacctcagttacatacttgaaacttccttcttgctcaaaggaactatttacctggatagctgtgtacgggggcaagagagagacataaacctttcagggagtagcgaatattggctctgaacttacatgagatacataaatctattgtagttcctgattgcagtgggtctaagggtcatcaggtggtaagtaggatttttaaactgggtctatttataaaaagcgcccgtaattatttctccagatcctgaatacagagttggactgggtaggtccccatagtggctctctgacacacacagtaagaatgactgtggttggaagagccaagatgggaaccactgaagtttcttctccctaccagaataataaatcaaaaccaataccacacctccaggggaatcacaaagattagccccatagttaaagattttgaaacagcagctaagttcctcagaatggcccgtatgaggatagatggattctggaaaccacagtggattaaggaagcctaattagttgataactcctcccacagtgacaggccaagacatagtctcccgtttggagcatattaacacaggccctggcaccagcaactgatctagcaagtgtattttcttacccattctgataaagggtattccagaaatagttagctttcacctagtagaaatatatacttttaccatgctgcctcagggatatattgagtccgtccggtagggatcttgaccatctcaccaacccacaagacacaaggctggtctacattgaatatagcacacatataaggcctgggaaataagaagtaaccggtatcacagatgttgatctagatatcttagacccatatgtgctagcgggtgagaaataaatcctatgaaaatacaaggacttgctacctcagttaatcttctgggggagggttggacgccatggctcatgcctgtaatcccagtgtttggggaggccaaggtgggagagtcacttgaaactaggaatttgagactagcctgggcaacataatgagaccctgtctccacaaaaaatttaaatattggctggatgtggtggtgcacacctgtacttctagctacttaggaggctgaggtgggagagtcactagatctggagaattca

SEQ ID NO: 685205 - DNA, 1394 bp, Homo sapiens
gggtctgatcctccaagatctctgctatggcatccgtggtaatgagatcatcagatgacctgtgcaggttttctgtgacgtgaataactaacccaaaccaaacaaagctttggtttggtgaatagaggcctgatttgaaccaccgtagtagacatagcttatcttccaattcataggcctgagattggtaacagaaccagatgcacagaatggaaaggacaccaaatgcctacaaggaaggacccatgtaacacctcagttacatacttgaaacttccttcttgctcaaaggaactatttacctggatagctgtgtacgggggcaagagagagacataaacctttcagggagtagcgaatattggctctgaacttacatgagatacataaatctattgtagttcctgattgcagtgggtctaagggtcatcaggtggtaagtaggatttttaaactgggtctatttataaaaagcgcccgtaattatttctccagatcctgaatacagagttggactgggtaggtccccatagtggctctctgacacacacagtaagaatgactgtggttggaagagccaagatgggaaccactgaagtttcttctccctaccagaataataaatcaaaaccaataccacacctccaggggaatcacaaagattagccccatagttaaagattttgaaacagcagctaagttcctcagaatggcccgtatgaggatagatggattctggaaaccacagtggattaaggaagcctaattagttgataactcctcccacagtgacaggccaagacatagtctcccgtttggagcatattaacacaggccctggcaccagcaactgatctagcaagtgtattttcttacccattctgataaagggtattccagaaatagttagctttcacctagtagaaatatatacttttaccatgctgcctcagggatatattgagtccgtccggtagggatcttgaccatctcaccaacccacaagacacaaggctggtctacattgaatatagcacasatataaggcctgggaaataagaagtaaccggtatcacagatgttgatctagatatcttagacccatatgtgctagcgggtgagaaataaatcctatgaaaatacaaggacttgctacctcagttaatcttctgggggagggttggacgccatggctcatgcctgtaatcccagtgtttggggaggccaaggtgggagagtcacttgaaactaggaatttgagactagcctgggcaacataatgagaccctgtctccacaaaaaatttaaatattggctggatgtggtggtgcacacctgtacttctagctacttaggaggctgaggtgggagagtcactagatctggagaattca

SEQ ID NO: 685206 - DNA, 1008 bp, Homo sapiens
gcatatctacaaggtactttgattaaataatcttttctcctttttaactctttgacagttaagagccaattattctgaacacacattcgactcagtcagttttcctaaaatgaaaatgtatggcagaatagaatcactatctggcctgtgtaccctgagatctaagcacgtattttcagtctgcagtaaccctaactatcattactgccatttcgatccaattttttttcccataatttggctgacaaaaagaaaaacatagtatcctaatttaaaatctttcaggtaaatgcagccttatattttatacctcttccacacaaagcagataataaagcattttccattgttaatttagttctcaatgtggtattgaaattaagaactgagacttctgcatccaccttatctatcaggaccaaaaataaaggcagcctacattcacattattttactgtttgttctaggaagttcttgtttatgaacttaacgttgtaaatcagaacgaaaaacttttttttttttttttttttcaraaaatggctgaaaattagtttctagaaacattaaactcctaaaactgggtaaatggctcaattatcaaacaactcacttcaagattcctgcctttctgtgttcaccaatcctaaactattacgtcttgaaatgtgcctaaccaaaccagatcctcacattgaaagttcagtcttatctactcaaacctagatttccaaccctattcatatttcgccttaatcctctccttctggacactccgactcttgtaaaatgttgtcttttctgactattataggtaataaactcagctttgcttaacgggttatgctgtgagtcttctgagaagttgaaatccgacaaaattcatcttccatatgtaacaataaaaagtcaccatattggtttctgttggtcttgctaacggctaatttaagtatgcatttaattttgacgtgataatctagtttcagtgttttaaaattaaatcaa

SEQ ID NO: 685207 - DNA, 3517 bp, Homo sapiens
gctgtacattagtggtatgcaatgtgctaattaggcacaaacctaaatcacatgcccattactgccaagcattgattatgtgttggttgttaagaaagaagttattttctggatgacagaaaatgatcaaagttggctaagtgacacaaaccacagatctattacacaatgagtgtgcattcataataactatgtttatttatggagggtattatttgtaaaaaaaaaaaattgcctctccaaactcaccataagtttggcatttcataatgcaggtaagtacaggaaaattgactatgtgcacatgtatgtgtgcacctgtgtgtttgtgtgtggggggggggtgtactggtggcaaaaaaaatgagtctgtgataggaaatatgcttttagtaattgttaaaattctgagcagagtttgctgtttgtctggggtcctgtcatctacacgagtcatgtttccactggagaaaaatgattttgtgtggggtctcaagatattcgatgcccattgaggaagcttgccaggagaaatgtgtgcttttgccaggatgtgtagtcagagatttattttactgagagggggaaaaacatgttggcagcagatcagtctgacactgctgagaagatatagatatacgccctgggagaatcacaaatctccattaaagtttcaagtctcctgttgagttgttaagaataatcagattggccaaggagcagtcggaatttacaagtaagtctgccagtaaggctgaactctaaacctacaacttaacatcaatcagtgttagaacatgaatgtggagagtacattttttattgctgtggttgttttcttcaaactagtgaccctgcctcacttctcatcacgattaaccaaattttcctcatctaacatcatgggcaatttgaaagtccacctcttctatgaattatgaattcctcccaaacaatattagttttacacacacagacacaaatgcacacacatacacatacagatagatagatagatagatagatagatagatagatagatagacagacagatagacatatcaggcagtgaaagaacgaagaaggagtatgtttcagagatttgggttgaaattctgactcttctacataacagtatttaattttggagctggttacattagctatctgtaatttacttttgtcatctgaaataattttttaaaaatcctacatgtccaaaataagttgttttaatatcaaatactataatacatattaaaaatgaagtaccttccacagagtatgtatccaataaagtgatcttgagtatgatgatgatggaggtaacgtaactaccatgatttagtaagcattttttaattctccaccctacctacatttcatcctgttatcagatactaccattaaccatcaaaatggctgtgtactctttttagaagaaaatattaaaatttccttatttacccaattactttgaataagactgagtatatatttggtatttatgtatctcattgaattagtgtctaagtattcccattttgagcattttggaattcatatataaactggatgagacaacaaagcaagaatagagtaaaatcccagaggttaatcacccacacataatgaaaagaaaaaataagaagatgttaaggtagtaaggctatgatgaaaggaagccatcccagtatcatgaactgattaattgataaaatgtgatatatccatataataatattggtatttatatgtcartaaggatgaatgaaggaatgatacatggtacacgaggaataaaccttaaaaatatgaatgtaactgaaagaagacagtcataaagagctgcatatggcataattcaatctataggaaatgttcaaataggaaaatccatagaaatagaaagtagattagtgattgctagagactggggggaggaaaatcagaaatgactgtgtactagatttccctttggagatgatgaactcatttcagaaatgaacagcaatgatggttagacaattctatgaatatactaaaaacaatgaattgtacactttaaaaaggcaaatttcatagctgtttttatcacaaggaggaaaaaatgggtaactatgtgagatgatgaatatgctaatttgttcccctatactaactattttactatgtatgcagatatatatatatataatcttataacattatgatgtatacatacattaaatagacacaataaaaattatttttaaaaaataaaagggtgaattttatgctatatgattttatatcaataaatttattttttaaaggtatatgaaaaaatagtgatgaccaaaacggaaacaactgagatgacaaaagtttcaaatacaaaactttagatatattttggctgtaaaaccgaaactactggtgtaatatgaaacaaaacaatgtgccatttgcctggtatttgtttcatctactccaagtaaagtttaactttttaccaactttgaaacaaaaatggtttgttcttgtgttatagttgctatgtgtaatccttctcatttaatttgaatattctcatccttacctctactaatatagggctctacaaatagtatttatattctgaataagttgacaatattaaatacattaatcatatgcaggtgatatgttcatataatgaagtatttttatcaataaaagagaatgaaataatgatacatagtacaagatagatgaaccctgaaaatattaatctaactgaaggaaaactgtcaaaaagagttaattactttatcagtaaattttatacactgtttctataaaggacccctgagaaaaaagtcgacaaaataattggctccaaaatgttttgtagagctggacggaaccaaggaggtcatcttgtccaacgacttcatttcatccatgatgaaaaagtcatcaaaaaagcctcattgaacccagtgaagaatcagcaactaaaactcctgaattacgattccaagtccagcctacttactgcaataccggttatctctgaatgaatgaacgatgcttatactgcttccttaagcttaccctccaacctgtgtgttcttttgcctttctacttagcttcaagctttgaagaatgtactttatgaagctaagagagtcactattaaatgataattaagccacagttgagcaactctttattcatgacatagaagatcttccctaatactgttctatgatggacccagttgacccacagtagtatgttgaaaggggcatatgagtaattgcacttcatctcttcttgaattactggaggcaaatgtgaagcatgcagttgtttagctccttttgaacatatattttcatactttatcttcttagacacagtttatggctcacatatctcatcttactaaaagtaccctgggttttcttaattttgtcacttcctgccatgctagaaatataattgttctaatacttagcatcatatttaattcaagccacctgtttgcac

SEQ ID NO: 685208 - DNA, 643 bp, Homo sapiens
atggaaaggaggcatgattgatttgttggtcaccrcacagcatcaaatgcagctttctaagcaggcagcaaacacaagcacataatattgcattggaaggacaagcaagaagaaaagcatagctctagagaaagggtcatcaaactttttctgtgaagagacagacagtaaatattttagctttcgcaggccatgtatggtctttgctacattcttctttctttcttcctccatttttcccttcttcccaacttcctttcctcctctttcctttctccctctgtgtttctctccttcttgtccataatccatccctcccttctttattttattgcttgcagattgtgcaaaaacaagccaaagtctggatttagccaatgaccactacgtttgctcacctctgctgtagataatggttttattttcagaagtatctctacttatgacaagtgataatggctttccatttataagagtgatgaaaaatgtatcttaaaacttaaataaaatggagtaaattaagttagaaaaagaagttaaacaatacttcaagaaggaccctgatatggtaaaaatggtcaacatgatacagaattgcagcagtttgggaaacatggtcttaggaaacttagtagatatgggg

SEQ ID NO: 685209 - DNA, 654 bp, Homo sapiens
taatttgagaatgatggataacacttttaagatgatgtatttgatatatctaatctttcccttctttcttttgaaatgctttttttttcaaaaacaaggaaacaaggaaattttcttttgaaagaattttgggcttacataaatatcgtaaraaagtatagagagtccacatttacccatcacccaacttcccctaagttaaaaattatacaaccatgataaaactatcgaaaccagaaaattaacattagtagaatattactaaaactacaaatactattcagtttcttcagttttttcctaatgactttttttctgtccaatattctatccagaatcccacatttcatttagttatcatatgtcttgaatttcgtctaaattctttagtctatctggacccttttgaaaagtattagttagttaccttgtagagatttctcagtttgggtttgtctcatgttttctcatgacagttttgaggctatgaagttttggcgagatcacagaggtgatgtgccttttctagtgcatcatattggggtacaaacattggcatgtcctattactgaaagtgttaacatcgatcacttggctcatgtggtgtctgccaggtttctgtattgtgaagtggagccctggcaaattatcttg

SEQ ID NO: 685210 - DNA, 654 bp, Homo sapiens
taatttgagaatgatggataacacttttaagatgatgtatttgatatatctaatctttcccttctttcttttgaaatgctttttttttcaaaaacaaggaaacaaggaaattttcttttgaaagaattttgggcttacataaatatcgtaagaaagtatagagagtccacatttacccatcacccaacttcccctaagttaaaaattatacaaccrtgataaaactatcgaaaccagaaaattaacattagtagaatattactaaaactacaaatactattcagtttcttcagttttttcctaatgactttttttctgtccaatattctatccagaatcccacatttcatttagttatcatatgtcttgaatttcgtctaaattctttagtctatctggacccttttgaaaagtattagttagttaccttgtagagatttctcagtttgggtttgtctcatgttttctcatgacagttttgaggctatgaagttttggcgagatcacagaggtgatgtgccttttctagtgcatcatattggggtacaaacattggcatgtcctattactgaaagtgttaacatcgatcacttggctcatgtggtgtctgccaggtttctgtattgtgaagtggagccctggcaaattatcttg

SEQ ID NO: 685211 - DNA, 599 bp, Homo sapiens
ccatgaagcatgtagaagaaaactacaagcccacacttcaaaatgaattcgccatgcccatgcctcaagcaagcatcaaaaatacaaacccaccttaaatcagagatttgaaaacagaaatgggcaaataacagggagaaataaaaagttgattgaactcaaggatgaggtaaccaagttttctcagaaataaggggttgtttaatgggtacaaaaaatagggttagttagaagtaataagttctagtgtttgatagcatgatagggccactataattaacaataacttattgtatattttaaaataactggaagaaaggacttggaatgttcccaaaacaagtaacaayaaatgtttgaggttatggatatcctaattaccctgatttcatcattacatattgtattattgtatcaaaatatcacatgtcccccataaatatgcaacaactattatgtactcagagaaatcactttacaaaagaaatgagaaataaattaaaagatgcccaaaagacaatagacaaaaatgaaaatataacaagggtcactaaataaagatatcaaagcaagtgagagaataaaaatgaataagtaaa

SEQ ID NO: 685212 - DNA, 2010 bp, Homo sapiens
gacagcaccaagccatgtatgtgggatccatccccatgacccaaacacctcctaccaagccctgcctccaacaatggggatcaaatttcaacataagatttggcaggaacaaatatccaaactatatgtaccctgccccatttcctaaggccrgcctggatatactcattgaagctatttgagaaggccctgaagaaaaggaccatgtcaagagagtttactaaaacaaccactttgcgtacatctggtttacataggcaatcgttaattttttgcatctggaactgaggttcaaactctgctcttccttccaaaagtgggttttacacacacataagtgagatatcaatgtttaatatgttttttaaaatgagctgctgttcatcaatggatcctagcagtggatcaaggaacgttgttgtgtttatgtgtttctctattgttctaacatgtttgcagcactagtgggcattgtctattagcttcattgtacactcaggcagggtaaagagacatgcaaccacaatagtctaacattccctttgcatgtgttcttcaggggcatcattgttttatgcggatttcccctgaaggcctgatataaaaagaacgtgttttcatgtggattatttgtttttctgctttgttcatctttgcaatcagatgtcaatgataggtgctttccctgaagtgatctgggtctgattctagttgtatctgaatgagctatcaatgttgctgtggagtatcagatgaatgcagagaatacatcccaggtactctcgattcaaaaagcaccatgtctcaggtgctttaggaaatcctttctaaggccagggaagacttagcagtctctccttaaatcaagaatatatcattcaagccaaatgaatattatacactatacagcacacatattgatatgctcttgaatgtatcttattacttgacagcaaacatataatttaaaaattattgaaactgtgtaaaaaggaagcacgtagaaataaaattttaaaaatatgtttgctataaacaaatatcatttaaatattatttttacttctctgcataatcacctaaacatttcacacattattgagtgaatatatatgagcaatattaattttatatttcaaatacacctttggaactttggttgtaaagccatgtttctaatattatccaactattacattaccatccatatcttgtatcaccatttatatattaatatatgcatacatattattagcctcaacctccctggctcaagcaatcctcctacctcaggctcccatgtaactggaaccaaagacgttcgccaccatgactgactcatttttgcattttttgtagagacagcgttttgctatgttgccaatgcattctcaaactcctgggctaaagggatccgcctgccttggcctcccaatgtactgggattacaggcctgagccaccctgcctggcccacttaatccttaatgtggcatgtgcttcatactctcctggctccccagggctctttgatctgggccactatttatgtcattacatagtgctactgtctgaatatcaatgtcccccaaaaattcctgtgttaaaatcctcacccccaaggcgatggtgttaggaggtgtggcctttgggaagtgatgaggtcatgagggtgagcttcacagataggactactgcccttataaaaggcactacagagagcttcctcgccccttctgccaggtgaggacacagtgagaaggctctatctatgtaccaggaagcaggttcccaccagacacagaatctaccattacttgatcttggactttccggactctagatctgtgagcaataaacgtctgttgtttaaaagccaccctatctatgatgttttgttagagaagaaacaaacaaaaaaatgaatggaacatacttcaccaccaaaatcattaacaacgttgaaccccatgccaaattattccatttctatacatgcaaagaatcccat

SEQ ID NO: 685213 - DNA, 2010 bp, Homo sapiens
gacagcaccaagccatgtatgtgggatccatccccatgacccaaacacctcctaccaagccctgcctccaacaatggggatcaaatttcaacataagatttggcaggaacaaatatccaaactatatgtaccctgccccatttcctaaggccggcctggatatactcattgaagctatttgagaaggccctgaagaaaaggacmatgtcaagagagtttactaaaacaaccactttgcgtacatctggtttacataggcaatcgttaattttttgcatctggaactgaggttcaaactctgctcttccttccaaaagtgggttttacacacacataagtgagatatcaatgtttaatatgttttttaaaatgagctgctgttcatcaatggatcctagcagtggatcaaggaacgttgttgtgtttatgtgtttctctattgttctaacatgtttgcagcactagtgggcattgtctattagcttcattgtacactcaggcagggtaaagagacatgcaaccacaatagtctaacattccctttgcatgtgttcttcaggggcatcattgttttatgcggatttcccctgaaggcctgatataaaaagaacgtgttttcatgtggattatttgtttttctgctttgttcatctttgcaatcagatgtcaatgataggtgctttccctgaagtgatctgggtctgattctagttgtatctgaatgagctatcaatgttgctgtggagtatcagatgaatgcagagaatacatcccaggtactctcgattcaaaaagcaccatgtctcaggtgctttaggaaatcctttctaaggccagggaagacttagcagtctctccttaaatcaagaatatatcattcaagccaaatgaatattatacactatacagcacacatattgatatgctcttgaatgtatcttattacttgacagcaaacatataatttaaaaattattgaaactgtgtaaaaaggaagcacgtagaaataaaattttaaaaatatgtttgctataaacaaatatcatttaaatattatttttacttctctgcataatcacctaaacatttcacacattattgagtgaatatatatgagcaatattaattttatatttcaaatacacctttggaactttggttgtaaagccatgtttctaatattatccaactattacattaccatccatatcttgtatcaccatttatatattaatatatgcatacatattattagcctcaacctccctggctcaagcaatcctcctacctcaggctcccatgtaactggaaccaaagacgttcgccaccatgactgactcatttttgcattttttgtagagacagcgttttgctatgttgccaatgcattctcaaactcctgggctaaagggatccgcctgccttggcctcccaatgtactgggattacaggcctgagccaccctgcctggcccacttaatccttaatgtggcatgtgcttcatactctcctggctccccagggctctttgatctgggccactatttatgtcattacatagtgctactgtctgaatatcaatgtcccccaaaaattcctgtgttaaaatcctcacccccaaggcgatggtgttaggaggtgtggcctttgggaagtgatgaggtcatgagggtgagcttcacagataggactactgcccttataaaaggcactacagagagcttcctcgccccttctgccaggtgaggacacagtgagaaggctctatctatgtaccaggaagcaggttcccaccagacacagaatctaccattacttgatcttggactttccggactctagatctgtgagcaataaacgtctgttgtttaaaagccaccctatctatgatgttttgttagagaagaaacaaacaaaaaaatgaatggaacatacttcaccaccaaaatcattaacaacgttgaaccccatgccaaattattccatttctatacatgcaaagaatcccat

SEQ ID NO: 685214 - DNA, 2010 bp, Homo sapiens
gacagcaccaagccatgtatgtgggatccatccccatgacccaaacacctcctaccaagccctgcctccaacaatggggatcaaatttcaacataagatttggcaggaacaaatatccaaactatatgtaccctgccccatttcctaaggccggcctggatatactcattgaagctatttgagaaggccctgaagaaaaggaccatgtcaagagagtttactaaaacaaccactttgcgtacatctggtttacataggcaatcgttaattttttgcatctggaactgaggttcaaactctgctcttccttccaaaagtgggttttacacacacataagtgagatatcaatgtttaatatgttttttaaaatgagctgctgttcatcaatggatcctagcagtggatcaaggaacgttgttgtgtttatgtgtttctctattgttctaacatgtttgcagcactagtgggcattgtctattagcttcattgtacactcaggcagggtaaagagacatgcaaccacaatagtctaacattccctttgcatgtgttcttcaggggcatcattgttttatgcggatttcccctgaaggcctgatataaaaagaacgtgttttcatgtggattatttgtttttctgctttgttcatctttgcaatcagatgtcaatgataggtgctttccctgaagtgatctgggtctgattctagttgtatctgaatgagctatcaatgttgctgtggagtatcagatgaatgcagagaatacatcccaggtactctcgattcaaaaagcaccatgtctcaggtgctttaggaaatcctttctaaggccagggaagacttagcagtctctccttaaatcaagaatatatcattcaagccaaatgaatattatacactatacagcacacatattgatatgctcttgaatgtatcttattacttgacagcaaacatataatttaaaaattattgaaactgtgtaaaaaggaagcacgtagaaataaaattttaaaaatatgtttgctataaacaaatatcatttaaatattatttttacttctctgcataatcacctaaacatttcacacattattgagtgaatatatatgagcaatattaattttatatttcaaatacacctttggaactttggttgtaaagccatgtttctaatattatccaactattacattaccatccatatcttgtatcaccatttatatattaatatatgcatacatattattagcctcaacctccctggctcaagcaatcctcctacctcaggctcccatgtaactggaaccaaagacgttcgccaccatgactgactcatttttgcattttttgtagagacagcgttttgctatgttgccaatgcattctcaaactcctgggctaaagggatccgcctgccttggcctcccaatgtactgggattacaggcctgagccaccctgcctggcccacttaatccttaatgtggcatgtgcttcatactctcctggctccccagggctctttgatctgggccactatttatgtcattacatagtgctactgtctgaatatcaatgtcccccaaaaattcctgtgttaaaatcctcacccccaaggcgatggtgttaggaggtgtggcctttgggaagtgatgaggtcatgagggtgagcttcacagataggactactgcccttataaaaggcactacagagagcttcctcgccccttctgccaggtgaggacacagtgagaaggctctatctatgtaccaggaagcaggttcccaccagacacagaatctaccattacttgatcttggactttccggmctctagatctgtgagcaataaacgtctgttgtttaaaagccaccctatctatgatgttttgttagagaagaaacaaacaaaaaaatgaatggaacatacttcaccaccaaaatcattaacaacgttgaaccccatgccaaattattccatttctatacatgcaaagaatcccat

SEQ ID NO: 685215 - DNA, 598 bp, Homo sapiens
tttaataaaataattacttacaatttaaaatttttgccaatcctgatatgatgcctcatgtatttgacattaattttgaagttactgctcctgtgattggcaagaaagtgccttaacttaacaccgaacaatagcaaaccattttttcccattattttatttttgggggtccttgctgagttccactctgattattgtatatccamtacttaatcatggaatgtatttaacaaataaatagatagcggaggtttacatattataaggtgttttattattcactaattttacctttgaattttataaattcttatatacttgggtgattactttaaaggtatgaaatataagaaattgctggggctgggtgcggtggctcacgcctgtaatcccagcactttgggaggccaagatgggcggatcacgaggtcaagagttcaagaccagcctggccaacatagtgaaaccctgtctctactaaaaatacaaaaattagctggatgtggtggcagtcgcctgtagtcccagctactcgggaggctgagagaggagaatcgcttgactccgggaggcagaggttgcagtgagccaagactga

SEQ ID NO: 685216 - DNA, 2084 bp, Homo sapiens
ccaccctccctccctgtcttcctcctgctctaggcacgtaggatgtgcctgcttccccttcactttctaccatgattataagtttcccaaggcctctccagccatgcttcctgtacagcctgcagaaccaagcacccatcaaacctctttgttttataaattatccagtctcaagtagctctttatagcagtgtgagaacattcatggcagaaaaaaaaatttctattctgcaagctaagatctcacctatataaactggagaaagaagaacaattacacagaaagcaaacaaatggaaagaaacaataattagaaaagcaaaaaatcaaagaaattaaaaacataaacaaaacacaaaagcaaaaagataatattaaaagattgacactataaaaaaactaaaacagttaaatggttaatcatccatgtaatattaccaatgaggaaacaataacaaaataatacaaacaaatcactatcagaaagaaaagaggggacatcactaaggatccaccagatattaacatagaatcaagagaatactacaaaaaatctcgtacttcaaaaacttaggtgaaactgagcaatttcttgaaagacacaattatccaatctcaatcaaaatactatcttcaatgttttatgcatgtacttttgaatgattcgacagatacttcttaatctctccactctcatgcaggttagatgtgcagctgggaaacaaacaagatgatttcagagagtagcagagacacaggagagtataatgggatattgactgcaagggttactccgtaatagatagtcaggcaaagcacgtctgagaaggtgacatttgagctgaaattcttaaatcatgaaatttgaaaggaagatgacagcagatgatgggggttttccaaaagtagaagcattaccagaaaaggagtcccaatccagactcccagagagagttcttgaatctcatgcagagaggaattcaaggtgagtaacagagtgcagtgagaagaaataacttattaaaagctactgcattacagaataaggcgtcttcagcaaacaagtggaggaatgtcctgtctttgttttaagtttttcttatctagaggtcttgcctatgcaaagaaaatctaagctgtgcttacatgcaggtgggctgacagcatgacaaaatgtattatcctattgatttaaagaaaactatccttgacattttcgcatgtaactacagcaaagcataactataataatcttgaaagcatatattgttatgggttttgagacatctgaactttctgtcgagggagtttgttctcgctggcactaccaagctgttttcttagccataaatatcttaagaccatgggtcatgactagcaaggaatgttccttgttagtcttaagatggaggagtactattaatatgacattactctggctctcctaggctccttccctaaaagaaggaagaccactatattcttgtccaagagcaactctgataagatgagctcattattgtgcaggggccaaatgatgcatgttataaagcccaatttaaaaaatccttggatttttattctgggtgataaccagtgttagataattagagggttttaagttgggtagatagttggagtggtaggaagtaatgtactcttacatatgctttaaaaacttaatggagaagggaacacagtgggatcagctttgaagacaggggtgatttcactatgttccctattgcaatagcctagaaaaaggtgacagagattaagcatatgcttgaattgacttgtactccaggttttgtaactattccaaagttatttccatcatattcaaaggattatatgaaacttgtttttatcacatgacattttcaccctgtttcctctatccagagctttaaaattatgaaaaaaatatactctgtttcctctatccagagctttaaaattatgaaaaaaatatatttactcataattttactatctaaatgtttttgyatttacttttttatttttattttttgtgggtatacagatgtatatatctgtggggtataggagatattttgata

SEQ ID NO: 685217 - DNA, 1188 bp, Homo sapiens
tgcttcagcgaaggctatgggaaatgtggacaggtgtcccagaaaaatgtgtcttttaatgtacatttttggttgagtagaagcagtaaaagaaagttatacatttggaaataatcttctaaaaaatgtgagatcatgaatgctgcactaaagtaggtatttctttaaaaaggcctactggaaattctgccctgaaaaaagtcatatttctctcactccaatgaagcaacatgctggcttaatggaatggaactttaaataaagttaattttttcactagaaaaccaatgatcattatttcctgggtgttttccctaacaggaaaacattttagctggcataagacatgcctccacttaaaaacaaattccaaygtctgctacattttcttagctagcttgatcatattcttgtatggtttattcacagatattataatgaacataattgaaatgtgtcatatgaaccatattttcagaactgaatagtcgttcattcaacaatgaccagagtgggaaaaaccactttacacttaacattttatactttacaagtgggagatagacaatagataatgaacatagtaagtgaatacattacataggcaattgaacactcttgagaggtgtcaggggggaaacgtggaaaatggaaactgcagatacctgaggatgcattcctattaatttctatgatgtagagatataaaataaaacataataaagcaagaataacacattgtattaaaataattgcaacactaaaagcaaggtaaattgttttccaggaaaaaaaccaacaaacgctgatgaggctgtgaagaaaagggaacatatatacacagttggtgggaatgtaaattagcacaacttctacagaaaatagtatgaagatttctcaaagaactaaaaatagaactgttcttggatcttctcctcttcatgcttaatttctttggaataatggagtttgtttcatcttgtctccccatgagtaacagagcttggtcggtcactgcctcttcatgttctttaggcttccaaagagaaagaataccaaaaaaccctgagactgggaatagcccctgccttgggatctaaaataatctaagctagtgatattaattacggtgttactctaatggtctaaagccaagatagaactgcctatactcagaatatgccccat

SEQ ID NO: 685218 - DNA, 1402 bp, Homo sapiens
agagagaggctgtgtaacaaagatgtgggcctcattcattcctattttatcgtagtcatccatattttagctctgtcttctagcagtgtgatgtgtttgtcttcaaggagtcagtttgcaccttgaatgacaatggaatctgattcttttttttttttttttgagacagccttggatggaaactgattctacgtggagagacaatagacttgcatggccagtggatatgatacaggaccatcctcctgcagtgttatctacaattgtatgtgtgcatctccatgtaggtagaaacatatgaaagaaaatgcagtgaaatattagcaatggctaaatactatgttatgtgttacaaatgaatatattgcttagttatattttcccatgcttttctttttctacattgagcctttattgtttttgaccaataatcaataaaatatttttacagggaatttttcttataactatattgcattttccctttgtgaaaatgaaattcagcattttacaatattgaattatcaaatgattctaattataacacatatgtcatttaatcctcaaaaggattctaaaaaaactaagtagtattattttctccatttttcataacaggggatagatcctaagacagctttaaaacatttaagaagaaggctgggcaaggtggctcatgcctgtaatcccatcactttgggaggctgaggcaggttgatcacttgaggtcaggagttcgagaccagcttgaccaacatggtgaagcccccatctctactaaaaacatacaaattatctgggcatggtggtgtgcaccagtaatcctagctactcaggaggctgaggcaagagaatcgcttgaacccaggaggtggaggttgctgtgagccgagattgtgccactgmactacagcctgggtggcaaagcaagactctgactcaaaaaaataaaaaataaaaaaaattttggaatatctgccttttagtaaatgatagaactatatttggggaactagtattaatagctgaattttagagcctagttcataatagcgttgtgtctcaagcagtttatatagtaataaatggaggtatgcaagtatgatggaacccttccaatattagggccagaaatctgtaattctctaagcatccaaatcatgtctgatataagcagacccagtactatatttggagatagattactgcagcgtgtggccatgaaatgattccatattaatatctcagccctgactataaaaacacagtcccagaaagaatgccagtgcatcatagctgtgttgtgatgatgccactcaaagcactttgcagtgtacatgtcttcttcctacatcagtggaactttgcactttaaaatgaagacactgaatattcagaccat

SEQ ID NO: 685219 - DNA, 1402 bp, Homo sapiens
agagagaggctgtgtaacaaagatgtgggcctcattcattcctattttatcgtagtcatccatattttagctctgtcttctagcagtgtgatgtgtttgtcttcaaggagtcagtttgcaccttgaatgacaatggaatctgattcttttttttttttttttgagacagccttggatggaaactgattctacgtggagagacaatagacttgcatggccagtggatatgatacaggaccatcctcctgcagtgttatctacaattgtatgtgtgcatctccatgtaggtagaaacatatgaaagaaaatgcagtgaaatattagcaatggctaaatactatgttatgtgttacaaatgaatatattgcttagttatattttcccatgcttttctttttctacattgagcctttattgtttttgaccaataatcaataaaatatttttacagggaatttttcttataactatattgcattttccctttgtgaaaatgaaattcagcattttacaatattgaattatcaaatgattctaattataacacatatgtcatttaatcctcaaaaggattctaaaaaaactaagtagtattattttctccatttttcataacaggggatagatcctaagacagctttaaaacatttaagaagaaggctgggcaaggtggctcatgcctgtaatcccatcactttgggaggctgaggcaggttgatcacttgaggtcaggagttcgagaccagcttgaccaacatggtgaagcccccatctctactaaaaacatacaaattatctgggcatggtggtgtgcaccagtaatcctagctactcaggaggctgaggcaagagaatcgcttgaacccaggaggtggaggttgctgtgagccgagattgtgccactgaactacagcctgggtggcaaagcaagactctgactcaaaaaaataaaaaataaaaaaaawtttggaatatctgccttttagtaaatgatagaactatatttggggaactagtattaatagctgaattttagagcctagttcataatagcgttgtgtctcaagcagtttatatagtaataaatggaggtatgcaagtatgatggaacccttccaatattagggccagaaatctgtaattctctaagcatccaaatcatgtctgatataagcagacccagtactatatttggagatagattactgcagcgtgtggccatgaaatgattccatattaatatctcagccctgactataaaaacacagtcccagaaagaatgccagtgcatcatagctgtgttgtgatgatgccactcaaagcactttgcagtgtacatgtcttcttcctacatcagtggaactttgcactttaaaatgaagacactgaatattcagaccat

SEQ ID NO: 685220 - DNA, 584 bp, Homo sapiens
tagtatgccatctccaagaggaaagtccaatatttcgcattgcaaaataatgatcagattcaatgaacatacttgattcatctttcaacctcactagtaatttatcaataaattatggtttattcattcatgccttcactgagcatatatttattgagaactcactatgtaccaggcataccttgctcttgtagaggttacattttctttgggggaaatgattatgtaatgaaatgaaagaattggtatcagtgttcttacaggaggaagggttgctattccacagatatactgtttctactgaatttatgcagcaaattaaagagattcaaacttaatcagttgtcacattatttttacataaraatctggttttaaagatttttattatatttaaaaaaatttatatactatatatgaaaattaaataaaactttgggatttcagattttgacataactacattataaatctctatttttaggctggtacagtggcttgtgcctgtaatcccaacactttgggaggctgagggcggtggatcacaaggtcaggagttcaagactagcctggccaacatagtg

SEQ ID NO: 685221 - DNA, 584 bp, Homo sapiens
tagtatgccatctccaagaggaaagtccaatatttcgcattgcaaaataatgatcagattcaatgaacatacttgattcatctttcaacctcactagtaatttatcaataaattatggtttattcattcatgccttcactgagcatatatttattgagaactcactatgtaccaggcataccttgctcttgtagaggttacattttctttgggggaaatgattatgtaatgaaatgaaagaattggtatcagtgttcttacaggaggaagggttgctattccacagatatactgtttctactgaatttatgcagcaaattaaagagattcaaacttaatcagttgtcacattatttttacataagaatctggttttaaagatttttattatatttaaaaaaatttatatactatatatgaaaattaaataaaactttgggatttcagattttgacataactacattataaatctctatttttaggctggtacagtggcttgtgcctgtaatcccaacactttgggaggctgagggsggtggatcacaaggtcaggagttcaagactagcctggccaacatagtg

SEQ ID NO: 685222 - DNA, 643 bp, Homo sapiens
aatattatctggttttgtgtacttgtagagtaaaggaatcatgtataatttagctttgatactctagttgtgaaacactttgcaatgaaaatcaataaaaaatattgaaaatcgtttgtgttaattggtagttataatcctccttctacattgtgtcaaaactcttctttatttgtgcttcttttttctttttatttctaacaccttactactttgtccactttctccttattcctgagtctgtattgatgtgatttccctgattttttttcgaagaaccagcatttgtacttatacataatygctactatttcttattttctgtacaatgttttgtcattgttacctgaaccaatactgctttcccacaaccttattttataatttttaaagtgactatatcattcctcatgttcaaaaattgtctttaataaaatatcgttcataacatttgcatatgcataatctcattttagtgtagatgtgaccgtgtattttagcattcagtgtgaattatgcaactttgtattctaacactcagaggagtttattgtaagcactttgatccaatgaatatttaggaaaatgttgcttaatttgtaagcagtgaagaccttgacggtcttttattgttatattctag

SEQ ID NO: 685223 - DNA, 673 bp, Homo sapiens
taatctaatgaagtcaaacaagctataggatgtaagattttcaaaatgtcagcagcaaagtacttattgcggttttcttttcttatggcaccaggaaataatcaatctatttttataagtcttccaacycaactttgtctacttaagaaaaatcagtctcactccaaatgagatttattgaaatgttcctaaaatgcctcctatttacctatcacaagtgaaacattattcaaaatgtggaagtggtttgtggagatgggtcttttcaatttaagcctgtaagtacagttcataataaaaacctgtcaatgaagtagatattttatcacacctgtgttcatttgggactgctaatttatcattaataaagcatttggctagaaaacgatgtccatatttgatgatctggaaacttctttctcccatttttatgccacgataactgcccagtcttattgttgcccattataaatgtgtaaagttttatggactaagtaatgtcaaatgaggcagtgtcaagcagatctggagacaagttgggagcgtttagatggaaaaagaagctgtgcggtctatgccagtcttgcttgtagttttattgtgtattgatccttttttacacactgatttagcatcctgaattatgatgtggtatttaaatttaaataccaat

SEQ ID NO: 685224 - DNA, 673 bp, Homo sapiens
taatctaatgaagtcaaacaagctataggatgtaagattttcaaaatgtcagcagcaaagtacttattgcggttttcttttcttatggcaccaggaaataatcaatctatttttataagtcttccaacccaactttgtctacttaagaaaaatcagtctcactccaaatgagatttattgaaatgttcctaaaatgcctcctatttacctatcacaagtgaaacattattcaaaatgtggaagtggtttgtggagatgggtcttttcaatttaagcctgtaagtacagttcataataaaaacctgtcaatgaagtagatattttatcacayctgtgttcatttgggactgctaatttatcattaataaagcatttggctagaaaacgatgtccatatttgatgatctggaaacttctttctcccatttttatgccacgataactgcccagtcttattgttgcccattataaatgtgtaaagttttatggactaagtaatgtcaaatgaggcagtgtcaagcagatctggagacaagttgggagcgtttagatggaaaaagaagctgtgcggtctatgccagtcttgcttgtagttttattgtgtattgatccttttttacacactgatttagcatcctgaattatgatgtggtatttaaatttaaataccaat

SEQ ID NO: 685225 - DNA, 1386 bp, Homo sapiens
tccctgaagtcgcactgctagttgatggaactgggatttgagtccaagccagcagactccacatccaaaggcaaaccacctagtggacaggcaaaactggccaagattggcacaactgtaagtgaaggaaacagaatatttgaaatattctctaggctaaattgctaggcaaaaatcaataaggtgaaaataagaggaataactctcaatttctctattagattaacataagtcaattgcacaaaagcaggctgaggaagatctcacgcatcagagtctcttgggcatcaccttgtatcttgccagcctttctcttcccccccccttgagacagggccttgtcctgttgctcaggctggagtgcagtggcrccatctcagctcactgcaacctccacctcccgggctcaagtgattctcctgcttcagcctcccaagtagttgggattacaggcattcaacaccaagcccagctaatttttgtatttctttgtagagacagggtttcaccatgttggccagtctggtctcgaactcctggcctcaagtgacccaccagcctcaatctcccagagtgctgggattataggcatgagccaccgtgcctggcctagcctcacttctaattctagctgctgctgtggcacatatcctctaaaacaggggtcccaacacctgagccatggacaggtactggtccatggcctgttaggacccgggccacacagcaggaggtgagccacaggttagcgagcattaccagctgagttccacctcctgtgagatcagtggcagcattcaattctcataggagctcaaaccctactatgaactgtgcatgtgagggatggaggttgcacactccttatgaaaatctaatgcctgatgaaatgaccaccaccctatctgtggaaaaattgtcttccacaaaaaaggttttagtgccaaaaaggttgggaaccactgtgctagaagctctgcaggacacttctgctaacagaacctcatttaaagagctcacatttctgccctgagattattattattctcctcctccttcttctccttctcctccttctccttctgtttctccttctccttctctttctcttcctcccacctcctcttccttctccttcttccagctttattaagtataactgatgtgcaaaaatctgcacatatttaatgtctataatttgatgagtttggatatatgtgtacacacatggaaccatcaccataagctaggtaataaacatatccatcatatttatccatcattaacctctccgaaagtttccttgtgactctgtatttttttgtttggtttttgtttgtatgtttgtttgtttttgtggtaagcacacctaatatgagatctact

SEQ ID NO: 685226 - DNA, 631 bp, Homo sapiens
actcataacctgcaaaggaggcttaaacttgcctagacctcttgacaattgctttaagtgaatttgcaggtgattgacagcagcttgattgaacaccctctcagggttccttctcctggtataattcaaatgtccctggttctaggtctccttgattcttgggcccacatggataggaaattttattgtaaaagctgatggcttaattcctcctaaagaaagtgctaccatagctttgcttagaaaaataccactttggtttaggaaaatccacaactcttacttttcctggttctagcacatcgttgatcccatctcatattttcataagctgtttatattggattgcagccactgtgtattaacttatcgctctttctctctccaggccagtgaattagctcatgcgttcagctgcatttaacaaagatccaaacacagtggtttaactaacattttcttaactgccatgaagttcagaagtaatataatatgcacagagttggtgccatgacttttaaaccaccaaggaccaggctccttccagcttcttactttgccrtcttaatatgtggctttcatttccatggtttcacaaaagaaagagaaaatgacaagaatgtagaaaaaa

SEQ ID NO: 685227 - DNA, 612 bp, Homo sapiens
gtttaccatgtgcttaccagataaaggatttttaatggagaaaggttcctgaaaatatttttatgtttgtatcaaatttattcttaaaatgttatgatattgctatagtttagaacccaattattagtttatcttgtgattataggtaatcagtattaaattcaaggtacatgttttcttttaacatgaaaaactttaattaaaaaatttttttccatagacacaatcaagaactagccaatcttttgatggattgccaagtcactagtagaattaaaaaaaaaatgtagaaatatccaaggtaagagggcaaacaggatttatcattcatgaaaattacattcacggttcaacmacaattgttactgactcatgtatgtaggatgtgttaaaaaaaaaagacttccatttaaatgaaatcccacttctacagccatctatgaaaaagtggcagaatctaacattttagtcttggaatgactatagcctcatgaatattccatcactgacagttgccaggatcttcaaataagcaacaacagaaggtcaaaaagaagcagagaacacattactgagttttagttgatgttgcagtttgattttgagtgataa

SEQ ID NO: 685228 - DNA, 1128 bp, Homo sapiens
gaaggcaataaaatttttgaatctacttactgtttttcagtgtgaagagacaaaacagtagtaagtatgtaaaaaacatggaaggaaagaacttttcataaaaactcatttctcagaataagtaccagaacaatgcaagtattattccagaatatttacaaacaaaaccaaaatccccaattacccaaccacaaagaaatagcaacaagacaaaatactttaaattacattaaccattaactgtatctactattataaatgcttactctcctcaaagaaatgaatttctaaacaaaatctccattatttccatactatcttcctaatatacttaaaaatgtgcttctagtctaaaatgtaagtttaatgatcacacacttgagcaacactccaaaactaccagtgatcacattaggagaagcacaacggcctgagtaccactgaggctgaaatattgaaagagtatcagttacaaaaacaataatgctaccagtgcacacgtctaccctcagctcctaaattggaaatttaagaaagttttattttaaaatgaattttgaattacattcataatgaaataaacaaacaaaaaaccatggtcagtttattagtcatggaaaacataaacagaaagtaatagctatattctagtagccatgaacttactgagcaagaggaggcagttcttctgaatgagaaggcgcttggtcacatccccagatgtcagtgaaagatacgggcagttcatctctccctagtagcccactcacctcaagctggaattcttcagcttcactcggaccttttaagaattaaaataatcttatttaatgatagtgattatttttccattagcataacaattattatatataattgaaattgttaataggattttcataacttgagttttttccccttctaatttatcctttcttacaccactgcaaagtttcttctttttttttcttttttgagataaggtctctgaggcctaggctggagtgcagtggtgtgatcagggcttactgtaacctcaaacccctgggcttgaaggatcctcctgtttaagtctccggratagctgggcctacaggtgtatgctaccatgcctggctaatatttaga

SEQ ID NO: 685229 - DNA, 597 bp, Homo sapiens
tggttactttctggaataaatactgagaatagtccacctcattccatgaagtagttcttatgatttaaaagaatcataaaataaaagaagaaaaaaagacaaatcaaaatggaatcatgaaaaataaatcctgactcagataagagtttaaacctaagggaaagctttagaaccacagaaatgtgcccagatggccccaacggttatgaatgttgaacttgaattaggccctgaactgctagatcaaaatgagaacgatgttctgtcccataattcgcaataatctcaaactgaaaacgtaccctgcattatgggttaaagcaatttgtgaagcacagaaatagttttaccttattcaacctatcctttaaatttcgctaaaggcatcctggaatattttatgattgttcatgattaaaggcatcctagaatattttatgactatcttcccactgaggcatactccatgaaaaactgaaaagtaaaacacagaaatggtgacctccgttgtacattcaaaatatctatggtttgttcatctgggtgtgatytgagactccaaacctctctttaaatatatgtattcatttttgacta

SEQ ID NO: 685230 - DNA, 1127 bp, Homo sapiens
atgatttatctactcaatgataagtattttggggaaatatagtacacacatatacacacagtcatatccacacatctatgtatatgtgtatgtatataaatgtatattttatatgtataaaatatatgataaatataaatatattatttattatcacatgtaagtatattttaaatacagaaatatatacacattgatatggtttggctatgtgtccccacccaaatctcatcttgacttgttgtcatccccatgtgtcaaaggcaggaccaggtggaggtaattgatcatgggggcagttcccccatgctgtactcatgctagtgagtgagtctcatgagatctgatggttttataaacttctggcatttcccctgcttgcactcactcagtcctgccaccctgagaagaagatgcctgcttctcctttgccttctgccatgactgtaacttccctgaggcctccccctccagctctgctgaactatgagtcaattaagcctctttcttttgcagaggaaccctagttattgctgttcttcagtttgggattttgtgtctgtggcagcagagttgaatgtccacaaaaattcacaccactctaagggaagtggccaggaaggaccagagtgttactttgagttctctttcgcttgcagagagcaccaagatattataatatgggtgaatttggataagaatcactcgttagaaacagaagcaagtagaaagtcaagatatggagctttgaagggtgagaagaggcaagaacttccagacactagaaagaaagggattaaattcaaaatgattttgagtaactaaaacaagacaaaaacttaaaaactgtagttcaacagaaggactcaataaataagcaaatgttaggttcagaaagatagctccttcctaagcctattttttcaacagtctcaaaggtagccaccattagtgtggaagagatcagcttaggcaaagaaggggcaaatgtaaagcaggtgtgagaacccagtctcgtaataaactttaaatactgacacatggaactaactagcgtcaagtagattaaaagcctacmtatttcttagaaaattttatttccaaagaaactattactgtaggcttaa

SEQ ID NO: 685231 - DNA, 683 bp, Homo sapiens
ttaatttattcaaaagcttctttcccaggtcaattgccagagagaaatcaacagtggtactcctaagtgtttaatgaaaatagcaggtaagttgattccttaagaagtcaagggcattattttttgttgttttgtttttcgactttgatttcatggttagaggtacatttgcagagtgttatctaggtaaactacatgtcgccggggtttggtgtacacattacttagtcacccaggtaataagyataggaccccataggcatgttttttaatcctctgcctcctcccaatctccaccctcaagcaggccctggtgtctgttagtcccctctttgtgaccatgtgctctcgttgtttggctcccattcgtaaataagaacataagggtattcgattttgcatacctgcattattttgcttaggataatggtctgcagctccatccatgttgctgcaaaggatgcgatctcattcttttgtatggctgcatagtattccatggtgtgtatgtaccaaattttctttagccagtctaccattgatgggtatttaggttaagtccatttttttgccattgtgtatagtgctgtaataaacatatgtgtgcatgtgtctttatcatagaatgaattatattcatttgagtgtataccctataatgagattgccaggttaaatggtaa

SEQ ID NO: 685232 - DNA, 683 bp, Homo sapiens
ttaatttattcaaaagcttctttcccaggtcaattgccagagagaaatcaacagtggtactcctaagtgtttaatgaaaatagcaggtaagttgattccttaagaagtcaagggcattattttttgttgttttgtttttcgactttgatttcatggttagaggtacatttgcagagtgttatctaggtaaactacatgtcgccggggtttggtgtacacattacttagtcacccaggtaataagcataggacmccataggcatgttttttaatcctctgcctcctcccaatctccaccctcaagcaggccctggtgtctgttagtcccctctttgtgaccatgtgctctcgttgtttggctcccattcgtaaataagaacataagggtattcgattttgcatacctgcattattttgcttaggataatggtctgcagctccatccatgttgctgcaaaggatgcgatctcattcttttgtatggctgcatagtattccatggtgtgtatgtaccaaattttctttagccagtctaccattgatgggtatttaggttaagtccatttttttgccattgtgtatagtgctgtaataaacatatgtgtgcatgtgtctttatcatagaatgaattatattcatttgagtgtataccctataatgagattgccaggttaaatggtaa

SEQ ID NO: 685233 - DNA, 683 bp, Homo sapiens
ttaatttattcaaaagcttctttcccaggtcaattgccagagagaaatcaacagtggtactcctaagtgtttaatgaaaatagcaggtaagttgattccttaagaagtcaagggcattattttttgttgttttgtttttcgactttgatttcatggttagaggtacatttgcagagtgttatctaggtaaactacatgtcgccggggtttggtgtacacattacttagtcacccaggtaataagcataggaccccataggcatgttttttaatcctctgcctcctcccaatctccaccctcaagcaggccctggtgtctgttagtcccctctttgtgaccatgtgctctcgttgtttggctcccattcgtaartaagaacataagggtattcgattttgcatacctgcattattttgcttaggataatggtctgcagctccatccatgttgctgcaaaggatgcgatctcattcttttgtatggctgcatagtattccatggtgtgtatgtaccaaattttctttagccagtctaccattgatgggtatttaggttaagtccatttttttgccattgtgtatagtgctgtaataaacatatgtgtgcatgtgtctttatcatagaatgaattatattcatttgagtgtataccctataatgagattgccaggttaaatggtaa

SEQ ID NO: 685234 - DNA, 683 bp, Homo sapiens
ttaatttattcaaaagcttctttcccaggtcaattgccagagagaaatcaacagtggtactcctaagtgtttaatgaaaatagcaggtaagttgattccttaagaagtcaagggcattattttttgttgttttgtttttcgactttgatttcatggttagaggtacatttgcagagtgttatctaggtaaactacatgtcgccggggtttggtgtacacattacttagtcacccaggtaataagcataggaccccataggcatgttttttaatcctctgcctcctcccaatctccaccctcaagcaggccctggtgtctgttagtcccctctttgtgaccatgtgctctcgttgtttggctcccattcgtaaataagaacataagggtattcgattttgcatacctgcattattttgcttaggataatggtcygcagctccatccatgttgctgcaaaggatgcgatctcattcttttgtatggctgcatagtattccatggtgtgtatgtaccaaattttctttagccagtctaccattgatgggtatttaggttaagtccatttttttgccattgtgtatagtgctgtaataaacatatgtgtgcatgtgtctttatcatagaatgaattatattcatttgagtgtataccctataatgagattgccaggttaaatggtaa

SEQ ID NO: 685235 - DNA, 600 bp, Homo sapiens
tggaggggcataattacctaatttgctcccctgcacgatttcataaggatgggtattactgaggagaaagttgtttttttttaatttatttcttttttacagtgttactgatggaaataataaatttcaagtagcagaaaaccctctagaaattgcttcaaagagaaggaatgtatcataggaagtgaatggtatctgaaactgaaaaaagtgcggtgcaggactgcctcagggagagttagacctagaccaaataaatcttggctcttcctctctgtggccacaaggagacggctgttcatgcgtttcggtggagcaagtctcagaatgacagcaagaaggaccatgtttcggcagggattacccccattgctaggtgatctcagaacgtcacctatcctttcttgatattatttccctatttatagtacaattgatttctgttcatcctaccacagaccaaatgatctaatgctrtgaaaatactttccaaagtttaaaataggatataacatacgattagtttattacaatcatggatttctccctccccaggctgaaaaatgcaaatcagatcaataataactgcctttgatctga

SEQ ID NO: 685236 - DNA, 672 bp, Homo sapiens
tttcttcagtataagactaatgatacgagacaagcttatgacaaaatgttagtaacaggtcttcttttttttttccccaaagagtaaaaccaatgttttttttcctgctttatacaattcccctttaaaataagagaacctccaggcttcaaatcaggatgctgtgataataatcctgcagactgttaactataaataaagttactatactgtatagattagaggtcataaataggaaagctggaaaaattttggagctaataaatgtatggtgattgcacagataaagaaactgaggcttgaaaaaggaatgtgagatatcaaagtttccagagctaagttcagaaaacttcagtagttctcaagatgcaagttgctcaatgaaatgtattaggtgaattagtaagcgtgcctgtatcaatttggatcatctgttaatgcctgcatgtatctgstttgttccaggcaccgtgcagcgggtgctgtgttctagctgctctgttaactgccagttacctcatttgatcctgatgacaacccttgggtaggtattgtggttacctccattctatctctggaagaactaagaatggaggttaagtaactttcctgaggctccttagctaagtctctaggactggaatggagccaggcagcctgactcaagagccc

SEQ ID NO: 685237 - DNA, 2320 bp, Homo sapiens
ggcaaaaattctaagccagacatattaactcctgaattcaagcttttaatctattaaatcctctaaagagatcagattaatcaatattacaacttacctgaatctcattcatttaaatgcatttacatatataccacccacccagatgggagtagggttgggagtagggataatatagcctgatgagtagctagcaagaatatattggaccagcttagttgggtccactggccagaaaaatattctccaggtaaatctggcatttctcattcttttaaaactctccttcttctaggtctgtcattcacttaccttatgttaacctcacttattccctcttgggaaagtgagaaggtaattagtttctcaataagatgagtaaggttctagaaaagcttcaggcacagctaatgtgaagtgctgaactcagaagaaacaaacagaggtaaggagtgtgctcataaaaattttattgtaagatgacccagtgggtcaaaatataagtaattttagttgtttctaaagtgcagcttcattcgatgtggtttctgtttcttatttctcactgtatagggatattgacatgcatttgctctatggattatctcattactttctgttgcataactgtcccctttcatgttgcaaagtacaaactagtctgggtcacaatggagagagagtgttatatattccatttgcaagtctaaaataatattatttccaattgatttaatggaggtgcattttctccatctctctttgtttcttgaaatgcaaaaataggtttgagcttcactgtgcacatgtggataaatacaactcatttgccatgaaaacaaggctcaattttgtatagcaattagaaatcagtttaagcattgctactttaagtttgtatcctcatttctacaataaataaatcattataatacttttttattctgtctaaacacatctcatctgaaaggcaagatcttctgggactcaattcattcagttggttcatgtcattctattatgctaataaaattggtatttgcttattctacagcttctgtgtgggggtttagaaagtctgtaattaaattcccaagatttgtggcttcttacaggttttgaaacagaaaaaagtctgtaataaggagaaacagaatgatcaatgtgtagcagttagtgggacatttttaaaacaatgctacaacaccaaaatttaagttacactaaaaataaatgtaatttactgtatttcaaatttgatggaattatggttacatatttttaatgaaaaaaattaatttatcctgatatataatggttatcactggcaaagtgtacaattaaaaagctttggggaaagttatcagaattcctgggttctagggtctgttcaattattgatttgatcttcaatcaagcatcactctttggggacactaagaccctgctgctttgctcatggtcaggaaattcaatgcccaaataggagaagtcatgtaatatcctatataattcctaagagatatttccaaatgagaacacatggcactctcaatgcagggagactgtatatgaatcctgccttacccccagtgtggtctattttggaggtacacaaacatttacatgtagcactatgataagatacaatggagattatatatatataatttgacacatacacacatacacacacatacatatatatatacatatatgattatatataatttgacacatatacacatacacatatatatacatacatatatgtatatatacataactcaccatatctctctctttttctgccttttttctttttaaatataatatgtatattttaaatataatatatatattttaaatataatgtgtatatctttttaaatataatatgtatacatacatatatgtatrtatacatatacataactcaccatatgtctctttctttttctgccttttttctttttaaatataatagacacgttaagggaatccaagttttaaaaactcttagtcattttcaggagatttcttaaaacaacccacaacatagtaagagatatagtaaaagagcatttcttatcatctttatttgttctattttaaaatgtagcaactagaaatatatatatgtgtgtgtgtgtgtgtgtgtatgtgtgtgtgttgtgaatatgttctttattttttactgcatggagctgtcattcactcaataattcaatcatttctttacccaaaatttccagggactcctggaaatacatcagtttaagaaaaaaacttacatactgtcgtatgttacaatgtagta

SEQ ID NO: 685238 - DNA, 2320 bp, Homo sapiens
ggcaaaaattctaagccagacatattaactcctgaattcaagcttttaatctattaaatcctctaaagagatcagattaatcaatattacaacttacctgaatctcattcatttaaatgcatttacatatataccacccacccagatgggagtagggttgggagtagggataatatagcctgatgagtagctagcaagaatatattggaccagcttagttgggtccactggccagaaaaatattctccaggtaaatctggcatttctcattcttttaaaactctccttcttctaggtctgtcattcacttaccttatgttaacctcacttattccctcttgggaaagtgagaaggtaattagtttctcaataagatgagtaaggttctagaaaagcttcaggcacagctaatgtgaagtgctgaactcagaagaaacaaacagaggtaaggagtgtgctcataaaaattttattgtaagatgacccagtgggtcaaaatataagtaattttagttgtttctaaagtgcagcttcattcgatgtggtttctgtttcttatttctcactgtatagggatattgacatgcatttgctctatggattatctcattactttctgttgcataactgtcccctttcatgttgcaaagtacaaactagtctgggtcacaatggagagagagtgttatatattccatttgcaagtctaaaataatattatttccaattgatttaatggaggtgcattttctccatctctctttgtttcttgaaatgcaaaaataggtttgagcttcactgtgcacatgtggataaatacaactcatttgccatgaaaacaaggctcaattttgtatagcaattagaaatcagtttaagcattgctactttaagtttgtatcctcatttctacaataaataaatcattataatacttttttattctgtctaaacacatctcatctgaaaggcaagatcttctgggactcaattcattcagttggttcatgtcattctattatgctaataaaattggtatttgcttattctacagcttctgtgtgggggtttagaaagtctgtaattaaattcccaagatttgtggcttcttacaggttttgaaacagaaaaaagtctgtaataaggagaaacagaatgatcaatgtgtagcagttagtgggacatttttaaaacaatgctacaacaccaaaatttaagttacactaaaaataaatgtaatttactgtatttcaaatttgatggaattatggttacatatttttaatgaaaaaaattaatttatcctgatatataatggttatcactggcaaagtgtacaattaaaaagctttggggaaagttatcagaattcctgggttctagggtctgttcaattattgatttgatcttcaatcaagcatcactctttggggacactaagaccctgctgctttgctcatggtcaggaaattcaatgcccaaataggagaagtcatgtaatatcctatataattcctaagagatatttccaaatgagaacacatggcactctcaatgcagggagactgtatatgaatcctgccttacccccagtgtggtctattttggaggtacacaaacatttacatgtagcactatgataagatacaatggagattatatatatataatttgacacatacacacatacacacacatacatatatatatacatatatgattatatataatttgacacatatacacatacacatatatatacatacatatatgtatatatacataactcaccatatctctctctttttctgccttttttctttttaaatataatatgtatattttaaatataatatatatattttaaatataatgtgtatatctttttaaatataatatgtatacatacatatatgtatatatacatatacatawctcaccatatgtctctttctttttctgccttttttctttttaaatataatagacacgttaagggaatccaagttttaaaaactcttagtcattttcaggagatttcttaaaacaacccacaacatagtaagagatatagtaaaagagcatttcttatcatctttatttgttctattttaaaatgtagcaactagaaatatatatatgtgtgtgtgtgtgtgtgtgtatgtgtgtgtgttgtgaatatgttctttattttttactgcatggagctgtcattcactcaataattcaatcatttctttacccaaaatttccagggactcctggaaatacatcagtttaagaaaaaaacttacatactgtcgtatgttacaatgtagta

SEQ ID NO: 685239 - DNA, 2320 bp, Homo sapiens
ggcaaaaattctaagccagacatattaactcctgaattcaagcttttaatctattaaatcctctaaagagatcagattaatcaatattacaacttacctgaatctcattcatttaaatgcatttacatatataccacccacccagatgggagtagggttgggagtagggataatatagcctgatgagtagctagcaagaatatattggaccagcttagttgggtccactggccagaaaaatattctccaggtaaatctggcatttctcattcttttaaaactctccttcttctaggtctgtcattcacttaccttatgttaacctcacttattccctcttgggaaagtgagaaggtaattagtttctcaataagatgagtaaggttctagaaaagcttcaggcacagctaatgtgaagtgctgaactcagaagaaacaaacagaggtaaggagtgtgctcataaaaattttattgtaagatgacccagtgggtcaaaatataagtaattttagttgtttctaaagtgcagcttcattcgatgtggtttctgtttcttatttctcactgtatagggatattgacatgcatttgctctatggattatctcattactttctgttgcataactgtcccctttcatgttgcaaagtacaaactagtctgggtcacaatggagagagagtgttatatattccatttgcaagtctaaaataatattatttccaattgatttaatggaggtgcattttctccatctctctttgtttcttgaaatgcaaaaataggtttgagcttcactgtgcacatgtggataaatacaactcatttgccatgaaaacaaggctcaattttgtatagcaattagaaatcagtttaagcattgctactttaagtttgtatcctcatttctacaataaataaatcattataatacttttttattctgtctaaacacatctcatctgaaaggcaagatcttctgggactcaattcattcagttggttcatgtcattctattatgctaataaaattggtatttgcttattctacagcttctgtgtgggggtttagaaagtctgtaattaaattcccaagatttgtggcttcttacaggttttgaaacagaaaaaagtctgtaataaggagaaacagaatgatcaatgtgtagcagttagtgggacatttttaaaacaatgctacaacaccaaaatttaagttacactaaaaataaatgtaatttactgtatttcaaatttgatggaattatggttacatatttttaatgaaaaaaattaatttatcctgatatataatggttatcactggcaaagtgtacaattaaaaagctttggggaaagttatcagaattcctgggttctagggtctgttcaattattgatttgatcttcaatcaagcatcactctttggggacactaagaccctgctgctttgctcatggtcaggaaattcaatgcccaaataggagaagtcatgtaatatcctatataattcctaagagatatttccaaatgagaacacatggcactctcaatgcagggagactgtatatgaatcctgccttacccccagtgtggtctattttggaggtacacaaacatttacatgtagcactatgataagatacaatggagattatatatatataatttgacacatacacacatacacacacatacatatatatatacatatatgattatatataatttgacacatatacacatacacatatatatacatacatatatgtatatatacataactcaccatatctctctctttttctgccttttttctttttaaatataatatgtatattttaaatataatatatatattttaaatataatgtgtatatctttttaaatataatatgtatacatacatatatgtatatatacatatacataactcaccatatgtctctttctttttctgccttttttctttttaaatataatagacacgttaagggaatccaagttttaaaaactcttagtcattttcaggagatttcttaaaacaacccacaacatagtaagagatatagtaaaagagcatttcttatcatctttatttgttctattttaaaatgtagcaactagaaatatatatrtgtgtgtgtgtgtgtgtgtgtatgtgtgtgtgttgtgaatatgttctttattttttactgcatggagctgtcattcactcaataattcaatcatttctttacccaaaatttccagggactcctggaaatacatcagtttaagaaaaaaacttacatactgtcgtatgttacaatgtagta

SEQ ID NO: 685240 - DNA, 670 bp, Homo sapiens
gcacagataaattactttaactataagaaagctgcatgtcaaacaaaaaacataagattccttcacactaaaggaatataaccagggataaataacaattattaagttaattcatgaaaaagtcaaaataatcacataccaaatgatagagctgcaaaatacgtatactaaaagttaacagataggatgaataggccagtcttatagctggaacattaagctctcttttctcaaaagttgatagaacagacagacagaaaattagtaaaatatrtaagacttgaatgctattgtaaataaacttgaactaattgacatttatacaacataccatgcaaacacagaagcatgcacactgataaattatatcaaatatttaagaaacaaataatcccagtccaacataaaaagatcctctcagaaatctcagctaattttttgagggaaatattagcctgatacaccaaaaggagaaaggctataagaaaattataaaacaatattctcaataagcatatgcccaaaaatgattaacaaaatgttagtgaatcaaaacagtgaatgtataaaaagaataatacatcatgaccagtggtggttatcctagacctgcaaggttagtttaacattaaaaaatcaatcaatgagaagacttccagttttagctttg

SEQ ID NO: 685241 - DNA, 621 bp, Homo sapiens
acaaaggcctggtttccatggggaagaactttttagagggcaattctgagaccttatcctagctgagggaggtgatctctgctccactccagcctgcaccagcctttctgttatgcctaaggaaaatcaagtacataagaaccataatttacagaggacacaggtcaaatatataggctgggaatggaatagctgggtaatagactaagaggcaatagcaaggggaatctctaccccaaaaggtgggacaaaaacactgctgaaatccatacttttgagaaacagacccattaaaagactaaggcttactaagaatattagagaactagctttctcctctacactctaccaccccattwacaaccctccaggagtaacaacagtaaattactacaggaagtgctgcaagatacagactctgaggagcaatatgaaaagaagccacaaagccaagaggagattacaacaaaaacacaacatgagctagaagctttttgtgcctatagctacaacattaaacactatccacttccaagctagattaaaataaatcttcacactaaaagcctgtctatcttagtttccgttacccagtaaatttcaacaagaagaaaaatcaca

SEQ ID NO: 685242 - DNA, 2940 bp, Homo sapiens
tttttctatgtcctttgagttcttctagcaagttgtctagcatgttgtcaagggtagacttgctagaagcacctacccttattaataagtagaagcacctacttattaatattccacagaaatgaatttgggggacaaaggttaaagctatctgtaacctactgaactaaaaagcaatttttaaaagagtgataataaagttaatattgaataccctttgatgtgaacttaggaggaaaaagaagaaaccataaagcagtcttgatatgaaagcaatctttggtagctttgactctggcttggggatattctattcctcaaatgtaaaagataaggatatctaacttttaatagatggtatggtttggctctgtgtccccacccaaatttcatgtggaattgtaattcccaatattgggggasagtcctggtgggaggtgattgaaacatgggggccagacttcccccttgcttttcttgtgatagagttcttatgagatctgatagtttaaaagtgtgtgacacttccccatttgctgtcttctctctctctctcctgtcacaatgaggagaaatgccttgcttccttttcatcctctgtcatgattgtaagtttcctgaggtctcccactcatgcttcctgttaagcctctgaaactgtgagtcaattaaacctcttttcttcataaattacccagtctcaggtggttctttatagcagtgtgagaatggacttatacagtaggaatgcatgtgaatgtgccatacacatatgctgacatacatggttatacacacatttaaaaattcaacatgtttttttaccaatgtatgaaacaaacacatataacaaaataaagcctttaatgaatgatatctgaactacagtttatcaatttggtttcagctaactgccaaaatagagaataatttttattaattaaccttaattctcattcagaatctgacttaaagaaaagtcaagcagtaaagcacagctttggaaaatgtgccccctgtacttgacatatactggtaaattgacacactgaggtacctcagattcattacaaaccagtttgtaaattaccctattattattattattattattattattttactgtttaagtagtggttgaacaatcaagaacaaacatgaatcaggtaggcaccccaatggaattaactcttttattggccattctctgggataaaacaagcattggtgatgaaaccagataagagagaggcaaatatagcagaatgttacacccttattgcaattgagtcaattgcatagaagaataaaaaatggaaaaagaaattagacttttcactagtggaaaaaaatgactaggcaactctgggatatgttacaacaagcttctgaataaaataaataggaagtatttttcaggctgtggggattgaatgaatgcaatcaatcttccttgcgcgggaactgcatcactcctacccacaacctccctctcgtgaattaaaatctcacagcaactcaccctataggcagtagtcaggcttgagcaatggccacttaaccaggacaatacctggcatataacccagtcagacccacaatagcagtgcattttgttatgatcctttcctgcagtaaacaattttccagacatattctctgtcttccctacattaggtatattggacatatatgcataatcgctctcgctttagtaataagaacgttgcattatttccaacgtcaaaagctgaccatattttcttttcaatttttttttttaagatcctaactctatatagtatagttatctgtgtccctgggacatatatcttagttagacgtgttataaatatgatagaatttattaaatagatccaacacaggtggctggctttgaaacacttctgcattcattccattcaacaaatatgtattaagcataccatacaaaaaacatgtaccacaggccgtaaagatgaggtattaattgccttggattccaacatatgcataatgctgttatgagtgacacacatcattatgatgaaaggcaaaacagattttaaaaattatagacaaaaaattatatttctggaaacacaattgtaagtatttacaatgacccttcttcctgctactggaaaggaaggttctcatatctgaattgatgggtcactggctttggcctaagtggtacaatggaaagacttgcaccactggggaagcccagggagttcataatgccaaatgggcaagtacgagggagagagacacataactaaatggaaaaatcaggcaagagagggaagatggattgcttgagaaaggcagggaatgaggatgagtgcaaaaagacacagaaagttaaagagtaggaaggtgataattacttgggcatttagcacaaaataagtagttggaaaaaatatctaaaaattatcttaaagatgttttgctgcaagatgtggtctgaactccatccatatccctaataaatattcattaaaaatctacattactcttcaattgagttgttggagattttaaaactattttatttgtattcattatgccatacataataggtactcgacaactgtttgttaaattgaatcctcttttgtactcaattccatgagcacagttcaatttcaagtctgttatgcatagcacagaattgacaatagggaaatgtaattgggtgatgtccttttctcaatgcaagaacttagtgcatctttaattttgattggggagcaattaacctggtagataggaaaactggagggatattgcaagctggcagccagctggggagccgtgcttgggatcacataggctactgacatgtgacaactatatgcaacctagggtcagtcatgcgatcaaagagattcactcgtctcttaagctgagcagacagcatttgaaagaat

SEQ ID NO: 685243 - DNA, 595 bp, Homo sapiens
ttctagcttttgctgagctagtccctgaactgtttgggttatgcttctgcagtgggataaatactgagatgtagagaaaacatttgtaaaccctcataggaatttgagagagtaatttgatgtctattgaatctaataatcaatgattgcagctaagattttaaaattccatttctttttaataattctttttttttttttgagatggagtcttgctctgttgcccaggctggagtgcagtggcacaatctcagctcactgcaagctcygcctcctgggttcacaccattctcctgcctcagcctcctgagtagctgggactacaggtgcctgccaccaagcccagttaattttttgtatttttaggagagacagggtttcaccgtgttagccagcatggtctcgatctcctgacctcgtgatccacccgcctcggcctcccaaagtgctgggatcacaggtgtgagccaccacacctagcccatttttgtgttttacaaaagaagtatcactttcctttctctttttctcactgcaactttcttttccttcacatcttcccttcacattttctattccctgaccattagtttct

SEQ ID NO: 685244 - DNA, 3117 bp, Homo sapiens
aataataatttaattgtacacctaaaaataactaaaagagtataactggattgtttgtaatgcaaaggataaatgcttgatgtgatggatacctcatttaccctgatgtgattattacgtataacatatattcctgtatcaaaatatctcatgtaccccatatatatatatatatatatgtatgtgtgtatatatgtgtgtgtgtgtgtgtgtrtgtgtgcatatatatatatatatatatatatatatatatatatatatatgtatgtatgtatgtactgggtacctacaaaaataatacaaaattaaagaataaacaaaaagccccaaaatatcttatgtttttcacagacatatatacctactctgtacccacaaaaattaagaacatacaattttttaaaaagaatagtaacaataataaaataggacaagtaataactatttatttttaggagctgggataaactctttacctgtattatctcatccaaatccccacaagtcctaaggcatgtagggtggtcaccaacattttacagataaggaatattgaggctcagagaagttaactaacttgtctaaggtctcagaggctagtaagtgcatgcccgggatttgatatattctgacttcagagctccaggtgacacctcagcaatcgattgtgggtttatgctggtcacactatattgtagttgtctgtttacatatctgtgcctcatctagttggtaagtttctagaaggtgaagcaggaacatgaatatttagttttgtttctccagcctttaatattgtgcttggcatgggtaagtgctgaataaaactttgcagagaaatacatggatacaaagatgggtggatggatgactggaagtggcttgagagatcatcttgtccctcttgatgtgcccaaggtaatccagcttggcagggccggcctgagaagccacatttctggcttccatttctgggtctttgacatcagagtacagcctggcattcttcagcaaagcaggaaacacatgaagtctgtaaacaacacaacatctgaacactgaaaattaaaaaaaaaaaaaagaaagaaaaaaaaacaaggagggggtgggggtgggtattctggtacttttccatttccatttaatattttaaggtgcaaacaattttctattcttacacctaatgcaaaaatatatgctgactttgataaggtactgcttttagctgtatgctgtataaaaatacaagaagaaaacacatgctgggattttccatttttccttcgttgttgtgtcttactgaaacttggaaatcaaattatctgccttttctatcaaacagcaaaacatttgtccaattaatctctgccctagattttgtttttcttagtctgaatccatgtcattatgcatcattcaaatcctgaaaatgcaataaaaatggagactaaagtgtatttcaacccccgatcaacataatgattctaaatgtattgaatataaaataaatgtactaattttgcttacttttcattttttacttacaaatagagaaaaaccacggtgcctcaagggaactgaaacttcgcagttttctgcacttgaaacatataatgagtttcagccaacgattccacactgcctggctaggaaaaccacttagtccctgtcctctgtgtctggatttgcaagtgaccatgtcggtaccggggacccaggcccagccaattaagtgctagtgatagagagcctgtgtctcttggtttgctccccaaacatattatttttaccattttctttaatgttacagaaaacacctcattaagcaactgttggatgaatagctgggcatgcaatttgttagaaaagaacactgtacttggagttacaacacctgtgttctagaatttgctctgctactaaataactgtgtgacattgaaaaagttatttatttttacagtaacctcatgtttgctgtcacaataaaagtgcataaatagagatattgaaactttagaaaaatagggtctgtttctttttaagtcaagggaactaggctacccaagtgtttctcacacactcggggtccacagatctactgggattgggagacatattcttggggtcattgaatattttgtgagaaattttaaattttttgtttttatttagaagcatatggaaagttaaaagtgatagctcagttatctccatgactaatgaccaacttcttcctataattccgtcccagcatttgcatttgtattaactacctcaagtgcaaaccttaactgtgaaagtttaaattttattgttatatttctcttagggatccacaagagatcttaaatttgagaatcaatgaattagtaagcatgtcttactctaaggtttggtgattttctaaaataattgagaatggctgatttcattcatttatgtttatcccatgtttcattgcatacccacagcaagccagagactattctagccaccaaggtaaccacaatgaaggagggtctccctaagtttctggaatcccacaacttgcttggggagatacacctatccatagagagttattggacatgtgattttaaatttaaaacacccttaaactacaatatgataaatcaatctctatacctagcatcacttagactgtaattaacctttggcccattcgttctaaattcacagtgatctattcagggtctgagtgacttgagcaatttccttacccacattcaaagattgtcatgagaataaaattagatattctgagtacagtggtcttgaaaacaacacgttttatatttccttgaaggcaggaacaacttgcagcaactatatttatttattaggttatctttttatgaaaggacttaaggtagtttataaccaaagccatgtactaatatagaattttaaaaaagtgaaaggaaaaaaagaaggaggagcatttgtccagttggctagtaaattaggatatgatgtattgtaaagtgccttaatcttggagacctacaacctgggtttcatcccagcttcagtacctccaccttgatgacttaaagcttcctcacctctctaagcctcagtttttttttttttt

SEQ ID NO: 685245 - DNA, 2777 bp, Homo sapiens
  misc_feature 2361, 2362, 2363, 2364, 2365, 2366, 2367, 2368, 2369, 2370,2371, 2372, 2373, 2374, 2375, 2376, 2377, 2378, 2379, 2380,2381, 2382, 2383, 2384, 2385, 2386, 2387, 2388, 2389, 2390,2391, 2392, 2393, 2394, 2395, 2396, 2397, 2398, 2399: n = A,T,C or G
  misc_feature 2400, 2401, 2402, 2403, 2404, 2405, 2406, 2407, 2408, 2409,2410, 2411, 2412, 2413, 2414, 2415, 2416, 2417, 2418, 2419,2420, 2421, 2422, 2423, 2424, 2425, 2426, 2427, 2428, 2429,2430, 2431, 2432, 2433, 2434, 2435, 2436, 2437, 2438: n = A,T,C or G
  misc_feature 2439, 2440, 2441, 2442, 2443, 2444, 2445, 2446, 2447, 2448,2449, 2450, 2451, 2452, 2453, 2454, 2455, 2456, 2457, 2458,2459, 2460: n = A,T,C or G
gtacccatttttatacactttgattctgaaccatgttaatatattacttattcaaaattaattagactatatgattaaggttaaaatgcagcactcaatttatatcttctattataattattaatattaaaattgatattaatattagatatcctgagctctagccagactctgacacaagctagcagttttgattctggcaaattctaattactctctactttcctaattcataaaatgttcatttatgaggatgcttcctcytttaacatcatagtgacaaagaacaaacggtcatttgaagaacagtatggcataagctgggacttttaaaattatctccatttctctcatataatgtatattctctcatatcacaatagtaatgtgaagtatttctttttctccatttcagagatgagaaatttgcaatgtagagcacttcagcagtttgctcatagtcacaagtcccagtggtgttacgaccgggacatgcacctgtgtcccctgtgattccaaagcttgcgctcattaccactatctgagaaatgctttctatcttaaaagtatctgatgaataagaggccggcactgagttgaagataagggccacagttgtaggctttgttcttttgttagtcctgctcaaattagaagactgaaaatggtcaggataagtgagacctgctaggtctctgtgccactttattggttatgccaatttgttgaccagggcaatagagctcacatttgccgttgaatagcatatggatttagtttttctttcttgaatcaagtagctcctactgctgtattccttgggtctggaagtcatttcatattggtccaatgtttgccattacattcttggaatcttgtttatagggctacaatggattagctagaaacagggccttcaggatgggaatgaactagacaagcaatttatgtgcagagaaaattgttgaaatgcaatggatgaatgtgaaatgtaattaacagggaaaaatgaaatcagagctagataattagttccatggattagatttgaagaagcacatagattacggtggagaatgaaaacaaaaggtcagggtccgaaaatcataaagagaccaggaataagggaacttgatcacatctgtttgttgttgttgttgttgttgatgttcgtttgtttttactttctttggtactgatcatatgttgtgtcctgagcttgctagtcctaaggtaaagattagactactagagtacttccaaatgtatctctctcctggatttgtccatttctgattcacttctgtctagtgtaacagtcagttaccttcatgtcttgcaaccaaccctacacagtcaatgaaaagaaagacaagaatgaaaaaattcaaaaaagtgagaccaggtttagaccttagggttgaaatcggtggaaaagaactagaattgtacatagaatagacccagactggatatcaagcttcctgtccctttgccaacattataagccaaggtccataacacagtgaaatataaagctgtaataccaaggccaatttccaggcctcaaagagcagcaaagtccataagagcagaagtcagtggaaggtttatgatgtgactaaactcaatgacttatgcatagatttgcaagagtttatgtcaaattcagcatcagccccagaggctgcatgggtgagaaactgatccaaaattgagctgactgccatcttcctccttctcctgcctcctcaggtatccttagtccagttggtggctctcctatccattcagtcatcccaccagctagttggggttccttctctgtttccagttgctcctttgtgttgcacatcccatatatccccatgcccacctgacttcacctcacatatgctttttctaacagctttaccgtccttatccacatccccactattcaggctcttacaataacctccaaggtgactgcaattgtctctcgatgggtctccctatgtccagggtctccctttttctaacttttgcttgctcattgattttagaggaatccagtaaagatgtagatacagactggttaaaatctttaaggctatcaatgccctaaaatgttgtttttttactctttcttaacctgcccctttctacaaagccttatcatacatataaatatcctgaaaaacgcatgtcacatggtaagcacacaataaatgttagcttccttctacttcaaattactaactactcaagattttgtgtttcactttctgtaaaatttgtgttatgaaaacaatagatacgttgaatatgctttttaaaattacactccatttcccaactccaagattcttcctataatannnnnnnnnnnnnnnnnnnnnnnnnnnnnnnnnnnnnnnnnnnnnnnnnnnnnnnnnnnnnnnnnnnnnnnnnnnnnnnnnnnnnnnnnnnnnnnnnnnntaagctttctgtttatggtttaatattatattcattttgaattgtgttgaaggatgcaaggtggtggaataatgtagcctttccagggtccagggagtgccaagaaaataggccttccctggtccatttatcatcatcaattcacaactgttcttctatatactggcccccctcccacccccactctgacccactctccacattaacaccattgctttccagtaggacttgcagggctgctcttccccataaaacccaccatctcgaagctaatgctcaggctctttgagttgatgcacaggaccacttgtgtgtgt

SEQ ID NO: 685246 - DNA, 626 bp, Homo sapiens
tctttttttgtttaattttggtaataaccagcctgrcaagtgttagatggtatgtcattgcagctttgatttacatttccctgttaaataatgatgttgaacatattttcaaatacctgttgaccatttgtatgtgttctttggagaattgaattgttgattcagttcccttacccacttttaaataaggtgattattaataatattagataaggctaatattaataatattatttttgctatgcaattgtagaagttttttatatattatagaaattatcttcttctaaaatatctgatttgcaaatattttttcccgcagtatacaatgccattttttctgtttattgtttcctttcctgtgcagatgctttttagtttgatgtaatccccattctccatttttatttttgtttcctatgcctttcatgtcatattcactaaaccattgtcaaggccaatgttaagaagctttcctcctatgttttctactagaagttttacagtttcaggtcttacatttaagtctttaattcattttgagctgacatttgtgtgcagcgttaagtgtaaaaatttatttttcttgaatgtgaatgtcctttttttcctgcaccatttgtcaa

SEQ ID NO: 685247 - DNA, 1798 bp, Homo sapiens
gtaagtatttagtatggtgtgttatctcctcatgctaacctttggacatgacaaattatacattcaaatgtatgtgtgcatgtatgtatacatctatgtttacaaacaaatacatatttatgtatttagctttgtgtatttaaatacacagatacacatacgcatatatgaataaatacacatatatatgtataaatgtgtacacatacacacattcatgtatgtgtgtataaaatttatgttcaaatatctgtgtgcattcctttgtatacttgacacataccagtatagaactgtcattgtattattttgccaaagaaagacatatataaaataaaacaaaatgaaaacaactgtaatctaatttcaatgttaatccatagatacaaagattatttttaatctcagaagagaaacatatactttcaaaatcaaacatacatgcaaacactctagtactatatttagatttctgagatgatccgcactatgcttatctttgtgttgcccatttgcctaaagtctgatacaaatgtcaccacaaattggccatgttcaaggagcctcagctctgtggaaggaaacttgagcagcctctacctccgcaagtttaatagcttcttcctctttcaggtgcttcccatttctacagccggtttactgcggtctcctcatgaacatgttgtcatcacgcccagtgtaactgctccctccctgcaggagtttactctgctacatggataagctaacaaaggctcatctggaactacagggttacatctctagtgtcattgtatgacacaggtatccttttctcactcaatgggaattctttgagtacaaggactttgagtttctatctttgtattctgcactgtgcttaacataaaatttagaacagagtgggtatttcattggcatgttaataaatgagtgagtagaagaggtaaacctaaaaagcacacgctaagctagttttacttagttaagcctttaataatttatccatatctaatttatcattttcttgtcaaatgtggtcatgttttgttttaattaacctttttagcttaattatgaacaaacttgaaagtaatttaatgaacttcgttagtatctaccactcaatttgctaatgctgatgtctctggtttttctaatatatgatatttacagtcagaagcaatacttagtccacaggaattagtttctcatgaaaacacctgcgatagaaaggaaggttgatcaaaataaacacaaacttagaatttgtattgaggcttaaactaaatgtgaacttctcaatgtcctttccctacggtttatagttgctcagattttgacttaggcaaatatatttgtttcaaatgatcaaatttcagttaaattgacttagtgaaatttccaggctgttttggttagagaggaggtagtgcaactttacttgggatttatttttcataatataagagcatattggttggtattcattagcattaatgagtcaacagagatgagtgaaagaaattggctgattctgaagsctttaggagaggagctccttgggaacaaggcacccgtctcagaagtaatgaatgatgaatggattcacagatactggttttctgtctacttcctgttctccctttaaaataaatttaaaaatatatagacagacaggcagacataaagaactactcgaacaagttaggaactttacagtgtttgttattaaagcccgtatggtcttgtgtgtgtagaactgagcaataagggaatcccagctagcaatgggatt

SEQ ID NO: 685248 - DNA, 1583 bp, Homo sapiens
agaatgcatattctgctgttgttggatagagtgttctataaatattgatgaggtcaattggtaatgtaactttgggcttctatagttttatcaattttccatttatttgttctatcaaatatacatacatgtatatgtatgtatgactagatagctatttcagccctgaattcaccattaagtaaaataagcatttgtttaagacattaagggaggcaaaccatacaattttatttcccctggttataatgctgttaactctttcattgccacagtcaactttagtcttttttttttttttttttttttttggcaaaggtctttatctgccttattcaactttaaattgcacrgttaaacacatttttttttttttggacatggtgagagcttaaagtttacaactttcgtttgaaagtggcatgttgtatcacatttgtttctcatttatctcaggagagtttcacttccattgaatgtaaacatagtcacctgggccagtctataaataaattatcagctgatttgtgtaacaaacaccaaagtcctttatgttattcaatggaatgtccaacgtccatcattgttgttctatgttagggcatcagttggtcctaatttgtccctgataagtctcaaactatttttgtatatttgtccatttctccatttagtactatcggtctttgctccatgcagtttgaaactctgaggttagattccagcacctttagtattgttatgtcttcttggtgttatgggttgaattgtttccctccaagttcatactcacattcataaggactatttgaagataggattgttgtaggtgtagttagttaagatgaggccatacaaaggtagggtgaacttccattccaatatgactaaagtccttacaaaaaggagaagttagtacacaggtatgcatgcaagtagaatactatgtgaagatgatgacagaggttagggtgatgcttcttacaagccagattcttatggacttggccatgagatacctaggaccctatccagacttgtgaggaggtgagagatcaagtaagatgagacagccatttaagattcactttcaaggaaggcctgtccttatataggacatcctgtgattcaggtcttctgattccggctggatctgcagcagatcttgatctggatccaggtccttctacaagctgagggttgtgaaagacttccagcaaagcatcagaagttaggcaaaaggaaggaccagattctttcacggcactgagagggaagcaactctactgacaacttgattttaaacttctagcctctagaattgtgagacaataaatttccactgtttaagcccctcagtttgcagtactttgctatggcacctttagcaaactaacacagttggtgaattgaccatttagttattaataatatctttcttgatccatagtaggttccttgttctgaagtctactttatctgatatcgacatgtctactccagttttttttttttactttaaaattgacatttagatggtatactttttcccatccttttacttgtaatttatctgcactatt

SEQ ID NO: 685249 - DNA, 1583 bp, Homo sapiens
agaatgcatattctgctgttgttggatagagtgttctataaatattgatgaggtcaattggtaatgtaactttgggcttctatagttttatcaattttccatttatttgttctatcaaatatacatacatgtatatgtatgtatgactagatagctatttcagccctgaattcaccattaagtaaaataagcatttgtttaagacattaagggaggcaaaccatacaattttatttcccctggttataatgctgttaactctttcattgccacagtcaactttagtcttttttttttttttttttttttttggcaaaggtctttatctgccttattcaactttaaattgcacggttaaacacatttttttttttttggacatggtgagagcttaaagtttacaactttcgtttgaaagtggcatgttgtatcacatttgtttctcatttatctcaggagagtttcacttccattgaatgtaaacatagtcacctgggccagtctataaataaattatcagctgatttgtgtaacaaacaccaaagtcctttatgwtattcaatggaatgtccaacgtccatcattgttgttctatgttagggcatcagttggtcctaatttgtccctgataagtctcaaactatttttgtatatttgtccatttctccatttagtactatcggtctttgctccatgcagtttgaaactctgaggttagattccagcacctttagtattgttatgtcttcttggtgttatgggttgaattgtttccctccaagttcatactcacattcataaggactatttgaagataggattgttgtaggtgtagttagttaagatgaggccatacaaaggtagggtgaacttccattccaatatgactaaagtccttacaaaaaggagaagttagtacacaggtatgcatgcaagtagaatactatgtgaagatgatgacagaggttagggtgatgcttcttacaagccagattcttatggacttggccatgagatacctaggaccctatccagacttgtgaggaggtgagagatcaagtaagatgagacagccatttaagattcactttcaaggaaggcctgtccttatataggacatcctgtgattcaggtcttctgattccggctggatctgcagcagatcttgatctggatccaggtccttctacaagctgagggttgtgaaagacttccagcaaagcatcagaagttaggcaaaaggaaggaccagattctttcacggcactgagagggaagcaactctactgacaacttgattttaaacttctagcctctagaattgtgagacaataaatttccactgtttaagcccctcagtttgcagtactttgctatggcacctttagcaaactaacacagttggtgaattgaccatttagttattaataatatctttcttgatccatagtaggttccttgttctgaagtctactttatctgatatcgacatgtctactccagttttttttttttactttaaaattgacatttagatggtatactttttcccatccttttacttgtaatttatctgcactatt

SEQ ID NO: 685250 - DNA, 1132 bp, Homo sapiens
tctatcgcttgataccagaggagtggatcaaaattgttccagaagtgaattcaggaagacagtgggcaattaattcaagatttatttttctatataaattgcagaagagaggtagtttggkggaaaatctcatcataataaattgtgaaagttatatttattgagacctattttcccggcatttattccttcttatgctattttatttacttcttatatctctcaaaaacttgagaaccatatgcattgttcaatgccatacacaattagtaggcaatagatggcaaaatccagagtcttatcattaaacgttttagttttttgagaacattatagttttataatgcttaattaatgtattgcttttctaggtacttattatactcaattcactcttttagatgattagaattttataaagatgtatagtgagcctgccctcagttatatgttaactttgcttattgccgaaattttccctgagatttggaatttatcacaataattagtaaataatatcttcttaaactaactttggaaaatttctatccaataattcaaaatatttgactggcaatcaggtaaattaaactgtgcaatacagtaggtagaactctgtgggctttgatatcacacaaacatgaatttaaagatgattcttccacttgtgttatcacaggcaattgaatcaattatgacattcttcagttcattactctataaaaaagggaaacgaagaataactaccttgtaatgcagttgtaaaggttacttgaagcaatttaggcaacatcaccaactatactacctagctcatcataaagactccagactgaatggtcactattgtccatttggttagactcatggttaaaagtgcagctctagaagtctgttgttggcatggatgggtcagctcctactagactaaatctcccactaatagcaacaacacattataaagtatataaacaaagacatccctaaagttgtgaagagttgacaaactatgcagttgctggaggggaagacttggaaaatgaagatggaaccgacacagggtgagcttgctgtttgaccatttttagcatgagacaagtctgcattaacatgctacacgagaagttcttca

SEQ ID NO: 685251 - DNA, 1132 bp, Homo sapiens
tctatcgcttgataccagaggagtggatcaaaattgttccagaagtgaattcaggaagacagtgggcaattaattcaagatttatttttctatataaattgcagaagagaggtagtttggtggaaaatctcatcataataaattgtgaaagttatatttattgagacctattttcccggcatttattccttcttatgctattttatttacttcttatatctctcaaaaacttgagaaccatatgcawtgttcaatgccatacacaattagtaggcaatagatggcaaaatccagagtcttatcattaaacgttttagttttttgagaacattatagttttataatgcttaattaatgtattgcttttctaggtacttattatactcaattcactcttttagatgattagaattttataaagatgtatagtgagcctgccctcagttatatgttaactttgcttattgccgaaattttccctgagatttggaatttatcacaataattagtaaataatatcttcttaaactaactttggaaaatttctatccaataattcaaaatatttgactggcaatcaggtaaattaaactgtgcaatacagtaggtagaactctgtgggctttgatatcacacaaacatgaatttaaagatgattcttccacttgtgttatcacaggcaattgaatcaattatgacattcttcagttcattactctataaaaaagggaaacgaagaataactaccttgtaatgcagttgtaaaggttacttgaagcaatttaggcaacatcaccaactatactacctagctcatcataaagactccagactgaatggtcactattgtccatttggttagactcatggttaaaagtgcagctctagaagtctgttgttggcatggatgggtcagctcctactagactaaatctcccactaatagcaacaacacattataaagtatataaacaaagacatccctaaagttgtgaagagttgacaaactatgcagttgctggaggggaagacttggaaaatgaagatggaaccgacacagggtgagcttgctgtttgaccatttttagcatgagacaagtctgcattaacatgctacacgagaagttcttca

SEQ ID NO: 685252 - DNA, 1132 bp, Homo sapiens
tctatcgcttgataccagaggagtggatcaaaattgttccagaagtgaattcaggaagacagtgggcaattaattcaagatttatttttctatataaattgcagaagagaggtagtttggtggaaaatctcatcataataaattgtgaaagttatatttattgagacctattttcccggcatttattccttcttatgctattttatttacttcttatatctctcaaaaacttgagaaccatatgcattgttcaatgccatacacaattagtaggcaatagatggcaaaatccagagtcttatcattaaacgttttagttttttgagaacattatagttttataatgcttaattaatgtattgctyttctaggtacttattatactcaattcactcttttagatgattagaattttataaagatgtatagtgagcctgccctcagttatatgttaactttgcttattgccgaaattttccctgagatttggaatttatcacaataattagtaaataatatcttcttaaactaactttggaaaatttctatccaataattcaaaatatttgactggcaatcaggtaaattaaactgtgcaatacagtaggtagaactctgtgggctttgatatcacacaaacatgaatttaaagatgattcttccacttgtgttatcacaggcaattgaatcaattatgacattcttcagttcattactctataaaaaagggaaacgaagaataactaccttgtaatgcagttgtaaaggttacttgaagcaatttaggcaacatcaccaactatactacctagctcatcataaagactccagactgaatggtcactattgtccatttggttagactcatggttaaaagtgcagctctagaagtctgttgttggcatggatgggtcagctcctactagactaaatctcccactaatagcaacaacacattataaagtatataaacaaagacatccctaaagttgtgaagagttgacaaactatgcagttgctggaggggaagacttggaaaatgaagatggaaccgacacagggtgagcttgctgtttgaccatttttagcatgagacaagtctgcattaacatgctacacgagaagttcttca

SEQ ID NO: 685253 - DNA, 1381 bp, Homo sapiens
atgttagcgccgaaaaatgacatctgagattcaatattcagtggatggcattaagatcaaaatggagatgaccaaggaaggtattaataccagcaaacatgaagatagttcaatggagaggatctggtctgaagagaagagagaaatatatttgaaaaagtgttgaaaagaggctgaaaccaatgaggcaataccaaaagtgccaacttgtgcatagttggattcccagatggagggagtggaaagcgagaataagacagacaaaacataaataaataacataaacataaatgtaaaaacagcatagccaggtattcctccaaattattaaaagttgtatatttatatttcaagaatcccagcaaaactcacacagtgtaaatgtgaagaaatctatgcacaggcatatcatggtcatgattatcaaaagcagaattaaacaaaatcttatatgtgtatagagagttacacatagaggaacaaatgggccaatattttcaaagtgctgacagaaaaatactaaagacttggaattccatactcagtgaaaattaatgtcctttaacaataaaagttaaataaaaacttcttcagacaaatgcaggtggagagaatttgttgcaaagagaactgtcctacaaagaagcatcaaaggacatctgtgagactgaagggaaatgttaccatagggaaactcagatcttcgggaagtaaaacacaataccagacatcagaaattatttggaaaatataggagaaatgttaaaggtaaaattacatttaaaaatttaaaacatagaaacatatactttktttttgagacaatgtgtccctctgtcagccaggctggagtgcagtggtgagatcacagctaactgcaacctcgacatcctaggcaaaagtaatcctcccacttcaggctcctgagtagctagaactatcctataggcacatgctaccacgcatagctaatttttaactttttgtagcgtcaaggtctcagctatgttgcttcagcaggtcttgagccccagttcctggcctgaagtgaaactcctgccttggtttcccaaagtgctgggattacaggcaagagccaccatgcccagtctaaaacttcctcttaatttttttaatatacattggaaaaagctgatttcctgtaagtgtccaaatgacaaattcccagctagacagatcaaaaacatatagtgagatacaaattgcagatatcaagaatgaaagaaaaattaaaactagattttgcagaaattaaaataatattaagaaaatattgccaggtgcagtggctcacacctgtaatcccagcaatttgggaggcctaggtgggtggatcacctgaggtcaggagttcaagaaa

SEQ ID NO: 685254 - DNA, 414 bp, Homo sapiens
ttggtggactgctctgctccacaaaataatcaaggaattcaagctagtagggtgactctttcatcctttgattgtggttttcatcatgagatgcaaggcaactcctcctgtttattattattattattattattattatgtatcattttgcaattagtggaaaggggaaaatgagagagaaagacacacagcctccttataaaaatacaatcacaaactggtgttggtatccgtttgcattctattgtctaaaakgtaaccacacttatttgcaaagagtttgggccattaagtatctagccaaacttaggagttttattactaaagggaaaatagagagacagaattgggggaagaaattagcagtacagtcattcaacatgtataatgttatcatatctgttttcagatata

SEQ ID NO: 685255 - DNA, 414 bp, Homo sapiens
ttggtggactgctctgctccacaaaataatcaaggaattcaagctagtagggtgactctttcatcctttgattgtggttttcatcatgagatgcaaggcaactcctcctgtttattattattattattattattattatgtatcattttgcaattagtggaaaggggaaaatgagagagaaagacacacagcctccttataaaaatacaatcacaaactggtgttggtatccgtttgcattctattgtctaaaagrtaaccacacttatttgcaaagagtttgggccattaagtatctagccaaacttaggagttttattactaaagggaaaatagagagacagaattgggggaagaaattagcagtacagtcattcaacatgtataatgttatcatatctgttttcagatata

SEQ ID NO: 685256 - DNA, 481 bp, Homo sapiens
gagagacttgataaaatgacttttaaaaaatatggattttcaggggggttgttaatgacagtttacttggttctgatttttcctttagcagttgcataattttaaggtcagagtaaaattgtattaatatgatgataaatatcccctgacttgtgttaggtgaagtctataaaggtaataaaatagacaagactgagtattagtaaagggaatatcatttcaatccatactctctttggttttggaatcatacaatgtattaggttggtgcaaaagtaatctgaatagatatgtaaagagaattactatgatgccacacaacaagatgaaatatcattatacataacgtctacattttatttcttcatatagattacagagacagcccactgacaaattaaaaacactctaggcatatatatatatacacacatatatttatatattatatagtaatatattactatataatatatastat

SEQ ID NO: 685257 - DNA, 1348 bp, Homo sapiens
tgaatctccaaacctgctatccatcattycagtaaatggtgcccccgtcgatccagctgctcaatacagttttgactcaactcatttgcttttgccccacattaaaccatcactcagccctcctgccatctccaaaaatcatcttcctctcccacctcctgtcacagttatttcttattcatcttttaattccagctacacatcatttttacagactgtgtctgtaatgtttccttttaaatacccaactagacctaacacatgtctggtccatactaagtgtccatcaggtatttgttgaatgaataaatggtgtttctcagaaatgccagattaggtctcccagctctctgttgctatcacactctgtaaatttccatacatcactcatccctcttttcaataactacttagtttgatgttcttcttcttttctaggctataagcttcctgaaaacagaaatctacatgaaggtgggaaagagcaagggaaggtcctaaaatacagacagtactggcctgactatggaagggtcatgctgataatacagggaagccatctgaataggttggggacagagctgtgattacagaggcatcagtctagagaaaagaagctcattctattttttgataccaaaggggaaaagggagtatcataaggtaggcatatttggtctcatacttctatataaatcagttccagtgctggttaaaatatagtttggcttgattattaatcactaaaatttaataaattcttttctttttcttttttgagacagagtcttgccctgtcacccaggctgcagggcaaagacgcaatctcagctcactgcaaactccgcctcccaggttcaaatgattctcctgcctcagcctcctgagtatctgggatttcaggcacgcgccaacatgcctggctaattttttgtatctttagtagagacaggtttcaccatgttggccaggctggtctcaaactcctgatctcgtgatccgcccactttggcctcctaaagtgctgggactacaggcgtgagccacagtgcctggcccatttttttaacttatgaatttcaaaaacttctaatttcaaccttgtatagtctcctagctaccagactgcagcctaattgctctaaaatacactttattaatttatacatggtttacttgctaatttagaattatatctaggtagatagatatatatgtgcatacacacacaaacactcattttatatattagaaaactgacatagcagaatctctttttacctcaagactatataattcataagtaatggagctgggatttgaaccgaggtctatgtgacttcaaaat

SEQ ID NO: 685258 - DNA, 613 bp, Homo sapiens
ctgtaaaccaatgagaattcctgccraacaactttgtatcagcccactccttgtctctttttgcctaaaaaacctgcttgtaacaaagaccaagtggagcactccccaaggcaacttggaagtgtgtcacaggcagctgtcctcaatcttagcctcacaggcagctgtcttcaaccttggcccaaacaaactctctatatgaattgttcctcagtttctttctttgcattgatagatggaaagaaggaagtcactgaacagttttaattaggaaaaaaatttgcactgtaggaaaattcctctaatagcagtgcagaattgcagcagtaatctaggagagaaaaaggccagaacaaaggtggtgacagtaggaaaagagggaattagaaatgtccaaaagacagcaaaggtagaatcaatggctctagtaactatctgaagagactgagctgagaatggggagggagaaggtgaaagtgactgccatgtttttggtttgggcggccaggtaaaggaggtgccattaactgagataagaaggagaaggagcatgtgtaaggaagaagacaatggtttgatttttgtcctttgaatttaagatgctggtgaaata

SEQ ID NO: 685259 - DNA, 613 bp, Homo sapiens
ctgtaaaccaatgagaattcctgccgaacaactttgtatcagcccactccttgtctctttttgcctaaaaaacctgcttgtaacaaagaccaagtggagcactccccaaggcaacttggaagtgtgtcacaggcagctgtcctcaatcttagcctcacaggcagctgtcttcaaccttggcccaaacaaactctctatatgaattgttcctcagtttctttctttgcattgatagatggaaagaaggaagtcactgaacagttttaattaggaaaaaaatttgcactgtaggaaaattcctctaatagcagtgcagaattgcagcagtaatctaggagagaaaaaggccagaacaaaggtggtgacagtaggaaaagagggaattagaaatgtccaaaagacagcaaaggtagaatcaatggctctagtaactatctgaagagactgagctgagaatggggagggagaaggtgaaagtgactgccatgtttttggtttgggcggccrggtaaaggaggtgccattaactgagataagaaggagaaggagcatgtgtaaggaagaagacaatggtttgatttttgtcctttgaatttaagatgctggtgaaata

SEQ ID NO: 685260 - DNA, 1426 bp, Homo sapiens
ttttattttgtacactgtgataagttaattttgatatcacctgtcatttattatagatatgaattatattttaatatgtaaaatatatgtcaatatatggaatatagataatatatttatatatatatgaaataacatatgaccccaagattgatgtatatatatgtgtctgtacatagcaagctatttgcttcctctagggggagcaaaacttaaaattatttttaaattttaaaagaaatgtattgattctcattaatacactgatatttttataatttgagaacaacattttctgctttaaatagtagctttttatacaaagttttgaatagcgacatattttaaaatgactagatattcatgcacataaatattcatctggacaaaaaaatttaagactccaaagaaatttttcagctgcttagagagaattttatggcttgacactgtagtttttctgttgccttcttaaattttcccttatagttatataacctactttatggaaaagctgccacagagtcagaaagctactagataatgacagaaaaaattgcatagtttccacttcactaagctcagagatgaaagttaaatattgtttttgtgttctagtcgtgtataaacttactatcacagaacacactctgcccaaatattactatgctattttggcaatagcactggtaatgttctccactgaatagtaaaatatttcagagtctctatgagcttaatatttcaaacctttaaaaactaaaggaaaaagaaataactttaaatagttttgttaatacaacgacatgaacaggttttgtaattttgattaagtgttttagaaaatgtttcatgggagatgactaccttgaatatgagatgactaccttgaatacatatgctctgggtttgatcaggtttttataaaaccttgaaaagcatataactatgttttatcgtagtggattaactgtcaagcaaatcacttgatgtgttttgatgttttatacagaccactatactgtctcttgggcagcaatactaacaacagaaaatatgcagaaacagagatttgttaagaacacatatatgcttcttgaattattcaggttttaaaatgatgctccaagcataccattttcaatactctgcaatgtgttctgttgacatttgctaaaattttgtcatgtatttttttcatctyataaaaataagtgaatattcaacttttccttctttatattatttttgtgagaaatgagatcctttatggtgagactgtgtcactacttgtattatattacactcactgaacacaatttttctcatttaaaaaatgaagattaaaatacatagagttaataaaattgctcaacactatgtcaaaaataagctagattatataaaaaacattagtttcttccat

SEQ ID NO: 685261 - DNA, 649 bp, Homo sapiens
tatatttattatagaactagatgaaataaaggttaaataaatctaatatgtaataaggtatttatctgacaatggatatatagcacagatataataattgagttcatttgggtgttttacagtttttcaggtgaaatgggaaaatttatggacataaagtcggctctattratctcattttaactttttttcatattgagttttgtctcctttttactccttaatatcatttattttctcttgctttctctttttttcttgctcagtcttgcctaaggttcatcatctttattagttttagcaaggaaccaacttctgcctttgatgacaccctattatattgttcccagtaatttctgttctttactgtttcatttcttatagtttctttgcttttccttttccttaggtgttttgttgttgttgtttcttaagtcaattactagcacattagcttttagcctttttaaaaataccaataaacctcttagggctataaattttcctcaaaaatcacattagctgctctcaaagtattggtaagtgttactttaactattgttaattttccattgttagttctctctcggatctgctcaagctccagacctcccctttttttccctgtgatcagcccaagggctgttaa

SEQ ID NO: 685262 - DNA, 649 bp, Homo sapiens
tatatttattatagaactagatgaaataaaggttaaataaatctaatatgtaataaggtatttatctgacaatggatatatagcacagatataataattgagttcatttgggtgttttacagtttttcaggtgaaatgggaaaatttatggacataaagtcggctctattaatctcattttaactttttttcatattgagttttgtctcctttttactccttaatatcatttattttctcttgctttctctttttttcttgctcagtcttgcctaaggttcatcatctttattagttttagcaaggaaccaacttctgcctttgatgacaccctattatattgttcccagtaatttctgttctttaytgtttcatttcttatagtttctttgcttttccttttccttaggtgttttgttgttgttgtttcttaagtcaattactagcacattagcttttagcctttttaaaaataccaataaacctcttagggctataaattttcctcaaaaatcacattagctgctctcaaagtattggtaagtgttactttaactattgttaattttccattgttagttctctctcggatctgctcaagctccagacctcccctttttttccctgtgatcagcccaagggctgttaa

SEQ ID NO: 685263 - DNA, 575 bp, Homo sapiens
tttctttttatctctgaatctgctgtttcctctatgtgcctgtctgtcccatcccacccctgcaaaatctgcatgctctttcctcctttagggcccctcccatttccacctctggcagtagggctttctctggtcttccttcccgggcaccattccaccccccttttaggacacttrttccattgcaagggaattcacagttaatcgataattgtgagttccctgagggctgggattttatcatatcatttttttttattcttagcacctaatccaagttctgagcatctaagtggggaagagagtaaaaccagagaagaaagaataaagagagaaagggagggaagaaaaaaggaaaggaaggaacaaagaaaaggagggagtaagagatggggagaaagccactttgatacacttattagaataaacgtttttggccagctaaccaactactgaaaaattggtacaggaaaacatacaaagaaaggaacacgtccttagcctacatttggaagtttgtatgtgaggcctgaaaaggatctaaaaagatatagtacagtcctttctaaaataac

SEQ ID NO: 685264 - DNA, 656 bp, Homo sapiens
tgatggatgtcattagagtgacaaaggctgaggacaagcaagtcattttcataaggcagaactgctactcagcttgtggggccaaccttttgctacaaaatgtaaatacttctatattgaccagtaaatagctgaatctttgagctcccacaaygtgacctcattgagctagccaccttgatgcttccccggggtctccttatgtccccactcctattgtgtagctgcagaagtgatgccaggcagggcagggtgttcctgggccctgctgaaacagtgcagctggcatctgttctgatgaccagtgcccaagccatatagctttttacgtgtttgagtagcacccctatgtccataagcctcaaaaatgacccaaaaaggaagaaaataaatttcaagtgatgtaagaaatttttaaggtatttaatgtctcagcttcacaccaatctatttttgttctacaatgaaatgcccttaaacatatacattcttaaaagcggaggtagtttccctccaacaaggccccgttcctaatagtagcatgggcattggcagtgttcacagtggctatcatggtcacagtcatggtcacacttgtattgacattccgccctccttgcttctctcacagcacatatctcctaaccagagtacca

SEQ ID NO: 685265 - DNA, 665 bp, Homo sapiens
tatagktggtgtacccttggtgcttcattgctgattatgttgttttgttccattttcttaactatatttggtatgcagaaattcaaccttaattatatattacaggtttttctttgactttaaaccatgactccttttgtttgaatatgttaaaaagataaatctcaaattgtgaaaaactgagttttaaaattacttcagcccatattttctgtctcaagtcttaatttaacacagttcttaaggaatgaacgtaggcactcataattgagtgcctctttgcctatggaattcttttcctctgttggcataccaaaattgacatttgttgagcttcaagttttaccacaaagcctctgaaccacattagtcaataattcatcccacatccttctttctgctctgaccccagttccagacagtttcttcaggtttttgctatagtgcagaggttacaacctggtggcctacagctctgatcttgcctgcaaatggtttttttgttgttgttgttggggggcaggttgggggagctgctgaacaaacaaaatttggggattatctgacaacaattgacaagtgggagagttgacataagaatccagttctggcttgtcttggaaaaatccaaagatctgaaaacaatttttggcataaaatcctga

SEQ ID NO: 685266 - DNA, 665 bp, Homo sapiens
tatagttggtgtacccttggtgcttcattgctgattatgttgttttgttccattttcttaactatatttggtatgcagaaattcaaccttaattatatattacaggtttttctttgactttaaaccatgactccttttgtttgaatatgttaaaaagataaatctcaaattgtgaaaaactgagttttaaaattacttcagcccatattttctgtctcaagtcttaatttaacacagttcttaaggaatgaacgtaggcactcataattgagtgcctctttgcctatggaattcttttcctctgttggcataccaaaattgacatttgttgagcttcaagttttaccacaaagcctctgaaccacattagtcaataattcatcccacatccttctttctgctctgaccccagttccagacagtttcttcaggtttttgctatagtgcagaggttacaacctggtggcctacagctctgatcttgcctgcaaatggtttttttgttgttgttgttggggggcrggttgggggagctgctgaacaaacaaaatttggggattatctgacaacaattgacaagtgggagagttgacataagaatccagttctggcttgtcttggaaaaatccaaagatctgaaaacaatttttggcataaaatcctga

SEQ ID NO: 685267 - DNA, 625 bp, Homo sapiens
tcaccttctgctaaacgaagaattggatatctgtttgtacagcacactgtagacctatggcagattgactctttggaaatagaaaaaatatatatttgactgacctccagccagccagaaataaatcctctgcataatcttgccaaaatgtcatttggttgtgaacagcgcccttcatttgtcttaggagagcctgcgtatcaggtaccaggccactgcaggcttttctgctcttcttttttctcccaggcagctgcatctttgataatgtggattcgtgaaaaaatctcattgtcctccttacctgtgtcatgaacttctttctcaccttattgaattatctgttgagtcaggaagtttttttttttacagtttagtttctaataaccatttgawgatgatgatgatgattattattggtcgttttagcccttgtgttatagctcacattaagttctcttctgatgccaactggaaattttaatctaccattactaagtttaaaaatatgttcacttttgcatatgggtagacaactttaatcatgatttttttttactgcttatcactgttggcttagctatgcttctactgggtgattgatgtgttttctttttttagttca

SEQ ID NO: 685268 - DNA, 2072 bp, Homo sapiens
aagacattactcagtgtcccttataaagggtcttccataataaaattttccctgaaattaatgccaagataaacaaaatctgccttgcatgtttctcttttgatgaagttagaactatactatgcaacagtttcccttttctgccttagtttcaggcaagtaaagctaaatccggtgctcagttggagtaactgacatctcaagtatgtactaatgtctctttctgcattccttttaattaatgtctgttatttttaacaacaaaatgttcagttatatatttagtttaattttgaaactatttaacatccttcttgcaagaattaaaccaaataactagttggcaaaaaccataattgtccttaatagttagagtttgtaacagtttgtgccttaaagatataaacttctattgtcttaaaaatgcatttatctcagaatgtaccaatgtgtgcagctccacccacctcgccatatactgttcagtttgtataaatacacctactaagacatgatgtctgggtcccaaatggacacatattaggttcatgtcttatagatgcctttacattcctgttagaaagtacttagcgtgttggtttgggagcctcatgcatgggagagaggtatacatcacagagacaatgatgagtctgtgagttctctgcagtaaaacccaccacaccctaaacttaaaggcacaaataatgttaatgaaggctggtcctgtatcagttgattgaaaagaacagtgatctacagagatccttacatagtgagcatgattaacattttttcctgctacaaaaaagtgtgaactttgaccagactatcatgtttctgctcctacctgccattaacatgagtctggtatttatatgattactccttttcccctttgccccataagtgaaaataagttcaataaatatattcactagacatcctaaatgctgaaaaggactgcttgctacatgtgacattatagttccataatcttgacaggaagcagcacccttacacaatgacctgttctctcctgatttactatagctgggatgtaacacaagtgactttgtgctgtgtaggtgaaacattcttaaaattttatgtattcagctctgaagtaaatatgacaaaatattaccatttttaaaattctggatggtaggcacatgtgtattcattgtattactctttgcacattcctgtatgttgaaatgttttttataatttttgaaactattatgtaatagagaaaaaaaaagagtccaccatggttgtttaggttgaagagtgggtaaggttagggagaggaaacagccatgcccttcacctggcaggcatggagattttccagaggtttctgtcagagaaaatcaccttaacttagtttggattacttctagatgaaaactctttttcgtagctagggaagaagtctgttatttatatttctgcatgcgatttattcatgtgtcagccctggactgagtattagagatctctccatgaaaggctgacatgtgtgcactgctagtgtcggtgtcagctgtgtgaaatcctatgcagccagactgtttgctccctgcaggccgcaaacctaaaagggtccttcaggctgtcaggtagccagcgggaactgtcaagagtctcaagcctgaggttccagttgcagaagaacctgcagttaaccagtgtgtgaggccaaattctttaaaatatgttgagatatcttatttgaagaaaaccttgtgcgtatttgtgtatgtgtgtgctcatgcacacacgtgtgcrtgtacgtgtgtgtacatacatgtgtatgtgtacatgcatgtatgtatatcacttagtctctgcttttgttgttgttaaagggaacagtgtgactttctgatctatctgacattggtttggggctgtgtgatgctgcatggcttgatgcagactagaattccagatgctactaactacattttctaggccaggggcatatttctgcacgtgtggaggtgcacgctgaaaggaattttcactttttagaagactcactgatccaaaagacacttttg

SEQ ID NO: 685269 - DNA, 2277 bp, Homo sapiens
ctccaggagcaataactctgtcagattgtcctgacacggtacattaagaggtgcagataaaagctacatcctgtaaaatatatacttcaatcgcacctgccttctgcacctccaccactgggaagggatgggtgtccgttcgtrttctgcattaccagcctcttagccagctgcctcgtttgattgttcgttgtgtcacttgaagatgaactgaaagaacaagaagaaaaacttaatgcacgccaatctgtatctctgaacttctcacgttaaatagacatagcaaaaaaaaaaaaaaaagtttgtcagcactgaacatcaattactaaacatttttttaaagtcaggctgggcatggtggctcacacctgtaatcccagcactttggaatcctgaggtagggggaatcacttgagtccagagttcaacaccagcctcagcaacatagcaagacccttgtctctacaaaaaattaaaaaattagccaggtatgggggcacatgcccatagtttaagctgctcaggaggctgaggaaggaggattgcttgagcccgagagttcgaggctgcagtgagcaacaagtgtgccactgtactacctgggcaaccaagtgagaccttgtctctaaaagaatccaaaaaatgaaaaaaacgaatttcagttttataagtttatgaattgtattttcttttcgttaggtttctgtggctttatttttctttcccatgattaatttctcccatgccttcagtctgtgggtctgtgtatcatttatttgactctttttagtagatccttaaaaagaactttgaagtttaccatttcagaaaacttcatccccagaaatcggtttattactatcagcagaagttatattttatatttgccctcactaatgaatggtaatagactgaatctggcccacacattagtgtgaacattttaaaattagtatcaacaattaaaactatggaatgtcatataaaatttcaaatttcttttttctctgacaaatctgaatattgagcaacattgagtccaatcctgtctggccataacctgcaggcactgaatagtggttgtcccctttagatggggaagaagctttccagctggcacagtccccacatctccctggttattaatacattctgatttattcaaagttcctgcaatagtgcttacaaatggtgggtaagagcataaatgggtgcaacttaaatgaaggggaatttcataatgtgtgtcaaattacaaatgcatatatcctttgaccaaagaattcacctctagacatttatttttatacttgtatttatgcaaaatgacctaagaataaggttacttattgaagcactgtttacaatagtgaaagattggaaacagtctgttcatagaatgggaactggtgaaaaaaggctgtagcatcccagagaaaactatgtagttataaagaaaagaatgagaaaactctctacaaactaacatggagaaattccaagatggtattatgttaaaagagaggcaagatacagaacagtggatatactatgctatcatctgtattcaatatatatgtatatttgctggtacatgcataaaacatctcaagaagtatgcaccaaattcataaaacactgattgcccctggaagggcaaccaggtagttgggtgacaggagtgagagggccaattttcacagaatatttaatgccctattgtaccttttaatttttaagccatatgattgtatcacctacttaaaaaaaaaataaatgtcctttctgagttctgtatgtatttgcattttcagtgcaatgagctataagaggctgtaccttaccaaatttaagagtttttattttaagattaaaaggatttttaataaaaattatcaaaggcagccgagtgttgaaactgttactctcaagtttttatcatttcctctataaagttgctcagacttagtttctggccttaaatcatacctattttcagcttccctgaaatcaagagtgtcctgtgccatatcaattaaagtaaatgtactttcaattaaaggtgttaagtatgagtctgaaaagattaattctttataaaaagatgaccttcagtagttcgctccaattaggcatttttccaactatatttcatcttgatgggacaagtctactactcacaatcaatcactgtgatcttttcaaaggcgagtattttaggttcagagtcataaaaagaatgacttgactacgcagcctccataacttgaaccacag

SEQ ID NO: 685270 - DNA, 2277 bp, Homo sapiens
ctccaggagcaataactctgtcagattgtcctgacacggtacattaagaggtgcagataaaagctacatcctgtaaaatatatacttcaatcgcacctgccttctgcacctccaccactgggaagggatgggtgtccgttcgtgttctgcattaccagcctcttagccagctgcctcgtttgattgttcgttgtgtcacttgaagatgaactgaaagaacaagaagaaaaacttaatgcacgccaatctgtatctctgaacttctcacgttaaatagacatagcaaaaaaaaaaaaaaaagtttgtcagcactgaacatcaattactaaacatttttttaaagtcaggctgggcatggtggctcacacctgtaatcccagcactttggaatcctgaggtagggggaatcacttgagtccagagttcaacaccagcctcagcaacatagcaagacccttgtctctacaaaaaattaaaaaattagccaggtatgggggcacatgcccatagtttaagctgctcaggaggctgaggaaggaggattgcttgagcccgagagttcgaggctgcagtgagcaacaagtgtgccactgtactacctgggcaaccaagtgagaccttgtctctaaaagaatccaaaaaatgaaaaaaacgaatttcagttttataagtttatgaattgtattttcttttcgttaggtttctgtggctttatttttctttcccatgattaatttctcccatgccttcagtctgtgggtctgtgtatcatttatttgactctttttagtagatccttaaaaagaactttgaagtttaccatttcagaaaacttcatccccagaaatcggtttattactatcagcagaagttatattttatatttgccctcactaatgaatggtaatagactgaatctggcccacacattagtgtgaacattttaaaattagtatcaacaattaaaactatggaatgtcatataaaatttcaaatttcttttttctctgacaaatctgaatattgagcaacattgagtccaatcctgtctggccataacctgcaggcactgaatagtggttgtcccctttagatggggaagaagctttccagctggcacagtccccacatctccctggttattaatacattctgatttattcaaagttcctgcaatagtgcttacaaatggtgggtaagagcataaatgggtgcaacttaaatgaaggggaatttcataatgtgtgtcaaattacaaatgcatatatcctttgaccaaagaattcacctctagacatttatttttatacttgtatttatgcaaaatgacctaagaataaggttacttattgaagcactgtttacaatagtgaaagattggaaacagtctgttcatagaatgggaactggtgaaaaaaggctgtagcatcccagagaaaactatgtagttataaagaaaagaatgagaaaactctctacaaactaacatggagaaattccaagatggtattatgttaaaagagaggcaagatacagaacagtggatatactatgctatcatctgtattcaatatatatgtatatttgctggtacatgcataaaacatctcaagaagtatgcaccaaattcataaaacactgattgcccctggaagggcaaccaggtagttgggtgacaggagtgagagggccaattttcacagaatatttaatgccctattgtaccttttaatttttaagccatatgattgtatcacctacttaaaaaaaaaawaaatgtcctttctgagttctgtatgtatttgcattttcagtgcaatgagctataagaggctgtaccttaccaaatttaagagtttttattttaagattaaaaggatttttaataaaaattatcaaaggcagccgagtgttgaaactgttactctcaagtttttatcatttcctctataaagttgctcagacttagtttctggccttaaatcatacctattttcagcttccctgaaatcaagagtgtcctgtgccatatcaattaaagtaaatgtactttcaattaaaggtgttaagtatgagtctgaaaagattaattctttataaaaagatgaccttcagtagttcgctccaattaggcatttttccaactatatttcatcttgatgggacaagtctactactcacaatcaatcactgtgatcttttcaaaggcgagtattttaggttcagagtcataaaaagaatgacttgactacgcagcctccataacttgaaccacag

SEQ ID NO: 685271 - DNA, 2277 bp, Homo sapiens
ctccaggagcaataactctgtcagattgtcctgacacggtacattaagaggtgcagataaaagctacatcctgtaaaatatatacttcaatcgcacctgccttctgcacctccaccactgggaagggatgggtgtccgttcgtgttctgcattaccagcctcttagccagctgcctcgtttgattgttcgttgtgtcacttgaagatgaactgaaagaacaagaagaaaaacttaatgcacgccaatctgtatctctgaacttctcacgttaaatagacatagcaaaaaaaaaaaaaaaagtttgtcagcactgaacatcaattactaaacatttttttaaagtcaggctgggcatggtggctcacacctgtaatcccagcactttggaatcctgaggtagggggaatcacttgagtccagagttcaacaccagcctcagcaacatagcaagacccttgtctctacaaaaaattaaaaaattagccaggtatgggggcacatgcccatagtttaagctgctcaggaggctgaggaaggaggattgcttgagcccgagagttcgaggctgcagtgagcaacaagtgtgccactgtactacctgggcaaccaagtgagaccttgtctctaaaagaatccaaaaaatgaaaaaaacgaatttcagttttataagtttatgaattgtattttcttttcgttaggtttctgtggctttatttttctttcccatgattaatttctcccatgccttcagtctgtgggtctgtgtatcatttatttgactctttttagtagatccttaaaaagaactttgaagtttaccatttcagaaaacttcatccccagaaatcggtttattactatcagcagaagttatattttatatttgccctcactaatgaatggtaatagactgaatctggcccacacattagtgtgaacattttaaaattagtatcaacaattaaaactatggaatgtcatataaaatttcaaatttcttttttctctgacaaatctgaatattgagcaacattgagtccaatcctgtctggccataacctgcaggcactgaatagtggttgtcccctttagatggggaagaagctttccagctggcacagtccccacatctccctggttattaatacattctgatttattcaaagttcctgcaatagtgcttacaaatggtgggtaagagcataaatgggtgcaacttaaatgaaggggaatttcataatgtgtgtcaaattacaaatgcatatatcctttgaccaaagaattcacctctagacatttatttttatacttgtatttatgcaaaatgacctaagaataaggttacttattgaagcactgtttacaatagtgaaagattggaaacagtctgttcatagaatgggaactggtgaaaaaaggctgtagcatcccagagaaaactatgtagttataaagaaaagaatgagaaaactctctacaaactaacatggagaaattccaagatggtattatgttaaaagagaggcaagatacagaacagtggatatactatgctatcatctgtattcaatatatatgtatatttgctggtacatgcataaaacatctcaagaagtatgcaccaaattcataaaacactgattgcccctggaagggcaaccaggtagttgggtgacaggagtgagagggccaattttcacagaatatttaatgccctattgtaccttttaatttttaagccatatgattgtatcacctacttaaaaaaaaaataaatgtcctttctgagttctgtatgtatttgcattttcagtgcaatgagctataagaggctgtaccttaccaaatttaagagtttttattttaagwttaaaaggatttttaataaaaattatcaaaggcagccgagtgttgaaactgttactctcaagtttttatcatttcctctataaagttgctcagacttagtttctggccttaaatcatacctattttcagcttccctgaaatcaagagtgtcctgtgccatatcaattaaagtaaatgtactttcaattaaaggtgttaagtatgagtctgaaaagattaattctttataaaaagatgaccttcagtagttcgctccaattaggcatttttccaactatatttcatcttgatgggacaagtctactactcacaatcaatcactgtgatcttttcaaaggcgagtattttaggttcagagtcataaaaagaatgacttgactacgcagcctccataacttgaaccacag

SEQ ID NO: 685272 - DNA, 658 bp, Homo sapiens
agaaaataaaataggctagaatcagaaagaagaaagaaaaatgctaatgctaaatacccaaaaatatgtgattgaaggcagcacaagtcactttctcatgcttttctaaatatgagaaataaaaccatttggaccatggtccttccaacagcagtcttcaggaagaatctttgaccttggcactatgaacaaatatttcctaattcccatttctatccaccctcccctctgctttctttccttggaccaaggaagctgttacgtcttatgaataggtttctgggctttcatctgagggattatttaaacttttcatcacttcaccaagctatcctgaargttagagcagagctacatgtgagtcttaaattcagaaattacaggtgtttggaaaaaagttagaaacaacaatttaatttaaaaatctccccattcaacagggtgcaccttagaatgatagccaatttatttttcattacacaattccaattcttatagctaaggcagctgaaagaatatcaatccaatctagagcagaggggcagagggaatggaatatgtactggaattgaccaccataaaactgaaatgtagggtaggtgtagcatagggagacagaatatttcatgtccaatcataaaggaatgactgtttataa

SEQ ID NO: 685273 - DNA, 649 bp, Homo sapiens
tttgattcatgcttgtttttctgttctcccctcttgtgtactctataatccaaacaaatcaaaatgctctgcatttctgccttcatcaacctgagttttctgatgaaaagacctccccctaactggacaaacacakttaaaaaactgtaacagatcatacaaaaggaagaaatataattattccttaacatgttaaaatgatttcactagtaaacaagtaaaaatgaaagcatgaagaaaattgcattttttaacctattaaattgcatagagacagacggatagacattcctttgctgacaatattgaggtgaatctggaaacttcatgtatggctggaaaaagaattaattatcttgcctttgccaaataaattggcatcatatattaacagttgtaaaaatgttcagaagcatagatctcataatcccacatttataaacttatcctaaataaagaaaccaaaggaggaggaataaatcttatctgtaaagatatgtttttctaatatcataacttaatgtcaaataatagtgaataaactaattaaattacgttaagtagaatattatgttgcaaccaaaaaaagatgacaattatgaggacaggtgtggcgacaaaggaaagtacttttaataagtaagttgaa

SEQ ID NO: 685274 - DNA, 1134 bp, Homo sapiens
aatgtatagcaataagagatattggatataacctgatatacaatagattgcagaattggtctggaagaattccaaatgcagcacaaatggcatatatttgaatccttcagtgaaaagctgttctgcattgttgaccataaattcgactggttgagtaattaaamtgagtttttgaaggtcaaagacattgtttccctggcatgttttacttgtactgttctgtgtatatttaataatagtatattactgggccaaattcttaaagtaattcaattatagtaaatgataatactcaactaagagagtcattaataacttttaatctatctcttgcaggcataggattctatttaggacacacacattgtaatggtttaactgtaggcaataatgtacaaatatatttagtagtaataattcataaaataccaaaatattggaacaattttaatcagattcacaataaatttattggctggaaaaatacagcattgatttacatattttaattcaagattgaaagttcatgatatattaaatatttggattaaaaatttttttattcacttctagaatttctaggtctcaggagaggtctgttagagatgctctgctttctgttacttttccatcatctctgatgtttttgtagacatgggagttttttttttgctcatattcacttgcttggtctatcaccctttttaaaaattgttagtttatgccatttcggaatattggcttcaagtttttttttttcctttttcactgtttcttaggaagcttttaagaggcatcaagtactgcatttcctaggttttccaatgtccttcttcactgttttgagagtcaactagggagaaggggcaggactacatgattgtccttggcctctctgtattctgttcagcctcatttgttcggcatttcagtgctgaatgcttgagaacattcagtggttcaatggagttcatacattgtatgagtacatatgttcacatgaaaatatatcattttgtgattacttgcatggcttgtttgctgggtgcccatggtctcccttattttatttttttctttgcttggggaccttcagacctctacttgactttaaatagaacttcattatggcag

SEQ ID NO: 685275 - DNA, 1134 bp, Homo sapiens
aatgtatagcaataagagatattggatataacctgatatacaatagattgcagaattggtctggaagaattccaaatgcagcacaaatggcatatatttgaatccttcagtgaaaagctgttctgcattgttgaccataaattcgactggttgagtaattaaactgagtttttgaaggtcaaagacattgtttccctggcatgttttacttgtactgttctgtgtatatttaataatagtatattactgggccaaattcttaaagtaattcaattatagtaaatgataatactcaactaagagagtcattaataacttttaatctatctcttgcaggcataggattctatttaggacacacacattgtaatggtttaactgtaggcaataatgtacaaatatatttagtagtaataattcataaaataccaaaatattggaacaattttaatcagattcacaataaatttattggctggaaaaatacagcattgatttacatattttaattcaagattgaaagttcatgatatattaaatatttggattaaaaattttttyattcacttctagaatttctaggtctcaggagaggtctgttagagatgctctgctttctgttacttttccatcatctctgatgtttttgtagacatgggagttttttttttgctcatattcacttgcttggtctatcaccctttttaaaaattgttagtttatgccatttcggaatattggcttcaagtttttttttttcctttttcactgtttcttaggaagcttttaagaggcatcaagtactgcatttcctaggttttccaatgtccttcttcactgttttgagagtcaactagggagaaggggcaggactacatgattgtccttggcctctctgtattctgttcagcctcatttgttcggcatttcagtgctgaatgcttgagaacattcagtggttcaatggagttcatacattgtatgagtacatatgttcacatgaaaatatatcattttgtgattacttgcatggcttgtttgctgggtgcccatggtctcccttattttatttttttctttgcttggggaccttcagacctctacttgactttaaatagaacttcattatggcag

SEQ ID NO: 685276 - DNA, 1134 bp, Homo sapiens
aatgtatagcaataagagatattggatataacctgatatacaatagattgcagaattggtctggaagaattccaaatgcagcacaaatggcatatatttgaatccttcagtgaaaagctgttctgcattgttgaccataaattcgactggttgagtaattaaactgagtttttgaaggtcaaagacattgtttccctggcatgttttacttgtactgttctgtgtatatttaataatagtatattactgggccaaattcttaaagtaattcaattatagtaaatgataatactcaactaagagagtcattaataacttttaatctatctcttgcaggcataggattctatttaggacacacacattgtaatggtttaactgtaggcaataatgtacaaatatatttagtagtaataattcataaaataccaaaatattggaacaattttaatcagattcacaataaatttattggctggaaaaatacagcattgatttacatattttaattcaagattgaaagttcatgatatattaaatatttggattaaaaatttttttattcacttctagaatttctaggtctcaggagaggtctgttagagatgctctgctttctgttacttttccatcatctctgatgtttttgtagacatgggagttttttttttgctcatattcacttgcttgstctatcaccctttttaaaaattgttagtttatgccatttcggaatattggcttcaagtttttttttttcctttttcactgtttcttaggaagcttttaagaggcatcaagtactgcatttcctaggttttccaatgtccttcttcactgttttgagagtcaactagggagaaggggcaggactacatgattgtccttggcctctctgtattctgttcagcctcatttgttcggcatttcagtgctgaatgcttgagaacattcagtggttcaatggagttcatacattgtatgagtacatatgttcacatgaaaatatatcattttgtgattacttgcatggcttgtttgctgggtgcccatggtctcccttattttatttttttctttgcttggggaccttcagacctctacttgactttaaatagaacttcattatggcag

SEQ ID NO: 685277 - DNA, 1134 bp, Homo sapiens
aatgtatagcaataagagatattggatataacctgatatacaatagattgcagaattggtctggaagaattccaaatgcagcacaaatggcatatatttgaatccttcagtgaaaagctgttctgcattgttgaccataaattcgactggttgagtaattaaactgagtttttgaaggtcaaagacattgtttccctggcatgttttacttgtactgttctgtgtatatttaataatagtatattactgggccaaattcttaaagtaattcaattatagtaaatgataatactcaactaagagagtcattaataacttttaatctatctcttgcaggcataggattctatttaggacacacacattgtaatggtttaactgtaggcaataatgtacaaatatatttagtagtaataattcataaaataccaaaatattggaacaattttaatcagattcacaataaatttattggctggaaaaatacagcattgatttacatattttaattcaagattgaaagttcatgatatattaaatatttggattaaaaatttttttattcacttctagaatttctaggtctcaggagaggtctgttagagatgctctgctttctgttacttttccatcatctctgatgtttttgtagacatgggagttttttttttgctcatattcacttgcttggtctatcaccctttttaaaaattgttagtttatgccatttcggaatattggcttcaagtttttttttttcctttttcactgtttcttaggaagcttttaagaggcatcaagtactgcatttcctaggttttccaatgtccttcttcactgttttgagagtcaactagggagaaggggcaggactacatgattgtccttggcctctctgtattctgttcagcctcatttgttcggcatttcagtgctgaatgcttgagaacattcartggttcaatggagttcatacattgtatgagtacatatgttcacatgaaaatatatcattttgtgattacttgcatggcttgtttgctgggtgcccatggtctcccttattttatttttttctttgcttggggaccttcagacctctacttgactttaaatagaacttcattatggcag

SEQ ID NO: 685278 - DNA, 666 bp, Homo sapiens
aacctgggaggtggaggttgtggtgagccgagatcatgccacattgcactctagcctgggcaacaagagcgacactccatctgagaaaaaaaaaaaagaaaaagaaagacagaaagaaaaaattggaaaggcaccctactgaatggattttttcttcaaattatttatcagataagggatatatgtctagaatgcgtaaagaactcttacaactcaataataaaaagacaaacaagccaattaagaagtagacaaaagatctgaccagatacctcacacattgttttyagtgtttggtgagggaaggaagaaagggaaaaaggaagaaagaaaggaaggaaagaagaaaggatgggaggaagggaaggaaagaaggagggagagaggaagattctttcttgcaggtctttgggcactaggtatattttagggcaggaaacagagacttgggaaaaaggaccttgggtgaatttcaagatcagttatcagatgattattcattaccacagaatctccatatcttctagtaggaggggaccctgatctaattccttcactgaataaggtaaacagcgtcccaagaggtgtagtgactttctcaagatcatatgtccaatatgaaagaagctagggttagcagagtttaagtctcaaatgacttatgaa

SEQ ID NO: 685279 - DNA, 578 bp, Homo sapiens
catttgcaataaatatcaccagactgtcctttgtaggctttggcttatcactttatagcgtaaaaatttttataagatatatccttacctcataccatataaaaaattaactcaaaatgaaacaaaagcctacatgtaagagaatacacagggataaatcctgatgatctcagatttggcaacgggttctttgttctgagaatcctgactccctcacagtgcgtgtcagaagctcaagcaacaagagaaaaacatagatgaaatgaatttcaacaaaattttaaacttttgtgcattgaagaactctatcaaaaaagtgaaatgacaacccacagaatgagagaatatgtttgccaactgtatatrtctgttcagggtctgtctaatattgtcctgtgatttcccagatttttttttttgagatggagtctcgctctgttgcccaggcgggagtgcagtggcacgatctcagctcactgaaacctctgcctcccatgttcaagccattctcccacctcagccccccaattagctgggattacaggcacacgccaccacacctggctaatttctgtatg

SEQ ID NO: 685280 - DNA, 448 bp, Homo sapiens
ctttcttcctttctttttctttcttyctttctttctttctttctttctttctttctttctttctttctttctttctttttctttctctctctttttctttccttttctttccctctttctttcttctctttcttctttttttctctttcttgacagagtcttgctctgtagcccagcctggagtgcaatggcacgatctcagctcactgcaacctctgcctcctgggttcaagtgattctcctgcctcagcctcctgagtagctgggattacaggcatgcaccaccatgcccagctaatttttgtattttcagtagaggcaggtttcaccgtgttggccaggctggccttgaattcccaaccacaagtgatttgcctgcctagtaactacatttttttaaaaaaaatatgattcacaggtaataccaaaaggtttactgttttgccat

SEQ ID NO: 685281 - DNA, 448 bp, Homo sapiens
ctttcttcctttctttttctttctttcttyctttctttctttctttctttctttctttctttctttctttctttctttttctttctctctctttttctttccttttctttccctctttctttcttctctttcttctttttttctctttcttgacagagtcttgctctgtagcccagcctggagtgcaatggcacgatctcagctcactgcaacctctgcctcctgggttcaagtgattctcctgcctcagcctcctgagtagctgggattacaggcatgcaccaccatgcccagctaatttttgtattttcagtagaggcaggtttcaccgtgttggccaggctggccttgaattcccaaccacaagtgatttgcctgcctagtaactacatttttttaaaaaaaatatgattcacaggtaataccaaaaggtttactgttttgccat

SEQ ID NO: 685282 - DNA, 448 bp, Homo sapiens
ctttcttcctttctttttctttctttctttcttyctttctttctttctttctttctttctttctttctttctttctttttctttctctctctttttctttccttttctttccctctttctttcttctctttcttctttttttctctttcttgacagagtcttgctctgtagcccagcctggagtgcaatggcacgatctcagctcactgcaacctctgcctcctgggttcaagtgattctcctgcctcagcctcctgagtagctgggattacaggcatgcaccaccatgcccagctaatttttgtattttcagtagaggcaggtttcaccgtgttggccaggctggccttgaattcccaaccacaagtgatttgcctgcctagtaactacatttttttaaaaaaaatatgattcacaggtaataccaaaaggtttactgttttgccat

SEQ ID NO: 685283 - DNA, 448 bp, Homo sapiens
ctttcttcctttctttttctttctttctttctttctttcttyctttctttctttctttctttctttctttctttctttttctttctctctctttttctttccttttctttccctctttctttcttctctttcttctttttttctctttcttgacagagtcttgctctgtagcccagcctggagtgcaatggcacgatctcagctcactgcaacctctgcctcctgggttcaagtgattctcctgcctcagcctcctgagtagctgggattacaggcatgcaccaccatgcccagctaatttttgtattttcagtagaggcaggtttcaccgtgttggccaggctggccttgaattcccaaccacaagtgatttgcctgcctagtaactacatttttttaaaaaaaatatgattcacaggtaataccaaaaggtttactgttttgccat

SEQ ID NO: 685284 - DNA, 662 bp, Homo sapiens
tatgcaaacagcagtttaagactgggtttcttaaatctaccaggaaagtctgtggtggatttgactagggggtggttgaaaagccagtcatttttgtttacmaaatatacagtacttcttaatttataactttataaatgtgtcaacttgttttacccttatgaaaatttaataaatttaataacagcaaaagatgcatagtctgaaaagagtatctggcacaccattcatgaaagtattcagtatgattatcaagaaatataaatttaaaagaacaaatacaatcactatattctaaatcaaacatttcacatttcactcaatttcacttatatagcctggggtaagcaacattaggtccaactcttcagtgactcaagttgtcaaaattcattatcagtgtattacttacctctttttctttatgataacgcaagaatagtagtttagatgatggtataaacagtttttctacaaatgatgatggcagtttcgtatttatctgttcaacaatctaaaagaataaaatttttaaaaaatgagcttctcaaattacaaaaagacatggagaaaccttaaaggcacactggtaagtgaaagaagccaactgaaaaggctacatactatatgactccaactacatggcattctggaaaaggcaa

SEQ ID NO: 685285 - DNA, 662 bp, Homo sapiens
tatgcaaacagcagtttaagactgggtttcttaaatctaccaggaaagtctgtggtggatttgactagggggtggttgaaaagccagtcatttttgtttaccaaatatacagtacttcttaatttataactttataaatgtgtcaacttgttttacccttatgaaaatttaataaatttaataacagcaaragatgcatagtctgaaaagagtatctggcacaccattcatgaaagtattcagtatgattatcaagaaatataaatttaaaagaacaaatacaatcactatattctaaatcaaacatttcacatttcactcaatttcacttatatagcctggggtaagcaacattaggtccaactcttcagtgactcaagttgtcaaaattcattatcagtgtattacttacctctttttctttatgataacgcaagaatagtagtttagatgatggtataaacagtttttctacaaatgatgatggcagtttcgtatttatctgttcaacaatctaaaagaataaaatttttaaaaaatgagcttctcaaattacaaaaagacatggagaaaccttaaaggcacactggtaagtgaaagaagccaactgaaaaggctacatactatatgactccaactacatggcattctggaaaaggcaa

SEQ ID NO: 685286 - DNA, 662 bp, Homo sapiens
tatgcaaacagcagtttaagactgggtttcttaaatctaccaggaaagtctgtggtggatttgactagggggtggttgaaaagccagtcatttttgtttaccaaatatacagtacttcttaatttataactttataaatgtgtcaacttgttttacccttatgaaaatttaataaatttaataacagcaaaagatgcatagtctgaaaagagtatctggcacaycattcatgaaagtattcagtatgattatcaagaaatataaatttaaaagaacaaatacaatcactatattctaaatcaaacatttcacatttcactcaatttcacttatatagcctggggtaagcaacattaggtccaactcttcagtgactcaagttgtcaaaattcattatcagtgtattacttacctctttttctttatgataacgcaagaatagtagtttagatgatggtataaacagtttttctacaaatgatgatggcagtttcgtatttatctgttcaacaatctaaaagaataaaatttttaaaaaatgagcttctcaaattacaaaaagacatggagaaaccttaaaggcacactggtaagtgaaagaagccaactgaaaaggctacatactatatgactccaactacatggcattctggaaaaggcaa

SEQ ID NO: 685287 - DNA, 1387 bp, Homo sapiens
cagcaaaagtatatgctcctaaaagcaagttttatcctaacggtaaaattttcatcagttagattaaattttttatgactgtatcacacatgcttctttctccttattcaaagcagagtacaatgcctggggttcatttcttgtgtcttttccactgaaccctcactggatgtgctatatacagtgcagctaatgtctgaggctgctgaagtgtggcaatctagctacctcatttttaatttgtttatgttctttgatatcaggctatcaaagaatataaagatacacaagttttcatatgagttccatcttatgctcagagaagattactttctgaggcttctcctatagtgtgctattcgtaatatgttgaaaaactaaaaggaaacccaataatttaaaagtaaaattataagaaatattatttaaaaatgaaagaatgagatttaaaaattcagagtggccttttgtcatgggagggtaggggagttggatgaaaggaggatgagctataacaggattccctgcttttctggttgtttaagaaagcagtcagacaatatatacatatatacatacatacatacatgctaaacaaatgaaggattaataacagttcacctggtaaagagaagcatttacaatgtaaaacaattttatttttgaatgacacttcaaatgcccaaaagcacttacatctgttacgtatgcctcagtaattggagggcccgaattgggctgaggctttccccagtgctcctcaccacagtactaaatacccggagaagcgcagccagctttggtaatgacactgatggaggagggacgtcttcatccactgattccccagaggccacatggctgaggtcctagatgtgaattcacagcattcttaataagtagtacattgtttaaaaaaacaaaacaaaacaaaaaaaaactctaaaatatttcaatcaattcattttagaatagatttttaggcttttagaaagagaactgtggcccatgagaatattcatgactctgaatataaaaatgggttttacctaattatttcaaaaagccaacattaaacccaatagacaacaaattaaggaaataatctcttaaatcaactcagaaagctgtyggggaaaaataaattctagcacatatgctctagttatatgtaggtataaatgaagacggaagcttttgccactcctgaattagtttttggctaaaaatctcattctaggtattctttgagccactcagctcaacagtaagtcctccaaaccaagagcatgcacatgaagagcaaagggagattacaagacctggtctacagatgtgtaactgaagaagtacgatatatgaaaaggacaagattcgcaaaaactag

SEQ ID NO: 685288 - DNA, 597 bp, Homo sapiens
gtactcaaattggagtggcaaaccagaaagtcacagctacagactttcagtggagctgactcgccygtgtctccttcctgttttcatgtgttgcagcctgttctcttcagagcctgacacactgacagtagacctctgcaggacaactttgacacccagttctctccaagctgccagtgagctccctgtgcagcctcactcctcacctacagcatgagcccttgcagctctcccagcatcacaatcttgtatctcagtcctggcttctttcactgctggcatccctccgtctctccctttttcacctacttttcttttttcaaagaattcttctctttcatctgcttatatgaaaaataatgacacctctgaaattctttcctgtagttctgcagcatcaatgccaggaagacaggcctcatcctcccagcttctatgctgctcctttcagatcccttaccctgtccccattttcatgacacgggctctccagccaggaagaagacactgtttctcactctctctcttttccatctttgcctgtccctctcgctgtgtaacttcccttataactcagcctgaggccagtgctagaaa

SEQ ID NO: 685289 - DNA, 597 bp, Homo sapiens
gtactcaaattggagtggcaaaccagaaagtcacagctacagactttcagtggagctgactcgcccgtgtctccttcctgttttcatgtgttgcagcctgttctcttcagagcctracacactgacagtagacctctgcaggacaactttgacacccagttctctccaagctgccagtgagctccctgtgcagcctcactcctcacctacagcatgagcccttgcagctctcccagcatcacaatcttgtatctcagtcctggcttctttcactgctggcatccctccgtctctccctttttcacctacttttcttttttcaaagaattcttctctttcatctgcttatatgaaaaataatgacacctctgaaattctttcctgtagttctgcagcatcaatgccaggaagacaggcctcatcctcccagcttctatgctgctcctttcagatcccttaccctgtccccattttcatgacacgggctctccagccaggaagaagacactgtttctcactctctctcttttccatctttgcctgtccctctcgctgtgtaacttcccttataactcagcctgaggccagtgctagaaa

SEQ ID NO: 685290 - DNA, 597 bp, Homo sapiens
gtactcaaattggagtggcaaaccagaaagtcacagctacagactttcagtggagctgactcgcccgtgtctccttcctgttttcatgtgttgcagcctgttctcttcagagcctgacacactgacagtagacctctgcaggacaactttgacacccagttctctccaagctgccagtgagctccctgtgcagcctcactcctcacctacagcatgagcccttgcagctctcccagcatcacaatcttgtatctcagtcctggcttctttcactgctggcrtccctccgtctctccctttttcacctacttttcttttttcaaagaattcttctctttcatctgcttatatgaaaaataatgacacctctgaaattctttcctgtagttctgcagcatcaatgccaggaagacaggcctcatcctcccagcttctatgctgctcctttcagatcccttaccctgtccccattttcatgacacgggctctccagccaggaagaagacactgtttctcactctctctcttttccatctttgcctgtccctctcgctgtgtaacttcccttataactcagcctgaggccagtgctagaaa

SEQ ID NO: 685291 - DNA, 597 bp, Homo sapiens
gtactcaaattggagtggcaaaccagaaagtcacagctacagactttcagtggagctgactcgcccgtgtctccttcctgttttcatgtgttgcagcctgttctcttcagagcctgacacactgacagtagacctctgcaggacaactttgacacccagttctctccaagctgccagtgagctccctgtgcagcctcactcctcacctacagcatgagcccttgcagctctcccagcatcacaatcttgtatctcagtcctggcttctttcactgctggcatccctccgtctctccctttttcacctacttttcttttttcaaagaattcttctctttcatctgcttatatgaaaaataatgacacctctgaaattctttcctgtagtyctgcagcatcaatgccaggaagacaggcctcatcctcccagcttctatgctgctcctttcagatcccttaccctgtccccattttcatgacacgggctctccagccaggaagaagacactgtttctcactctctctcttttccatctttgcctgtccctctcgctgtgtaacttcccttataactcagcctgaggccagtgctagaaa

SEQ ID NO: 685292 - DNA, 597 bp, Homo sapiens
gtactcaaattggagtggcaaaccagaaagtcacagctacagactttcagtggagctgactcgcccgtgtctccttcctgttttcatgtgttgcagcctgttctcttcagagcctgacacactgacagtagacctctgcaggacaactttgacacccagttctctccaagctgccagtgagctccctgtgcagcctcactcctcacctacagcatgagcccttgcagctctcccagcatcacaatcttgtatctcagtcctggcttctttcactgctggcatccctccgtctctccctttttcacctacttttcttttttcaaagaattcttctctttcatctgcttatatgaaaaataatgacacctctgaaattctttcctgtagttctgcagcatcaatgccaggaagacagrcctcatcctcccagcttctatgctgctcctttcagatcccttaccctgtccccattttcatgacacgggctctccagccaggaagaagacactgtttctcactctctctcttttccatctttgcctgtccctctcgctgtgtaacttcccttataactcagcctgaggccagtgctagaaa

SEQ ID NO: 685293 - DNA, 681 bp, Homo sapiens
ctgagggtggagctgagggtggaaggggagtgagctgacgctcggaaggtgtcttgagattatcatccgctgagggtggaagcggcccccgcagacgctcggcaggtgtcttgatattatcatctgctgagggtggagctgagggtggaaggggagtgagctgacgctcggaaggtgtcttgagattatcatccgctgagggtggaagcggcccccgcagacgctcggcaggtgtcttgatattatcatctgctgagggtggagctgagggtggaaggggagtgagctgacgctcggaaggtgtcttgagattatcatccgctgagggtggaagcggcccccgcagacgctcggcaggtgkcttgatattatcatctgctgagggtggagctgagggtggaaggggagtgagctgacgctcggaaggtgtcttgagattatcatccgctgagggtggaagcggcccccgcagacgctccccgcagacgctcggcaggtgtcttgatattatcatctgctgagggtggagctgagggtggaaggggagtgagctgacgctcggaaggtgtcttgagattatcatccgctgagggtggaagcggcccccgcagacgctcggcaggtgtcttgatattatcatctgctgagggtggagctgagggtggaaggggagtgagctga

SEQ ID NO: 685294 - DNA, 681 bp, Homo sapiens
ctgagggtggagctgagggtggaaggggagtgagctgacgctcggaaggtgtcttgagattatcatccgctgagggtggaagcggcccccgcagacgctcggcaggtgtcttgatattatcatctgctgagggtggagctgagggtggaaggggagtgagctgacgctcggaaggtgtcttgagattatcatccgctgagggtggaagcggcccccgcagacgctcggcaggtgtcttgatattatcatctgctgagggtggagctgagggtggaaggggagtgagctgacgctcggaaggtgtcttgagattatcatccgctgagggtggaagcggcccccgcagacgctcggcaggtgtcttgatattatcatctgctgagggtggagctgagggtggaaggggagtgagctgacgctcggaaggtgtcttgagattatcatcygctgagggtggaagcggcccccgcagacgctccccgcagacgctcggcaggtgtcttgatattatcatctgctgagggtggagctgagggtggaaggggagtgagctgacgctcggaaggtgtcttgagattatcatccgctgagggtggaagcggcccccgcagacgctcggcaggtgtcttgatattatcatctgctgagggtggagctgagggtggaaggggagtgagctga

SEQ ID NO: 685295 - DNA, 1403 bp, Homo sapiens
ccaaaattcctgtggtgaagctctattccccagtattttagaatgtaatggtattcaaagacagggcctttaaagaagtaattaaaattagccagatgtggtggtggatgcctgtaatcccagctactcgggaggctgaggcaggggaatcgcttgaacccgggaggcggagcttgcagtgagccgagatcacaccactgtactccagcctgggcgagagagcgagactccatctttaaaaaaaaaaaaaaaaaaagaggtaattaaggttaaatgaagtcataagatggggccctaattcaacaggactgatgtccttataagaagagaaagagacagcagggaggggtgtgcacagggaatagaccacgtgcggacacagcgggaagatggctgtctaccagccaaggaaggaaggcgccggagaaaccaaacctgctcacaccttgatcttggacttccagtctccagagctttggggaaataaactcctgttgttgaattcacccagtctatggtcttagttctggcagcctgagcagactaactttagtgcccacgcagcctgaggtttgctctgaactgctaggatcgggggtgggaggctggaatgcaggagagtgttgcatccacagggcccggcctcccccacctggctctatgttccatgttcctctcaaccaggtcgtccctctgccccttgcctgggagagtgaggtcccttctgaacccccacctccaaatccagttccttcccaccgcacgctgcccacaacatctgctcatcttccaggcctctagatccaatttggaaaccaccattttttccctggctttaaaaggtagatttactcagaaaatttcatgcagaagaaaattataatcccattgtggaaatatacaaagaccagccaaatgagaacagcaaggctattgattcagagcttgctctagcaagggagtcggccattgtcacttttgtttggcagagactcaaaggcaggctgaggaggggaagcctcatggtggaaaaagggaggcttcaggggtgccctgatggatgctgccggcatggagaaactggaggcagctaactagaagagggcattttatgggattttggttaggggcaaatacttggttttctttggctggtcctaagttaaaaggggggacaaaagttacagaggctgaggctgaggcaggtggatcacttgaagtcaggagttcaagactagmctggccaacatggcaaaaccctgtctctactaaaaatacaaaaattagccgggtgtggtggcacgctgtaatcccagcactttgggaggccgaggtgggtggatcacttgaggtcaggagttgaagaccagcctggccagcatggcaaaaccccatctctatta

SEQ ID NO: 685296 - DNA, 630 bp, Homo sapiens
ttcctcagcttatctcttgaatggcttgtcacagaaagatcttgggtcaggagtcagccagaatactgcagagtccactgtcccaaaggttctgaagtccttccctcctccccacccctctgaggtgggtactctcacaggtggcctgtcttcatcttgctgtaatttagggagaccaaacactttgttaggaaggcatccaggttccttgctagggtaagaagcctgttgtactttttgtgattttttttttctggaacctaaggaggaatttttcctttkcatctttgatcctgcccttggcttggaaggaaagtaatggaaaccaaaatgttggaccttgggctccaaagtgaagcccttcctgtgaacaccaccaaattgacaggggcagctccagggtgccctaaacacactttaagtttctgcagctcagctggggagggctttcctttaccctacttaagcgtcagttccctgctctgtaaaatgcccttgctggttactgtgtggattaaatgaaatgcctagcacagagcttggcactcagtccttgctcaataaatgttcattgttactggtagtacagatagggtattccttatttgaaatgcttggggccagaagtgt

SEQ ID NO: 685297 - DNA, 672 bp, Homo sapiens
ataaatgatgctataatcctacagtgaaatactatttaacaacaaaaaagaacaaactactgatctgctcaacaacatgcagacatctcaaaggcattatgttgagcaaatgaaactagctcacacagcccaaaagaactgtgtggttccatttatatgaaattcaagacataatgttgagctaatgagatcatacacaaaagtctagggtattatttcactacatgaagcccaaggcaggcaaaactaatagatgtaaaagaagtgcctaaatttgagtagaaaattgtacatatacactgaaaagcagcatcaaagatcctgtagtgtactagatttggcttatatttttgtgtttagtggttattcagaratataagaagtaaaaaaatttatcaacccatacccttgagatctatgcattttcacatataaagtatatacatcaaaagactattaaaaatttcctagaattgaaacagaaaataaacatgtaaaaccctaaaccatacagaggataacagaaaaatgcagcttgggtgaagatgcatcccgtaatcactgaaaatgagaagtgatttaggaataaaagttatagtctcagaatgcactaaagcacttgaacttgaagttttgtcataatgaagtatacagaaattcaaggtatcattc

SEQ ID NO: 685298 - DNA, 1155 bp, Homo sapiens
catttgtaaaaaaaaaaactttaattgacttccatcatactcactcaccttggacaactacaaaaattgttagaagtgctttattaaaatatttaaaacaacatgttatgaggatctatggatgaaaagaataagtgagtttgatttctgcatagtcagtggaactctgtaatatgcagtctttgagatatacaaaataatttaataaagcaaaatagttttgatgcattatagaagcctcagatgaataccccgatagtactgcattatcagatgttcattactctcttgttgcacaaatgtataccttcaaacaggtatgcagcattatagaaaaaaaagagtctttcattaatttcaggagtattcagaaatggctctggtttcctaattaaaagataaattgaatctaacagaaatgagctgcaaatgactgctagtaagcttgagagttaaatttataaaaagcctgtgacttttaatgtattaaaaagtgaaagaaagacttgctcttgacttcactaaaaacagcatgtccttaaagattgtaagtactgataggatttttccactaataagcagaaggctcttttgacattttaataagattatattcttatgttcttttggaccaagattaatattatattgttctttgagtaagatattttttctttgtaaatgtttgtgtcttctaaatgcagtcattttcagaatttaaaaaattcactttatacaggatctataatattatttaaagataaattccccagtaggacttacatacacccaaaaaacgaaaacaaacttatcctgtaraaataattccttgtacttcaacaatgtcacttttagaccatgctccagtggataggtagcttatatattggaagtaaagcaaatctaaattttttactttgataaaatattctcattatgtcttagagaattaacattttccaagaagccaaactcacttctccgttatatatttttactgaatgtggcagttagtaccatcaaattgttgtgtgtcatacaattgttacggattcaattgaatgcccccaaaattcctatgttgaggccctaaccctcaatgtgactgcatttggagatagggcctttaggaagtaattgaggttatatggcatg

SEQ ID NO: 685299 - DNA, 624 bp, Homo sapiens
tttcccactctgtaaataaaagaacacacaactcagaaggctatggagggacggtgatggagtttaaaatgacatctgatccacaaagggcctcctttaactgaactagttacacttcaaagaatcacttctctctgagcatcacggcagaacagccccaccgcagcttcaacattctccagaggccatcgcttgatccgcgtctggcccttgcctcgttgctgtcctagggtcccagccacataccaggagcccgtccccacagaggggtgggaagacgggcctcttcgccggcctggcctcctctgtgtccatgcggcccgcatccccgccctctcctgctgcggacagctgttcagcctgtcgtttcttcgcccgtcggccacccttgcgggtgacctgggtaaagccctcctctgcccyggcgctctgcgtttccatttcggattccatccccggaaatcttaaagcgctgccggctgaaacacgtgcgcagctgcaccacgcagaagccagcctcagccaaccacccctgcagctccgcccctttcctaaaacgtcacaggccggggacctgcaggatttggggccggtgggggggaaaacggggttaggctgtcctaa

SEQ ID NO: 685300 - DNA, 644 bp, Homo sapiens
aaactccattgctttttgtcttcatcttaattttgccaccaagctcatactactattatacggatccatagggcttactgagaaatgcttgaaatttctcacataagggtttctttttaagtattctgtaatgtagcttcattaatgagcatgttgcttggaattatcagatatttctgygagcattttaaaaaatcaccctttacccatacagcaagctgtttttttgaatactgtggacaggccgtcttacatgtagagttaaaagaagacatttttaaaagaacatgagcagaatttagaaagccagcgtttttgtcagtgtaaaatagaatgccaatgttagagaaaatctcctgatatcaggatccagaagcttcttcgctgcagaataagtcaaacatccaaacataacatcaggaaataacaaagctgttagcagttttcttgtacatgctagggacgcaaatcacaatctgtcttccagaaaataccacctggaaactttgaaaaggaatattcctggaagtctcccaaaagacaaaaatcagtcctactaaattttaccagactgcaaatttgatgaagaaattgtataatactttgaacaattgcattctctagtttgcatagccaggagtggg

SEQ ID NO: 685301 - DNA, 644 bp, Homo sapiens
aaactccattgctttttgtcttcatcttaattttgccaccaagctcatactactattatacggatccatagggcttactgagaaatgcttgaaatttctcacataagggtttctttttaagtattctgtaatgtagcttcattaatgagcatgttgcttggaattatcagatatttctgcgagcattttaaaaaatcaccctttacccatacagcaagctgtttttttgaatactgtggacaggccgtcttacatgtagagttaaaagaagacatttttaaaagaacatgagcagaatttagaaagccagcgtttttgtcagtgtaaaatagaatgccaatgttagagaaaatctcctgatatcaggatccagaagcttcttcgctrcagaataagtcaaacatccaaacataacatcaggaaataacaaagctgttagcagttttcttgtacatgctagggacgcaaatcacaatctgtcttccagaaaataccacctggaaactttgaaaaggaatattcctggaagtctcccaaaagacaaaaatcagtcctactaaattttaccagactgcaaatttgatgaagaaattgtataatactttgaacaattgcattctctagtttgcatagccaggagtggg

SEQ ID NO: 685302 - DNA, 644 bp, Homo sapiens
aaactccattgctttttgtcttcatcttaattttgccaccaagctcatactactattatacggatccatagggcttactgagaaatgcttgaaatttctcacataagggtttctttttaagtattctgtaatgtagcttcattaatgagcatgttgcttggaattatcagatatttctgcgagcattttaaaaaatcaccctttacccatacagcaagctgtttttttgaatactgtggacaggccgtcttacatgtagagttaaaagaagacatttttaaaagaacatgagcagaatttagaaagccagcgtttttgtcagtgtaaaatagaatgccaatgttagagaaaatctcctgatatcaggatccagaagcttcttcgctgcagaataagtcaaacatccaaacataacatcaggaaataacaaagctgttagcagttttcttgtacatgctagggacrcaaatcacaatctgtcttccagaaaataccacctggaaactttgaaaaggaatattcctggaagtctcccaaaagacaaaaatcagtcctactaaattttaccagactgcaaatttgatgaagaaattgtataatactttgaacaattgcattctctagtttgcatagccaggagtggg

SEQ ID NO: 685303 - DNA, 600 bp, Homo sapiens
aagtaattaacctatctgcgcctcatttacctagactttaaaattgatataataacatatattttatgttatcatacgttagagttaagagtattatattgaaaaaatacccaatatgttcagcacatagtaaacaatgtacagtaattagcarggaacatagagtgttgtattaatacctccgtctgaacatcacaatggaatagttgaagaaaatgaacctcagaagagctgaatgataggcattttggatgacttactccaaatatttctggtacaaaagtctaaaaatagaatactacttttatcgatggcttagctgccaatttgatttccagcctaatggatacactcgattgtatagtaattaatcattaatatgacaaacagaaatgataatcagcagtgtgtttatattattgtctctgttccttgccagtatcttgtgatcttaaaaccacatttagaaactagttaatttgcaaactgactagattgtccagaagtcagcagcagaaattttctgagttaaatgaaaaatttcttccatggctttaagaaaataactttttaaaaattgaaaaatagtaagttcaaaca

SEQ ID NO: 685304 - DNA, 600 bp, Homo sapiens
aagtaattaacctatctgcgcctcatttacctagactttaaaattgatataataacatatattttatgttatcatacgttagagttaagagtattatattgaaaaaatacccaatatgttcagcacatagtaaacaatgtacagtaattagcaaggaacatagagtgttgtattaatacctccgtctgaacatcmcaatggaatagttgaagaaaatgaacctcagaagagctgaatgataggcattttggatgacttactccaaatatttctggtacaaaagtctaaaaatagaatactacttttatcgatggcttagctgccaatttgatttccagcctaatggatacactcgattgtatagtaattaatcattaatatgacaaacagaaatgataatcagcagtgtgtttatattattgtctctgttccttgccagtatcttgtgatcttaaaaccacatttagaaactagttaatttgcaaactgactagattgtccagaagtcagcagcagaaattttctgagttaaatgaaaaatttcttccatggctttaagaaaataactttttaaaaattgaaaaatagtaagttcaaaca

SEQ ID NO: 685305 - DNA, 1134 bp, Homo sapiens
tgaccttaaaattaattattaaaacaaagagctaagtgctacaaaagcagtaagataggagacattttacataaggaagaggaactgaacatttaggctgtaaagttagtgtgagaaattatattacaatgcagttgtctttaacattcagtttgaactaaatgcccccctctcaattcacctttcaagggaaacttcacacacacaatggagtttactgtgctgccaaaaaaaaaaaaaaraagaaaaaagcatttgaatattagaaatcaggtgatatggcagtagatggggaaccctagtagaaactaaaactggctaattaccctagggatagagagaggaggcatgggttaaaaagtgggagaccaagcaatagactgaaggctcaacatggcagagaccaccagttgcctactcaacttccagttagaaccccatgttgtcaagtatggcaatgaatttggtcagataaaactattagggttgtacatactatacttagcaataaaaatgcaggactctcagttacatttgtatttcagatgaacaataaatacttttagcataagcatgctccatgcaatattttatccagcatccctgagaagtatatttaccaacctcccttgcagatagtggtggtcaaagatatgtcagaagaggtcattgggtggagcatctaggagagtactcacgcacatatactcttctcttcctacctccttctgcctggaatgctaacgagcagcagctgtccagtgatcatgaaacaagctcgagggtagaatccagcactatggacgggattatagacagaggaaggagactggccaacactgacgatgttgcagaacaacccaacagccctgatttatcttacatgagaagataaatgagaaaaaacaaatttctgacttgtgtaagctagtaagttgggtttttatcttatgtatttgaactcaatcctaacccaaacactccgtgttcacgtgccattagcaaaaggtcacaaccattgtcagaatcaatcattttgagataatacataatacataacacagcaaggtaattaaaaatgcataatgataaaatcaagaaacctgtgggaagctcccacaagtcatcacagct

SEQ ID NO: 685306 - DNA, 1061 bp, Homo sapiens
aaaaagtaaataagtaaattgtatcttagtttataagtgtaagctagaaaagcgtaaaagaaaaagagaacgagtgggtagtgggctactattgtacatgtgatgctcatggcagattgcaccaggaagctgacattgaagcagtgctgaaagacgggagccagtgacggggagagatggcaagagacattctgagaaaaagcaggaagaaaatctctctagctattaggttggtccaaaagtatttgcagttcttgccattaaaagtaatrtaattacttccctgcagaagaaagaacaggggaaacccagtgcttagggataggaggggcaggtctgtaccagctccaaagctgtgaccttagagctctgccatgaagagtctgcagctttagccatccagtatgaatgtatcctctgaggacaggtaggctgaggtagaggtatgtcccaccgcagaagctcagaaacaaatggcagagttttaaaaatgaaactgtgtattttgttaataggccaggtactgttagcccagtgtcttcactatcctgttggtatctcataaaacaactgatgatgcagaatgttggtggctccataagactatgtacgtggtggggggattcaggctgcagtggcgggcgtcgtggctgctatgcataatacagcatgagggcaaagagcagctgagcacatctcagctcgagttcctctgcagatgcagacaatgatgagcctacacttgtgggcaatgggcaagggattggcgttgtcactgttcacaagatcacaagagcaccaagaggatgaaggctctgtgctctgcctccagtcagttaaatctgagtagaagaggaggcagattttttttttttaaataaagataagtgtgtggaatgatcaaattatagaagaaatggagtggactgctgaaattacccatttttacatagatgtgcatgaagattaattgcatcactcaaatgattacttcacgggagatttctgaaagtcaagatctcaaaatctggcattaaaccatacatgtaataatggccaaa

SEQ ID NO: 685307 - DNA, 1061 bp, Homo sapiens
aaaaagtaaataagtaaattgtatcttagtttataagtgtaagctagaaaagcgtaaaagaaaaagagaacgagtgggtagtgggctactattgtacatgtgatgctcatggcagattgcaccaggaagctgacattgaagcagtgctgaaagacgggagccagtgacggggagagatggcaagagacattctgagaaaaagcaggaagaaaatctctctagctattaggttggtccaaaagtatttgcagttcttgccattaaaagtaatgtaattacttccctgcagaagaaagaacaggggaaacccagtgcttagggataggaggggcaggtctgtaccagctccaaagctgtgaccttagagctctgccatgaagagtctgcagctttagccatccagtatgaatgtatcctctgaggacaggtaggctgaggtagaggtatgtcccaccgcagaagctcagaaacaaatggcagagttttaaaaatgaaactgtgtattttgttaataggccaggtactgttagcccagtgtcttcactatcctgttggtatctcataaaacaactgatgatgcagaatgttggtggctccataagactatgtacgtggtggggggattcaggctgcagtggcgggcgtcgtggctgctatgcataatacagcatgagggcaaagagcagctgagcacatctcagctcgagttcctctgcagatgcagacaatgatgagcctacacttgtgggcaatgggcaagggattgrcgttgtcactgttcacaagatcacaagagcaccaagaggatgaaggctctgtgctctgcctccagtcagttaaatctgagtagaagaggaggcagattttttttttttaaataaagataagtgtgtggaatgatcaaattatagaagaaatggagtggactgctgaaattacccatttttacatagatgtgcatgaagattaattgcatcactcaaatgattacttcacgggagatttctgaaagtcaagatctcaaaatctggcattaaaccatacatgtaataatggccaaa

SEQ ID NO: 685308 - DNA, 1061 bp, Homo sapiens
aaaaagtaaataagtaaattgtatcttagtttataagtgtaagctagaaaagcgtaaaagaaaaagagaacgagtgggtagtgggctactattgtacatgtgatgctcatggcagattgcaccaggaagctgacattgaagcagtgctgaaagacgggagccagtgacggggagagatggcaagagacattctgagaaaaagcaggaagaaaatctctctagctattaggttggtccaaaagtatttgcagttcttgccattaaaagtaatgtaattacttccctgcagaagaaagaacaggggaaacccagtgcttagggataggaggggcaggtctgtaccagctccaaagctgtgaccttagagctctgccatgaagagtctgcagctttagccatccagtatgaatgtatcctctgaggacaggtaggctgaggtagaggtatgtcccaccgcagaagctcagaaacaaatggcagagttttaaaaatgaaactgtgtattttgttaataggccaggtactgttagcccagtgtcttcactatcctgttggtatctcataaaacaactgatgatgcagaatgttggtggctccataagactatgtacgtggtggggggattcaggctgcagtggcgggcgtcgtggctgctatgcataatacagcatgagggcaaagagcagctgagcacatctcagctcgagttcctctgcagatgcagacaatgatgagcctacacttgtgggcaatgggcaagggattggcgttgtcactgttcacaagatcacaagagcaccaagaggatgaaggctctgtgctctgcctccagtcagttaaatctgagtagaagaggaggcagattttttttttttaaataaagataagtgtgtggaatgatcaaattatagaagaaatggagtggactgctgaaattacccatttttacatagatgtgcatgaagattaattgcatcactcaaatgattacttcasgggagatttctgaaagtcaagatctcaaaatctggcattaaaccatacatgtaataatggccaaa

SEQ ID NO: 685309 - DNA, 549 bp, Homo sapiens
  misc_feature 448, 449, 450, 451, 452, 453, 454, 455, 456, 457, 458, 459,460, 461, 462, 463, 464, 465, 466, 467, 468, 469, 470, 471,472, 473, 474, 475, 476, 477, 478, 479, 480, 481, 482, 483,484, 485, 486, 487, 488, 489, 490, 491, 492, 493, 494: n = A,T,C or G
  misc_feature 495, 496, 497, 498, 499, 500, 501, 502, 503, 504, 505, 506,507, 508, 509, 510, 511, 512, 513, 514, 515, 516, 517, 518,519, 520, 521, 522, 523, 524, 525, 526, 527, 528, 529, 530,531, 532, 533, 534, 535, 536, 537, 538, 539, 540, 541: n = A,T,C or G
  misc_feature 542, 543, 544, 545, 546, 547: n = A,T,C or G
caattacaccaaaagattttagaagtcaaattaaatttaagagtatcttgtttcttgcctgggcttcttgacttttagatatgtaaaaatagccaatatagatgtattctacttccaatgtacttgggaacatttcttaaataaaagaaaataaagtggaggactgttttctagttgtagagtttgcatttgcattatgtaataaagagtacaagcactatcttctattaaagatctccctatgawcctatgaggtccctaaatctctgacattaattccattctcctacatgttcctagatgatatgactatgctttagcaagttgttactgaattgagtggtgatcgatacgttatgtccaataatctccactattagatcaatctgagtactttatttaggtggctagtgggagctgcgtgaaacaggacagagacagacataannnnnnnnnnnnnnnnnnnnnnnnnnnnnnnnnnnnnnnnnnnnnnnnnnnnnnnnnnnnnnnnnnnnnnnnnnnnnnnnnnnnnnnnnnnnnnnnnnnntg

SEQ ID NO: 685310 - DNA, 770 bp, Homo sapiens
ttcatgcctttaagtttctctctgaaaacscccatctttctttctttgcttcactgaacaccctacagcttcccaaagggaaaaataaataaaggctctaataatgagtagtttcccaaggcacatcttgtcttgatttggaatacttttaatgaaggcaagaataatcagtctccactgtgtttatcaaaactttggaactttgcagtacactttttttctttgaaatatataaatgattgcacaggcttcctgttcaaatcggtaaagtttcttttaactatttgaatgatatgttttgacaaagagtctccaatgctttaatttaaaggcaggtttatgatcaataatggatacgattatgatgagtgaaggtttactgatttccttctttgcttgtcacccagggctctgtgagtggtttcctgtctctatcacacttgtctagttagaatgtattttaactcttctccccccatgtctaattctgtaagggctgaacacaaaattaggcatatgtgaaattttggttaattttatttgttgttattcattataatgtgatttatttcatttacaaggttgttcaggaagagggcagcaaattggacaaatctttgagttatacacctatgtaaacaaatacaagaatattttaggctactcacaataccaacctgagattagttgaacccttaaatccaactgcagtgaaatagaaactatagtgaagaatagacgtctagtaaagtgaggaaataaaacaaata

SEQ ID NO: 685311 - DNA, 770 bp, Homo sapiens
ttcatgcctttaagtttctctctgaaaacccccatctttctttctttgcttcactgaacaccctacagcttcccaaagggaaaaataaataaaggctctaataatgagtagtttcccaaggcacatcttgtcttgatttggaatacttttaatgaaggcaagaataatcagtctccactgtgtttatcaaaactttggaactttgcagtacactttttttctttgaaatatataaatgattgcayaggcttcctgttcaaatcggtaaagtttcttttaactatttgaatgatatgttttgacaaagagtctccaatgctttaatttaaaggcaggtttatgatcaataatggatacgattatgatgagtgaaggtttactgatttccttctttgcttgtcacccagggctctgtgagtggtttcctgtctctatcacacttgtctagttagaatgtattttaactcttctccccccatgtctaattctgtaagggctgaacacaaaattaggcatatgtgaaattttggttaattttatttgttgttattcattataatgtgatttatttcatttacaaggttgttcaggaagagggcagcaaattggacaaatctttgagttatacacctatgtaaacaaatacaagaatattttaggctactcacaataccaacctgagattagttgaacccttaaatccaactgcagtgaaatagaaactatagtgaagaatagacgtctagtaaagtgaggaaataaaacaaata

SEQ ID NO: 685312 - DNA, 2234 bp, Homo sapiens
aaaataaaattaaaaatgtagtttcttattagcccaagccacaagtgctcaataggtactgaatagtagctaccatttttagacatcacaggtacaggatattttcagcaccacagaaagtactattggactgtgatattctagaaagcatctccttcactagaactagcataatgaaagacttatatttaacaagaatatcttcattatccactatgagataaatgccgtgaatttaaatttcatttctgtgatcaacttcaaagtcacagtttgcttgcattttacattcttcaagcatttgatgtgaaaacaaaaatatataaataaaacattcctaaattgttacttcagaatatctttatttcaaaagttggtattttatccttgaaaataacatggtaaaaaaatgaagaggatgagcacagatcatttttagcactacatttttcattttctttctaaactggctttgcttaagacagaaatacggtgctgttctaatgtcaagcaaatccccatttaaacacactggcttgagcattgataggtagacgtgtctaaagtacctgattatttctgtataaagtctgtgaaataagtattggtctggtattgtaatcatctcctcacgattagagttcagagtgtctaaaataagtttttgtaaacagtaaagcatagacactactcacacatcaacttacacagagtggttcttatgtgtattttggaaatcatctttgtgccatagcataaattaaaactaccttctagtgtctagtacattccatgcaaaacctcaaaaaaaattcttaggtgttccctctatttatgctaacagcaatacaagtctactctagtggttaagagcatgacaagtcacttccttgccacttactacctgtgtgggcatgagcatgagacttaacttctctataaaacagggatgaggccaggcaagtggcttaggcctgtaatcccagcactttgggaggctgaggcgggtggatcacaaggtcaggagatcgagaccatcctggctaacatggtcaaacctcgtctctactaaaaatacaaaaaaaaattagccaggcgtggtggcgggcgcctgtagtcccagctactctagaggctgaggcaagagaatggcatgaacctgggaggcagaggttgcagtgagccgagatcgtgtcactgcactccagcctgggtgacagagtgagactccgtctcaaaaaaaawaaaaaacaaaaaaaaaaccaggatgaacattttgttcataagattgttaaaacaaatacatgggttatgggttaacacatatagataaacaggaaaaatgaacaaaacatataaaacacttaacatgttagttcattttattatcattattgataatattcttgccactatcattttcattattatcatttttcttttaaagtcctgtcgactctttgtggtccagataaattttttttcccctgtgagccatttccagctctctccagtcacaagaaaaaattgcctcctgttctatgcaaccttggcacttagtacctcttgtacatcaattctcacagtaatataatcgcctccttttatacataacctttcttatttaattgttctgtaccaattctgttgggtattttgggggcaaataaatatttccagattatataatgttggataatcaggagccattctggatctgtggaaatgatatatcttctccagagactatggactttgtgttgaatgtagaacttgtgtaagaccatggagatatttctttagggaggcagggaagaggtgttctatatttaaaacaggcgaagattgttagattgttaaaggcagcactgtcgcagacacagctaattgcctaatcaataacgattctacttttatgtctccagtaatgcccaaatgttggcagaggacattgcctccttgcatatgaatgctttcattggtcctaggaactagacatggccataatatgactgagttttatccaatgagttttaagaagaggtgttttgcaggcctatcaagagggctttttaaaagaaaagaatgagatcttctcttccttcctattacctggaatttggatataaaagctggatcttcagcatcacttgtaccctgtgaggttaccttgaggatagaagccaaacattaagatggtaaagcagcaagatagaaagatatcttgaaggcaa

SEQ ID NO: 685313 - DNA, 1006 bp, Homo sapiens
tgtagtaaaagctaagagaaatttcatcagtaatcacacagagggcttgaaactgacctggctggggcatgaagtaagagagttagggagtgtgctttttcaagaataaaaggcactaggattgaaactgaaaagtaataggctgattacattyaataattgtataagaaactgtacttaccatgtacatatgcccacataagttaaaattaattgtagcctgatttagtagtgctacatacaacagatgctactctgtaattcttttgaaaagtgaagatttgggttttatatggtagtgtgatttagaaaatgccaaacaaaggtattttgtaaacaagcacgttagtggagaaaaaatgcgacttagaaaaaacattatcaatattactaaaatatgattttatgatatttttatcaatgcatctatgtaagcaccaatgggtgattctttgtgtatctctgtgtgtgtgtgtgtgtgtgtgtgtgtaaaaaccatttattttggaatgagttgaatggaagctcaagtctgctgagaactggaaacaatagaaacaaaactgttgataatgattctttttttttttttttttttttttttgagacggagtctcgctctgtcgcccaggctggagtgcagtggcgggatctcggctcactgcaagctccgcctcccgggttcacgccattcacctgcctcattcacctgcctcagcctgataatgattcttaatctgctttttttattgtggatttggaagttttctgttgttgttgttgttactcttttccatcagtaagtgaacaggtcacttatttattgggcactttggtgctaggttggtgaataggacttgccctcgtggagcttatagtttgaaaggcctgttttccaatgcacataacgtggagcacaaaatatactacactggaagacagaagacatgggtgggttctatgctggtttcctctaactagtatgtgaacttgggcaactcatttc

SEQ ID NO: 685314 - DNA, 1006 bp, Homo sapiens
tgtagtaaaagctaagagaaatttcatcagtaatcacacagagggcttgaaactgacctggctggggcatgaagtaagagagttagggagtgtgctttttcaagaataaaaggcactaggattgaaactgaaaagtaataggctgattacatttaataattgtataagaaactgtacttaccatgtacatatgcccacataagttaaaattaattgtagcctgatttagtagtgctacatacaacagatgctactctgtaattcttttgaaaagtgaagatttgggttttatatggtagtgtgatttagaaaatgccaaacaaaggtattttgtaaacaagcacgttagtggagaaaaaatgcgacttagaaaaaacattatcaatattactaaaatatgattttatgatatttttatcaatgcatctatgtaagcaccaatgggtgattctttgtgtatctctstgtgtgtgtgtgtgtgtgtgtgtgtaaaaaccatttattttggaatgagttgaatggaagctcaagtctgctgagaactggaaacaatagaaacaaaactgttgataatgattctttttttttttttttttttttttttgagacggagtctcgctctgtcgcccaggctggagtgcagtggcgggatctcggctcactgcaagctccgcctcccgggttcacgccattcacctgcctcattcacctgcctcagcctgataatgattcttaatctgctttttttattgtggatttggaagttttctgttgttgttgttgttactcttttccatcagtaagtgaacaggtcacttatttattgggcactttggtgctaggttggtgaataggacttgccctcgtggagcttatagtttgaaaggcctgttttccaatgcacataacgtggagcacaaaatatactacactggaagacagaagacatgggtgggttctatgctggtttcctctaactagtatgtgaacttgggcaactcatttc

SEQ ID NO: 685315 - DNA, 2808 bp, Homo sapiens
tcttcatatgtttaacgattacaattatgtccaaatattatgtgatagactgaattatctcttttygcatctctgccctacccttgccaacatagcccatttttaaggtccagttattttattaatttagtaagaatgcatgctaattatgatttatacatatcaataataaaattatgaagatgatattaaggttagatttaatattttactattttcctatgtatattatattcatttggtcttcttacaaacctcccctatggtcctagttattatcttgatcattttgtgagtgaaggagctgagaaacaaggaggaaagtgatgtgccccaaactaatatttggctaaggatagatttgcactgggtacttttacagctagttctgggtcatttccacaaaagcattacttggctggagtaaaactataaacccaattgtattaggcaccaagcagatccagatagaattatcctgttccagagtttcatcttttatgatgattgtggagatcttgggtgactttacaaaataagaaacttttaaaaactggcaatagataggatcatttaatatgaggataaagaatctaaaggatagccttaaaaatgtgatttataatcatgaaggtttttatacggaggaaaatataattgcatttaaaatttccctagtaaaggaaattacctgctctagaagctgttaactgctagactgttggtttaaaatttcaagggacagagaggtagatcaggaaggacatggactttggagctgggcaaccaggattgcattgccagatcatggggcaagtagtaacttgtcccatcctcctcttcctcgttggtcaaatagaaatattgatacctactcagaagttattgggtggtggtcaggcaagagggaatctttagcacagtgtctagaatgttccaagtgcctagtaattcttggctcaggttctccccttgggtagtttgaggactggaaatccaggcaatattgagattattaataaagatttcaagtcaagccctcaagaacacaagtcacagaccccaaaacttttggagttagcagggtttctttaattaaagagtcctagtaatatgttggtaagggggatgggagctgtggcagatgtgtgtgacataattttgttgcaaatgcaaattagttttcctgtcatttgctagcaagcccactgtttataataactgttcataatgaatcaggctgatattttcttcatacattttccctcaaggccctaataactctgcttctatgttttatggttacacattgtggaatgagactctggtggaaatgcagtcccattttatagcctttgtagaaatgagaggcagagaagaaaagcaaaggaagcaaattagtggtcagaaagggttccaagacagcaatgtgtgttcttcaagccaggcctggagggtatatgaggaagataaagggtggtccagaaagcctccatcagtgaagtagttgaacagaattaaaactatagcaaaggttcttggacttggttagaaggaaaccctgagcgacctgaactaaatgagttctgtccaattcagcaaatacttactaatacctactatgtcccagatcctttatagccttacagctgtaccatccaacatagtagtcattagccacatgtgcctattggaatttaaattaccgaaaattaaataaaattaaaaactcaattcctcagttgctctatttctcaagttctcaagccacaaaacatagtgtgtaatgactactatattagatggcatagaagaatatttttttttatgacagaaagttctcttggacaattgtgccctagaagtatgaggatgaccaatatttgactcctgcccttgaggaatttatggtcttagaaggcagaggaacatgtaaggaaggaagaaagttagtggggctgtgacagaagtatgtcagcacactgttgtgggaactgaggatagggtgatgaggcctaaaagagacagtggtcaaatatagtaggatgaaggaagaacagcttttcaaaaaggctatgtagagggtggaacatgatcagagtcttaaaagatatgtagttttacctcaggtggaaaagggtggaaaaaggcattataagcaaaagtagaagtgcgaaccaagaagggagatgcagtgtggagcgttgggagaaatgcccctgttgtagcctggctggagtgtgctgccagagctaagccccaagaggcaggtgggccaggctgggtgtttgggcaccacaccaggggtcaagacttgtcttctgggctgtgagaaatcagcgaatggttttaaacaagagaatgaattttgtgatcagatttctatgaatgggaatggaaaaagctaggagtttgtttccaatgggatgcactgcacattttactgtgtcttcggtcaggttatttaacccctgtgagtctcagttttctcatgtataaaatgagacttatctccatctcataggaatgatatgtggataaaataacataatgtaggtaaagcagccagtacagttcctggcacatagcaggtggccaaagagtcttagatccttttccttttggccttactgtggcaagggaaacaaaaatgagtgaggtttatctgtacccccggggagcttagagcagggagtgggcctgtgtggatgagtaaaacaaggacacaagtaactatgtccacaccctacacacaccccaaacatacatacacacacacaaccatactaacacctaacacatatgcac

SEQ ID NO: 685316 - DNA, 1533 bp, Homo sapiens
cattaaacactctaatttgtcatacaccaacttttctttcaccagcacattttcatttaacaggaccttatcttaatgagaaaattcctaatgataaagcaacctatgtttgccaactaatgtcctgtgtagtgaggctgacacactgcttacacaaaatgattcgatagcctgattcattatgtatttagtaagtgtgacacagaactttstagctgggcaccccactggttcagaagtcttgtttggacttcatcttgaggggtagccttctatgctcatgcagaggcaagctttttactggtgaccaaggttaacatagatttacaggggtatgtattggtatttgctcttatccagcaggatattatgtatttgtgtgatttctgttttagttcctaagtccagcaacaacttggtgttgttcaacgttgtacacacctcaaggtgcccttctttagggcgatttcttttctaaaagattcctccttgcacgttaaaaaacagatcagtgattctggccaagctcagatatgttaacattctcgtttaaattctcatgcttctcggagtgttatactgagtgtgtgagtgtgtgtgtgtgtgtgtgtgtgtgtttgtgagggagagggtggggagagagattaaatatacactcactggcatttctcatatatgcttctgaaggaaaatcagaacaggaaaagatctcggaaaacggtcataaatatttttgaaattgcttccaaggtaattataacaggccccttctctacttaaaatggttttagaaggttaatattttgttctataataaagtctttctcaatttggatcttgttagtttcattttgttaatattgagatgttgttagcactattttaaggtaatagtcatttataatgggggaggaggcttacatttgggtatcttaacagacaataagaagaaaaggataagaagtgagaaaaaaagaagagaagaaacattttcccaaaataattgaaaagaagctgaaatagaaagaagaggatttttaaaagggtgtgtgtgtgtgtgatacatagatggcttgaggtggaaataaccaaattgttcaaagatagaattaaccaccaagttactaagacgaaaggcaaaggaaaatgctagtggaagttaaaggattgtactagacaagaaatggaaaaaccaaaaagtggtgaaaataatggcaagcaaataattccctgtactacccagtagatggtgctgtgtacccaaagtagctgtgttcctgcttagaagagggaggaaataatatgcagcacatgaatgtaaaataaagatgcataactgttgtgcccgaaaattccagatttattcaggaattcataaaactagaactaattgcttaatttatactttgaaataacttacattttcacctttgattccaagggctgtagattgaggggatacttttcaatattattctctgcatccatggccagctggtgactagaaacagaaataatgtctcaatatctccc

SEQ ID NO: 685317 - DNA, 1902 bp, Homo sapiens
  misc_feature 800, 801, 802, 803, 804, 805, 806, 807, 808, 809, 810, 811,812, 813, 814, 815, 816, 817, 818, 819, 820, 821, 822, 823,824, 825, 826, 827, 828, 829, 830, 831, 832, 833, 834, 835,836, 837, 838, 839, 840, 841, 842, 843, 844, 845, 846: n = A,T,C or G
  misc_feature 847, 848, 849, 850, 851, 852, 853, 854, 855, 856, 857, 858,859, 860, 861, 862, 863, 864, 865, 866, 867, 868, 869, 870,871, 872, 873, 874, 875, 876, 877, 878, 879, 880, 881, 882,883, 884, 885, 886, 887, 888, 889, 890, 891, 892, 893: n = A,T,C or G
  misc_feature 894, 895, 896, 897, 898, 899: n = A,T,C or G
tccattaaatcatgttaatttttacattgtaatgctctagatacttcttctatttcactgtttatgaaattaaatggccttaatctttttatttttctagaaataaatgtgttcacaggtggcatctagaaatkcaataaatattcagtctccaggaatatgagccctgcaaggtttggtgtggagcctgctgagaagagcctatgactttctagtggaatttttatgctttgggttagatcatgggaatgaatatccatggttagtttgtgatgcatctaagctgtggaatttcaatgagtatccatcagtttgacagtcaaaaggatatatatgagggccttgggggtgggcagggtgaagcaatttggaaatataagcagtaaattttcacacatcactgattgtgacagtgaaatgattatccatcaattacaaagcagttaagtagatatgtttctgggtttttactgcactgtttatgtatccagttctcctggaagagttgctcctgcatcatagtccatgctggacagcctgcatcagtttcagtgcctgttggagacacagagagactattggatttaggaacaaataaaaggcaaaaaagaagagatgatactgaaagactgttacttttcaaataaatcatgtacctgggaaattataaggaaacaatctccccaaataaaaccatgtcagtctaacaaaaggttatttttttagtgttgcataacataaaagaaaatgccaatttacttatataaaaaagttattaagttgtttataaattcaaagtnnnnnnnnnnnnnnnnnnnnnnnnnnnnnnnnnnnnnnnnnnnnnnnnnnnnnnnnnnnnnnnnnnnnnnnnnnnnnnnnnnnnnnnnnnnnnnnnnnnncattattgccttgttttctatcaccttaactcctttgaagaatactatcaggtattttgtagaatgtcccacaattttggtttgcctgatgttttctcagggttagacttaggttatgagtttgggagaataccacagaggtaaagtgcgtgctttgctgtgtcatataaggagccacatgatattaccctgacttatcactagtgatattatctttgttcacttgtataaagtgatatctgtcaggtttctttatggtaaaggtactatttttctttttgtaattaatagatattcagggagatagtttgggtcagtgcttgcattttatctttcactgcagacacctgcttttccctaggttctgagtagttgctggccctacaacctcagcattctgatgggtagaagtttgtaaacttactgtttgtcagtaattttgtcgtaagcttgagaatagcactgtttccatctcagcagaaactggaagtccagtatttggagttcaaataagtgctcttcatattaactgttattgttagttgtcagaagatcaatactccatttcattctagaagatcagtcttagtcaaatttcatcatcccgtttcttctgctagtgatgtgctttggaatcagtatgtgactgacttgtagccaatgagatatgagaggaagcatgctcttgttttcctaaggaaaaattcttttctcttaataggggaaaataagtaaaagatagttcaccttctacctctggacataggtatgtctggatatattgcttaaaactgtggctaccattttgtttccaatatgaaactgaggccaacactgaaaacagcaaaacaaaagcaggaaagaacctggatctttgatcatattactaagctgtcattccaatcaaccatggtactgagcctacctatggatttctagttacgagcaatagtaaatttctttattgtttaagccaatttgagttttggtatttcaattactt

SEQ ID NO: 685318 - DNA, 649 bp, Homo sapiens
tgatattccttctctcccaggttgtgaatacatctgattttaaacttctgttgacctcatctgtccagtgtcttatgtcatgcatttggacatcctcatgaactagggtggtaatccctcttttactaacaggatgaatgtaaggtgattgcaaaaagttgataagattttaatgtataccattattcatattattctgaaaataaacatgacatttgtggggcagagataaatacattattataattattatactcatccccagcaataacagatcttccctttacctcatttcttttctcctggggcratgtgatgatagcttatcctatacattctgggttttgaattacaggtaaagaaccatgtttgcttaatttcagaaaagttttcttcaattatattttgaattgtttttttcaggttttccctgccaaccccaattatgcatattttaggtttgccttttcctataattcatatctataatttttcactttaatatactgttttttctttctttatatttgtatcattgtattcacatttttctattctctatgttctcattatgttttgtgtcatgtctattttcttcagtctttcttatttattcataattttaaaaaattataaagatttttcagaa

SEQ ID NO: 685319 - DNA, 624 bp, Homo sapiens
gtctgggctacacttgctctgcttaattcaacaataaatcaaccaatgaccagttttaaatgttaccctctccagtatcagaaatcaaaagactacagcagcattctcagttccaagctatgcctttttgttattgatttcaggaatatcctgaaagatttgaactatattataatgttattcttgcatccctgacatcatcatcaaaaacagcaaatctataagtcatgtgatagatcacatatattaaataaaacccaaagagtttattctaaattactatttaaccatttatttaaaccattacaagcttgctaaatttatatgtgaaaaaaagaaaatgttggactctattttgtggtctattctgaaatctatgataaaataaatgcatakctgctttaatagcacaggtgtcatgaatatgtcatctaaatgactgcatcaagattagaaggaatgataaatactactgttgagagctataaatttctagcatactttgtgagcaattatgaagagtctagaataaaattcttccttgttagaattattattttgagctcttgaactttaacccttgaatttttttggacaatatgttttgaattctgagtacgaatt

SEQ ID NO: 685320 - DNA, 624 bp, Homo sapiens
gtctgggctacacttgctctgcttaattcaacaataaatcaaccaatgaccagttttaaatgttaccctctccagtatcagaaatcaaaagactacagcagcattctcagttccaagctatgcctttttgttattgatttcaggaatatcctgaaagatttgaactatattataatgttattcttgcatccctgacatcatcatcaaaaacagcaaatctataagtcatgtgatagatcacatatattaaataaaacccaaagagtttattctaaattactatttaaccatttatttaaaccattacaagcttgctaaatttatatgtgaaaaaaagaaaatgttggactctattttgtggtctattctgaaatctatgataaaataaatgcatatctgctttaatagcacaggtgtcatgaatatgtcatctaaatgactgcatcaagattagaaggaatrataaatactactgttgagagctataaatttctagcatactttgtgagcaattatgaagagtctagaataaaattcttccttgttagaattattattttgagctcttgaactttaacccttgaatttttttggacaatatgttttgaattctgagtacgaatt

SEQ ID NO: 685321 - DNA, 661 bp, Homo sapiens
atgttatcaatgacaatgcatgcccaaaacttcattagcaattttaattttgccctggtcctgtggtcctgtgatctggtcctgcctccatttgccttgtgatatcttattaccttgtgaaacatgtgatctctgtgacccacaccctattcgtacactccctccccttttgaaaatcactaataaaaacttgctggttttatggctcagggggcatcacrgaacctgccgacatgtgatgtctcccctggacacccagttttaaaatttctctcttttgtactctttccctttatttctcagacaggttgacacttagggaaaatagaaaagaacctacttgactatcgggggcaggttcccccaatatttcaatatgatgcagtgataagataatgaatgctttcttggcctccataattcctttatggaaaacaagtgtctaatgatttgactaaaatgttataaacaagaactagtaatgttctatatcagtaagattgttgtattattgaatatcaagctatgtcatatctatcctgacaaataaaattgacaaataataattcaactaatatgttatttagtcaactttattgatacagttaggctgtgttcccactcaaatctcatcttgaattgtagttcccataatccccat

SEQ ID NO: 685322 - DNA, 661 bp, Homo sapiens
atgttatcaatgacaatgcatgcccaaaacttcattagcaattttaattttgccctggtcctgtggtcctgtgatctggtcctgcctccatttgccttgtgatatcttattaccttgtgaaacatgtgatctctgtgacccacaccctattcgtacactccctccccttttgaaaatcactaataaaaacttgctggttttatggctcagggggcatcacagaacctgccgacatgtgatgtctcccctggacacccagttttaaaatttctctcttttgtactctttccctttrtttctcagacaggttgacacttagggaaaatagaaaagaacctacttgactatcgggggcaggttcccccaatatttcaatatgatgcagtgataagataatgaatgctttcttggcctccataattcctttatggaaaacaagtgtctaatgatttgactaaaatgttataaacaagaactagtaatgttctatatcagtaagattgttgtattattgaatatcaagctatgtcatatctatcctgacaaataaaattgacaaataataattcaactaatatgttatttagtcaactttattgatacagttaggctgtgttcccactcaaatctcatcttgaattgtagttcccataatccccat

SEQ ID NO: 685323 - DNA, 643 bp, Homo sapiens
gcaggagaatcagttgaacctgggaggcggaggttgcagtgagtcgagattgtgccactgcactccatcctgggcaacacagtgagtctctgtcaaaacaaaacaaaacaaaaaacccmaaaacaaaccaaccatatatgtgtgtgtttgtgtgtgtgtgtgtgtgtgtgtgtgtgtatacatatacatatatatacacacacagagggaggggagaaggtaaagaattggaggtagccagtgtcaacatgtctgaagaagtataaaaacatggggtgataagaagtggatgtagggtcaagagacgacttttaaaaatacaggaatattatagcatgtttgtatgctgattcaaatgatctaacagggcaggaaatagtaatgatgcaaggtggggctgagaggattttcaggagccaaatccttgagttcactggactattaccttgaataatttcatccatgtcttttccctaggtgacagatcagtcagtgaaagcatttgctgaacactgtcctgagcttcaatatgtaggcttcatgggttgttcagtcacttctaaaggagtcattcacctaaccaaggtaggtactatggctgcttttccttggtatttttgagtatcatacaggtgatgagccc

SEQ ID NO: 685324 - DNA, 643 bp, Homo sapiens
gcaggagaatcagttgaacctgggaggcggaggttgcagtgagtcgagattgtgccactgcactccatcctgggcaacacagtgagtctctgtcaaaacaaaacaaaacaaaaaacccaaaaacaaaccaaccatatatgtgtgtgtttgtgtgtgtgtgtgtgtgtgtgtgtgtgtatacatatacatatatatacacacacagagggaggggagaaggtaaagaattggaggtagccagtgtcaacatgtctgaagaagtataaaaacatggggtgataagaagtggatgtagggtcaagagaygacttttaaaaatacaggaatattatagcatgtttgtatgctgattcaaatgatctaacagggcaggaaatagtaatgatgcaaggtggggctgagaggattttcaggagccaaatccttgagttcactggactattaccttgaataatttcatccatgtcttttccctaggtgacagatcagtcagtgaaagcatttgctgaacactgtcctgagcttcaatatgtaggcttcatgggttgttcagtcacttctaaaggagtcattcacctaaccaaggtaggtactatggctgcttttccttggtatttttgagtatcatacaggtgatgagccc

SEQ ID NO: 685325 - DNA, 1591 bp, Homo sapiens
ttttaaggggtaaaaaaattaaaaatgttgatgttagtctaacatgataaaattgtactattcaatattatacttttcaagaatacgtaatgacatggaaaatgcttaggataatatgtattaacatatattattttatatgttgaataggctacctgtagagtctgaaatgccaaaaatggcaagttatttttacatgtagttcaaaggcaagccttagaaatgctgtaacttcatcaatataatgtcacaaatctcttgtgtgtttatttatatcaaatcagtacaaatgatttcaatcagtagtcaagaagacctttttttagggtgggtgtgttggctyatgcctgtaatcctagtactttgggatgctgaggtgagaggattccttgaggccaggagttcaagaccagcctgggctattaatatagtaagacccatctctacaaaaaattagctgggtttggtggtgtatgcctgtattcccagctactctggaggcttgaggtgggtggattgcttgagcccaggaatttgaggctactgtgagccatgatcatgccactgcaatcagcgagatcctatctctgaaaggaaaaaagaaaaaagaaaagaccttatattaaataactattaagatggtagagaatttttatttatatttataatatttatttatcaacagcttacaaacattaaccgagtatttgggatgtgttgcgtatgggtttggttgagttttgttttatattgttttttaaaaacagagttccttaggaaggtaacagacagctagataaaacttttgatattttcttgtatcataatcacatttaaagaacttcaagaaaagcacatattttaaaagtgcttatggttggaaatgttaaatgtttttaaaggaaaacaaaattgattttttcagttgatttaacataagtaactgaaagaatgttcattcatgcagctaactcaattttcatcctcctttttttgtttattcagagactagaaatgaaaaattaactttcttgccttttaaattttcaaacaatcaattggtttagattgccttactctacagaaagaacacactgttttactacttaaatggtaatattgctgctttgtcataggttatcatttcatttgtttctgattaattataggtgcttgagtgatattctgagatgtaaaaaatatgttcttaaattcattcagctctgaaatattccctaatgaatatgacctagtgagtactgtattatgaaagggtttttttggatgaccatgcttttgctactttttagctttttagcagttaagagttgagccaaaaatcaagtgttgagaatataagctttgattatctaggcctgatgtgatccattaattgatatttttttcttagaagtttgccaaggccagcaacgcatttattgcagtcaacaaagctaattgtatgattactgattgtatgacctaggacaaatcacctaatctctctgcctcagtttcctcatctgtaaaagaaggatagtaataccatctacctgcctctagggatgcatgaggaagagttcttggcaca

SEQ ID NO: 685326 - DNA, 601 bp, Homo sapiens
atcttagactgttatccagtttctttcaagtaaaaaataagatctacaaaatattgctattttattttttatgtactagaggttaaaatagtacctatagatatttctcttttctttttttttttaaagacggagtcatgctctgttgcccaggctggagtgcagtggcacaatctcagaccactgcaacctctgcttcccgggctcaagtgattctcctgcctcagcctcccaagtagctgggtttacagccccaccatgtggggctaatttttgtgtttttagtagagacggggtttcaccatgttggccaggctggtctagaactcctgacctcaagttatctgcctaccttggcaccccaaagtgctggggttacaggtgtgaaccactgcccccarccagatatttctctttaaaagtaacttttaaataagaccatttgaagttgcaaacttctgggccacagctgagtctagtccacaaagctgttttgtttggcatatacagtatttaaaaattttgaattagttgccagcactttaaaaattggtatagttcacataaatattctgaattcaggcttttggaaaagttgtgg

SEQ ID NO: 685327 - DNA, 756 bp, Homo sapiens
ctctccagctccctcacagagtggaagatacatgtgggggaggcagcctgcgaagatgagcagttaccttccctaccaacatgataagcccttggagatgcctgtaggcactggttctgaacgtcatccctaatttgccctgtgtcccctgctggtcctcaaaggcaccctacccaggggcactkggcgggacttaactgaggaggagctggtgtgtctctgtcactctggaaaaattacaccactctccttgctctcactctagagcagaggttccaatgttttgccatggtaaagagggagtccataaaaacagagcactccaaagctctctataaagcaactaacttaattggaaactgactgttgggacattcaagctaagagttgctcagaaacaaaggctgttttgatgataagcaattatgagcaacatgctaaaatatagaccggaaactttaccatagagacaaccagatgaagagacaactaacaatgcccctcctgtgttcagaacaaaccacaaaacttgcctcaaaaactagctctgcaattggccttggttgacttggatcagactgtgggagcaatttatactttagggtatcatggaaaacaacagaccagtcagccttccattagtggaggctaaaatctgggtgtgctatatgcagaggcagaccccttaacagagagagcagggagagagatagtccaatagaatcctgctaaaaccactgctattctaaggtgatt

SEQ ID NO: 685328 - DNA, 756 bp, Homo sapiens
ctctccagctccctcacagagtggaagatacatgtgggggaggcagcctgcgaagatgagcagttaccttccctaccaacatgataagcccttggagatgcctgtaggcactggttctgaacgtcatccctaatttgccctgtgtcccctgctggtcctcaaaggcaccctacccaggggcacttggcgggacttaactgaggaggagctggtgtgtctctgtcactctggaaaaattacaccactctccttgctctcactctagagcagaggttccaatgttttgccatggtaaagagggagtccataaaaacagagcactccaaagctctctataaagcaactaacttaattggaaactgactgttgggacattcaagctaagagttgctcagaaacaaaggctgttttgatgataagcaattatgagcaacatgctaaaatatagaccggaaactttaccatagagacaaccagatgaagagacaactaacaatgcccctcctgtgttcagaacaaaccacaaaacttgcctcaaaaactagctctgcaattggccttggttgamttggatcagactgtgggagcaatttatactttagggtatcatggaaaacaacagaccagtcagccttccattagtggaggctaaaatctgggtgtgctatatgcagaggcagaccccttaacagagagagcagggagagagatagtccaatagaatcctgctaaaaccactgctattctaaggtgatt

SEQ ID NO: 685329 - DNA, 599 bp, Homo sapiens
tcacattataaattgtagagtgactggaacctaatctatgaaaacggatagggctgtgacctgtattgagttattgctcaggaggacaagattaatcagaaatagccaagcaaccaggacctaggctgagacagcaatgtacatgaactgccaatagatgacctgattctgaaagctatagtcatatgggtcagggagaaataatcagartctatctatcagaccaaaaagaatgaagaaaaagagattacaaaggcagaataaaaagaaaatattttttcataaattccttcttacactaaaaagaatgtcaaactacaaaaaaacattaaataattaagaaagccaattcgctcaacagaagattttgcccctttcaatcttcatataatcaagaaatctattgtaaaaaaaaaaaactataagaagcacatataacagtattataaagggaagaaaaacatgcataaaaattaatgaattactacaaagaaaaaatggccacaataataaaaaatagttgaagattaaaataaccaattataaataatagaaattttaaaatgttattaaaatagagaaacaagagacaagataaa

SEQ ID NO: 685330 - DNA, 1390 bp, Homo sapiens
ttataggctgggcgtggtgactcatgcctgtaatctcagcactttgggaagccaaggctggaggaccacttaaagccaggagtttaagaccagcctgggcaacatagcaggaccctgtctctacaaaaaattttaaaagttagctagatgcagtggcacacacctgtagtctcagctacttaggaggctgagatgggagaattgtttgactctaggagttcaaggctgctgtgagcataatgctactactgtattccagtcaaggcaatagaacaagactctgtctcaaaaaaattagaattcaaaacttatatgtacttcaaatgttctataactacctctaaataatttttctaataacaatatagcatttattactgatcttaaaagttaagcctcaaaatttaccggtttacttcatcagtaaagttgtgacagcaagactaagaaatatcgagaattttttttttaatacaaatcttattacgttttttctttaatgaagtctcaggtgtaatgaggaaaggcataaatacggatgtgcaggagtgttccttgtactgttggctgctagttataataaagctatccttgcctttttccaccaagtgtttgtcaatggtattcagaaatcagtttaagaagagttgccataatgtgattaggctgcctgtgttctgacaacatattcaagagccaaaattataaagtgtggtgaaactgagcattggaaaaatgccttaatattggctttctatttaaaaacagtgagaggttcaatacatatcttcactttggcatgcctcaatttcctcatctgtaaaacagtgagtttttaactatatgatgtatcaagcccatttcagctgttaacatgtgaaaatattttggccacattgccgaagagttcatattctttgatttttaaaaaaattttaaaagtattagtgaacagggttatatatatatwttttaattggaaagtaaagatcacccacatgaaatctatgcatttatcagatagctaaacacgtgtagagattccacctactagattctcaggagtgctggaaagcttggtgagtctggtgctgcatcacttaagttataagctttcctccaggaggagtaaaaacaaatctgagaccaagacctgggtgtttctgggtttatttcatatttaagcaattttcttctttaaatgactgtattttgtgctatgaacttgacaatatgtgtattttgccagattattagttacttgttacattgagttggattggtttctcaggagccctgtgaggtcaaaggagaaaaagggttaattggacacaagtgtttgaaggagataggtactgaacccttacttaactgaatagaaagatggaac

SEQ ID NO: 685331 - DNA, 593 bp, Homo sapiens
gggatttaaattaacaatatacgaacaattttttgaggtctccaactaagtgacaaagtatagttctgaaatcaaggcgaaataagtgagtacctgttgaaggagctgacaatggtgtcagatactgaaatataatggtagctggcwaatgctgtaatagctctatgcacaaagtgactgaagtcacatgggagtaggctatataacccgaataagaggtctaagacattatcttggagcagacaatgcttgggatgtgttcacaagctgaaggagaaatccagaattgaggaatggatggaggtaaggctggagagggaatatgtgggcaaaagaaggctggctcttcctcaaggaatcccactgggtggcattccttatcatagcagagctgaaaatcctactttggacagcaccctaagtaaggagagcttggcttctcaaagaaccccctcactcttctttagttgggctcaaaatactgatatgtaaacaccaaattaattgacttatttgtaacgaaaaataactcttggccgggcgcagtggctcacacctgtaatcccagcactttgggaggccaaagtgggcga

SEQ ID NO: 685332 - DNA, 640 bp, Homo sapiens
tccaccatatgcacactctcacacatgcacacaacccactttatatttcttaatgtcacaaaccaaaattatattattatttttaggttatttatttctgcctctccaaatagaatacacacacaaaaaagtttttattggttcaactgctggagccacagtgtccagtagagtgccttcattgcagtaggtactcttattttttattaaataatctagttaggccggaagcggtggctcacgcctgtaatcccagcactttgggaggctgaggtgggtggatcacgaggtcaggagatcgagaccagcttggccaacatggtgaaaccccatctctactaaaaatacacacacacacacacaaattagctgggcatagtggcacatgcctgtagtcccagctactcgggagactgaagcaggagaatagcttaaacccaccattgcactactgtactccagcctgggcgacagagtgagactccatctcaaaaaaaaaaaaaatctaattaaagacattatatagaaatacktaataggtaagtaaataaataccgaatgtgtaagtaattcaataagtgaacaatatttgtaatagtaggacccttgtcttcatttaaaaacacagaaacaacagggc

SEQ ID NO: 685333 - DNA, 1099 bp, Homo sapiens
tgtagactctctctgaggacactttctcttgctactcataatccaggacttgcattgtttagcttctctcctagcttccttgcttttcttgctctcatctcatgtcctttgattyggtgctttcccatcattcctttactccttgctttgtctccttttgcactttttttcttatttctttggtttccctcttgactttcttgttttcctcctcttcccctcactctcttctccatcttcacttgctgtgtccctcacctacctctgggctgcctcttaccttggtttttcttggcagacagggcccatgtcctgatccctaacacaaccccagcctagctctgggttcctatctcagagtcctgagccccactacctggaaatccacttttcttgttaggatttaaagatgtgtggtttgttgccttgatgagaggactttttagcactttaggacaaatcagtttggcagatgacccttgcaatattcacacgcgtatttgtgaatgggaatgaagaaggaaacagaggtttcagcacccagtcctctctcttgtggctgaggaaagactgtttattgctgcattctctttatctccttatattcctgtctggaacttgagactaggttgcccagtatgatctgcttttccatgaaaagagacaactctgactgcattcattcaaacttttatcaaaactgttttgactgcctgctatgaactgaacacaagtccttaggggtattacagcatgacaacacagtcccttgagcaggtctcaggctttttctgtttaataaattgaacgggcctgcctctcccctaaactcaaagtaattagcttggtgaatagaatggagcctttcaactagcaacagtggatatccatctccctgaatgctttcaatcagagaagagagaatgctgacttcataagggtgggatctagaagtcttcagagaaaccttaggacagttccagcaccacttagttattcctcttcctctctacttttggctgactcctgaaaatgccaggcttggcttctcaagtcatactagttaccatcccttacatgaaccactttttcatttaaa

SEQ ID NO: 685334 - DNA, 785 bp, Homo sapiens
agtggaatggaatggactggaaagcaatggactggaatggaactttcttgaatggactggaatcaaacggaatggaatgcaatgcaatcaaatggcatggaataaaatagaatgaaagagaatcaaacggaattgaatcgaatggaatcgaatggattggaaaggaatagaatggaatggaatggaattgactcaaatggaatggactagaatggaatggattcgaatggaaggcaaaggaatggaatctattggaatggactgtaatggaatggaatggaagggattggaatggactcgaatggaatggactgcaatagaaaggattcgaatggaatgaaaaagaattgaatggaatagaacagaatggaatcaaatcgaatgaaatggaatggaatagaaaggaatggaatgaaatggaatggaaaggattcgaatggaatgcaatcgaatggaatggaatcgaacggaatggaataaaatggaagaaaactggcaagaaatggaatcgaaatgaatggagtgttatggaacggactcaaaaggaattgaatgtaatagaatggagtggagtggactcgaatataatggactggaatggaatgaaatcacatggaatgggaacgaatggaatggaatggaaaggaatggaatcgaatggaaaggaatcgaatggaagggaatgaaattgaatcaacasgaatggaagggaatagaatagacggtaatggaatggactcgaatagaatggacacgaatgctcaaattgaatggactcgaatgga

SEQ ID NO: 685335 - DNA, 822 bp, Homo sapiens
ctcgaacagagtggaatggaaagtgttgagatagaatggaatggactcctttggaatggtgtagtatgcaatgcaatcgactggcagggaatcaaaaggaatgtaatcgaatggattggactggaatgcaatggactcgaatagattgsaaacggaatgcaaaggaatggaatggaatagtatggaatggaatggaaaggaatggagtggaatagactagagtggaatggaatggactggaaagcaatggactggaatggaactttcttgaatggactggaatcaaacggaatggaatgcaatgcaatcaaatggcatggaataaaatagaatgaaagagaatcaaatggaattgaatcgaatggaatcgaatggattggaaaggaatagaatggaatggaatggaattgactcaaatggaatggactagaatggaatggattcgaatggaaggcaaaggaatggaatctattggaatggactgtaatggaatggaatggaagggattggaatggactcgaatggaatggactgcaatagaaaggattcgaatggaatgaaaaagaattgaatggaatagaacagaatggaatcaaatcgaatgaaatggaatggaatagaaaggaatggaatgaaatggaatggaaaggattcgaatggaatgcaatcgaatggaatggaatcgaacggaatggaataaaatggaagaaaactggcaagaaatggaatcgaaatgaatggagtgttatggaacggactcaaaaggaattgaatgtaatagaatggagtggagtggactcgaatataatggactggaatgga

SEQ ID NO: 685336 - DNA, 613 bp, Homo sapiens
aatgaaatggagtcaaaaggaatggaatcgaatggcaagaaatcgaatgtaatggaatcgcaaggaattgatgtgaacggaacggaatggaatggaatccaaatgaatggaatagaatggaatggaatcgaatggaaagractcgaatggaaatcactcgaatagaatgcaatttaataaaataggatcaaatgtaatggaatggaatggaaaggaatcgaaacgaaaggaatggagacagatggaatggaatggaacagagagcaatggtatagaatggaatggaatcatctggaatggaattgaatggaatggaataatatgaaatggaatggaatggaatggaatgcccttgaattaaatggactggaatggaatggactcgaacagagtggaatggaaagtgttgagatagaatggaatggactcctttggaatggtctagtatgcaatgcaatcgactggcagggaatcaaaaggaatgtaatcgaatggattggactggaatgcaatggactcgaatagattggaaacggaatgcaaaggaatggaatggaatagtatggaatggaatggaaaggaatggagtggaatagactagagtggaatggaa

SEQ ID NO: 685337 - DNA, 613 bp, Homo sapiens
aatgaaatggagtcaaaaggaatggaatcgaatggcaagaaatcgaatgtaatggaatcgcaaggaattgatgtgaacggaacggaatggaatggaatccaaatgaatggaatagaatggaatggaatcgaatggaaaggactcgaatggaaatcactcgaatagaatgcaatttaataaaataggatsaaatgtaatggaatggaatggaaaggaatcgaaacgaaaggaatggagacagatggaatggaatggaacagagagcaatggtatagaatggaatggaatcatctggaatggaattgaatggaatggaataatatgaaatggaatggaatggaatggaatgcccttgaattaaatggactggaatggaatggactcgaacagagtggaatggaaagtgttgagatagaatggaatggactcctttggaatggtctagtatgcaatgcaatcgactggcagggaatcaaaaggaatgtaatcgaatggattggactggaatgcaatggactcgaatagattggaaacggaatgcaaaggaatggaatggaatagtatggaatggaatggaaaggaatggagtggaatagactagagtggaatggaa

SEQ ID NO: 685338 - DNA, 613 bp, Homo sapiens
aatgaaatggagtcaaaaggaatggaatcgaatggcaagaaatcgaatgtaatggaatcgcaaggaattgatgtgaacggaacggaatggaatggaatccaaatgaatggaatagaatggaatggaatcgaatggaaaggactcgaatggaaatcactcgaatagaatgcaatttaataaaataggatcaaatgtaayggaatggaatggaaaggaatcgaaacgaaaggaatggagacagatggaatggaatggaacagagagcaatggtatagaatggaatggaatcatctggaatggaattgaatggaatggaataatatgaaatggaatggaatggaatggaatgcccttgaattaaatggactggaatggaatggactcgaacagagtggaatggaaagtgttgagatagaatggaatggactcctttggaatggtctagtatgcaatgcaatcgactggcagggaatcaaaaggaatgtaatcgaatggattggactggaatgcaatggactcgaatagattggaaacggaatgcaaaggaatggaatggaatagtatggaatggaatggaaaggaatggagtggaatagactagagtggaatggaa

SEQ ID NO: 685339 - DNA, 613 bp, Homo sapiens
aatgaaatggagtcaaaaggaatggaatcgaatggcaagaaatcgaatgtaatggaatcgcaaggaattgatgtgaacggaacggaatggaatggaatccaaatgaatggaatagaatggaatggaatcgaatggaaaggactcgaatggaaatcactcgaatagaatgcaatttaataaaataggatcaaatgtaatggaatggaatggaaaggaatcgaaacgaaaggaatggagacagatggaatggaatggaacagagagcaatggtatagaatggaatggaatcatctggaatggaattgaatggaatggaataatatgaaatggaatggaatggaatggaatgcccttgaattaaatggactggaatggaatggactcgaacagagtggaatggaaagtgttgagatagaatggaatggactcctttggaatggtctagtatgcaatgcaatsgactggcagggaatcaaaaggaatgtaatcgaatggattggactggaatgcaatggactcgaatagattggaaacggaatgcaaaggaatggaatggaatagtatggaatggaatggaaaggaatggagtggaatagactagagtggaatggaa

SEQ ID NO: 685340 - DNA, 883 bp, Homo sapiens
tgtctcaaacaacaacacaacaaacaattgtggctatcgatcaggggaagggattgtctctagtattgtaatcagcctctaagaacgattaaggaaggtgggagtcccatttgccaatggattcttgctctgcataattatgttcaggatttggtagttaaactgtcactgctagctgtgtgaccttgggcagggtacttaacctctctgtgccttgcttcattcacaaaaaggaggattaataatgctgatggtatttcataggattacagtgaggattaaatgagttaacagaaagcatctagcacagtgcttggcacacagtaagcacagaataggtgttgaaaattactcagggaaatacagggaaaattactcatagggaatccatggctaaataagttgggaaacactgggttaaagatcaacagctgtctttcctgcaagatttctcaaaataccaatgttactactgataaaggcatgtgccacaaaggttgagagaattaaatgagataaaaggtgtgtgaaacactcagtgcaccctgcacgtaatggacattataataagtatgtgaggccgggcgcagtggctctcacctgtaatmccagcactttgggaggctgaggccagcggatcacttgagctcaggaattcgagaccagcctgggcaacatggcaaaaccctatctctattaaaaatacaaaaattagccaggcgtagtcccagtgacttgggaggctgagatggaagaatggcttgagcccaggaggtcgaggctgcagtgagccaagataacgtcactgcactccagcctgggagacacagtgagaccctatctctctcttctctctcttctctctctctctctctctctctct

SEQ ID NO: 685341 - DNA, 883 bp, Homo sapiens
tgtctcaaacaacaacacaacaaacaattgtggctatcgatcaggggaagggattgtctctagtattgtaatcagcctctaagaacgattaaggaaggtgggagtcccatttgccaatggattcttgctctgcataattatgttcaggatttggtagttaaactgtcactgctagctgtgtgaccttgggcagggtacttaacctctctgtgccttgcttcattcacaaaaaggaggattaataatgctgatggtatttcataggattacagtgaggattaaatgagttaacagaaagcatctagcacagtgcttggcacacagtaagcacagaataggtgttgaaaattactcagggaaatacagggaaaattactcatagggaatccatggctaaataagttgggaaacactgggttaaagatcaacagctgtctttcctgcaagatttctcaaaataccaatgttactactgataaaggcatgtgccacaaaggttgagagaattaaatgagataaaaggtgtgtgaaacactcagtgcaccctgcacgtaatggacattataataagtatgtgaggccgggcgcagtggctctcacctgtaatcccagcactttgggaggctgaggmcagcggatcacttgagctcaggaattcgagaccagcctgggcaacatggcaaaaccctatctctattaaaaatacaaaaattagccaggcgtagtcccagtgacttgggaggctgagatggaagaatggcttgagcccaggaggtcgaggctgcagtgagccaagataacgtcactgcactccagcctgggagacacagtgagaccctatctctctcttctctctcttctctctctctctctctctctctct

SEQ ID NO: 685342 - DNA, 1422 bp, Homo sapiens
atccccatgtgttgtgggagggacccagtgggaggtaattgaatcaagggggcaggattttcccatgctgttcccacgatagtgaacaagtctcatgagatctaacggttttataaagggcagttcccctgcatgtgctctcttgcctgctgccatgtaagacatgcctttgctcctcctttgccttccaccataattgtgaagcctccccagccatgtggaactgtgagtccattaaacctcttttcctttataaattactcagtcttgggtatgtctttattaatagcatgaggacagactaatccatcttcctcaaggtacctgtgtgctctgggaaaaagagggttacagtatgagggggagaatcacattcctagcttacaacatcccttctgtggtcctcaccacagaacagcaggtcaagcaaaactgctgaccagggatggggaatcacaatagaaccaggtggcctgcaggagctaggccagaagtctagggtccagagacggtcagcagcaggtggcagtgaactgtgggaagttgaatgacaggggtcattggaggaaaagatactgcaggagaagagggatgctacaggggacagctctgaccaaatgtatggcaacccctcaacctgtgaggatcccaggaggtaaagtgaccttactcagattctacccccattcccagaagattctggggaagataaatcctaggaaaagactcaataatgcactgccaagggctcagaacattgataactgggttatgagtataaatgccacagagttgtattcatatattcttcagaagcattctgcaaggtgagttttagaatctccagcttacagttaaggaactaaggctcagataggctattgttctgctcaaaattatctgttagtaagtggcagagccaggtctgtctgtccccaaagcatacaagctccacacccactccagttctcagcaaagtcttcctgtaatcaccaagacagaaacggcccctctcttttatataatcagctcagtttgctcacagatccctcatcattggttgtttctctgtcttttgttacctctccgctggtcctcaaacattacccttgcaaggatggcctgaaaaattgatccaaaccacatactttgtaactaagtgaatcacgagggcctaggaatctgcatttaaacaggatgcccaggcattttctccaagatcagtttcgtttttggtatgcagcaggcaacaagagctggaatagatgagccacaatcgtaccayttcctgttggtgggtaggacccagtcctcatcctgccctgttcctttttttccattttcttccttcctgtctgagtcagctcaggctgctgtaacagcatatcacagactggacagcttaaacaacaaacatttatt

SEQ ID NO: 685343 - DNA, 646 bp, Homo sapiens
ggaacccaagaatttcaattcttaatctgtgttctcttgacatgacccagcactcctgtgcctctgggtgttgcaactgtgctagacctgacttctaatgataggagaaatttcatcaatgtcatctcagagccatacttaagacagcaaggctggatcaccaatatataataaaatctttaatgaaatcagtcctccaggattaaagtgctatttcccaattttctcacaccagacttaagttgggaagggactaccacacaacatcaaaggaaaagttggtgtaatgagctgataagggatgtacacccagagaaatggcagtgccttactgaaaagacttcttacacttttctatttgattaccaaaacttggtggctatgatacaaaaattaaagcagttctcastctgtattagataaatttcctttatgggtattttccctttgctttttttttttttttttaaaggaaggaataaactaaggctatattcttagagttctaaatcattaaacatataacacagtatcagaccttctttcctccacgtgactcttggaataaagtcattaagtcaagataaaacatcctgtttcaaggataacagtcttggggaaggacccagtgaaaagttggctctac

SEQ ID NO: 685344 - DNA, 614 bp, Homo sapiens
tgagctctggaaagctaggaactcatggactgtttatgatgctgaggatgagaaatcaggtaaggaccaagcctgctgtgcttgaaaaatggggtaccagctgagcttcccccaacttgtctaggataggacacttgcagccaattgttagttcactctgcactttgaggtatgagattagcatttatttctcaccttctcagacagtcctttgtgtggaaaagttttagttttagttttagtttctgttttttgaggcagagtcttgctttgtcacccaggctggagtgcagtggtgctatcatgactaactgaagcttcaacctcccaggctcaagtgatcctcctgctgcagcctcctgagtagctgggactacaggtgtgtgtcgccacgcttggctaatttttgtattttttttagagagacatkgttttatcatgttgcttgggctggtctcaaactcctgggttcaagctggaaaagtatttttaattgaaatggcagattatacttgaaagggatttggatgaggaagcatgtgcgttgggggagaacattctcttagtcataagtgcatgggctttcgtgtcagataagctaaagtttaaacaat

SEQ ID NO: 685345 - DNA, 809 bp, Homo sapiens
caaaaattataaacaccactaatttgatggtaccttttattcacatgtggataaagtctggtaggttggaaaagtttaagcaaacaaagtaagatggctgagatatttcataccatgagcataagtcaacagcatgagttaagccaaagacagctaagaagccctgagcaagaactgccaggactgtaatcaatatgttacctctgacatttacaaacaccctttagaagcaaaacactattttaaaaccttttaatgtcatttatgaagttggcttgccctttaaatgtctttcattcctcttgagaattaaatcagtttcaatgaggacccttttttgattatttgaacagcagttgggggtaaggagcaaaagaagaaggctcttcacctgcttgtaatagcctattgtcattgtgattgccaacctttcaactcttccactgtccttaagaattcataaaagagtgacaggtgacagcttccttctcggatggaactccttgcttgagaatcaaatgggactggaagtcgatgcagaggaggctttttatgagcatggctttgagagagccatggccctgccattccctggcacacaggagatayctatcagttggattcacagaggcatatcctccctcttaatgtagtctgcagacatgaggatccttctggtgaacatagggtctacatgggagtcaatggggatgggcaaaagccaaaaattagtgggtcaaaagctgagaatgttagctactgtggcctgtggttgagacaaatgcaggcacaaaggggataggaggtat

SEQ ID NO: 685346 - DNA, 1550 bp, Homo sapiens
gtaaatattcattttatacctaattttgtatttaaaatgttttgtgacatagctatacacacatacacacacacaaactgtataagcatcgaaccctgcaaagcctaaatccaccccttaattcaaaggggtgagctttttctcaacaatttagcttctaactaaaaaaaaaaaaaaaaaatcctccttttgcctgagtagcacatgattcacatagtatgtgtgtaacaaaaagctaaaaagtatgctagtaactgggactggccagtgatagagcaagcagtgggaggatagtatgttgtccttttgacctcttttttattttctcccgagtcacctggtccaggaaatcagtaaccctccaaatccatggagcaaacatcctgccctcactgtgttcctgattggtgtctctcttctctccgttctgttccattctccccaacactttcatatgcagacttttccacatgtgctggctcatgtcatggtgatagatgattcctggtaaaggtcactagcccagggctgcatttatcagcagcagttttctgtcatagctggctgaattactcctaagcccggagaagaaaaacagctgccagaatgaatcaagggaactttgggtgggtatttatgaagctgtgtgcatgtgtatccacgtgcaagtatggtcataagggaggcatgccattttcacccatctagattcttataaaaattctcatagcatcacgttttaaaaaaagaaagagtgaaaattaaaatgtctccttaaacttgccccacaagtaggtgtatgtccatgcctcattgttcctgcctgcttctgtgttctccagcaacaattgcatagctgaagttaatgacagagaccaaagggcagactcaaacctgctgaatggggtccatggtagaactagtttactttgatgttgtgtgtgtggaaattgtaattgcatcacataatggttgagttagtagaggtatatggccacattattcttctctgggagaaaattcaagatgcacgtagaacttcttgcctactctttgccggtgggcccccttagtgtcctctatctaggaaaatatagttaattattgattaacgcaaccagttgatggtataatgttaaaaagaaatacaaagggaaacaaaatgtgatgcccattttcagagtgcacaatccagcattagaaatggacagataaataataatttcaagatagttgatatgttaccaagttgggtgctgtgggaaaccagagaagaaagcaaatacaaaaggaagaccgtgatgcttcagtgagcaggaagcacaggaagttttttgaataaagactgaaatttactaggcaaataagaggwgcaggagttgtgggaagagataatgacagcatgataaaaggtacaggaaaagaggcacagtgtattctaacatatatgaggaccttggcatgactaaatcaaagggtggtaccaggagatgttgctgaggggcaaggctgaggctgcctcctacagaacctagtgagggcaccattaa

SEQ ID NO: 685347 - DNA, 1129 bp, Homo sapiens
tctctgccctttgcctgctttgcttttgcttcttagaatttttcacaactggacatattatttacctgctaattatatgtatccttcattaggatagaagatagagtcagctccttgaagggaaaaattttgttttgctcaatgcaatatctgcagtaattagaattacagacaggtagtaataatcaatgaatgtttattatgtggtagctagaatatgtgcgtcaggcagcattagaaataatacatacagggacagtgtgtcatcatggttaaggctgcagatttgggtcaaaatgccaacttgaatcctggatccattattcactggcaatgtgatctgagtaagcctgtctgtgcctctgttgtatcatctacaaaatggaaataatattagtacccctatcaaggaatattgtgaggagtaatttgaattaattcatataaagctctcagaataaagcttgtgacatattaaaygcttcagtaatattatccattgccacagacttgattgaatgatacagtattaacaaggctttcactgtactacttttatcatcattaaatgacctttttaatacttgatcatttgcaaaggaatttttacatatgttattgtgctccattctcacaaccaacatatagagcataaataaccccaagctggagataagacttaggcacagggaagtaaaagagagcatgcacacgtgtgtacacatgcatatgcacacattcgcagatcctcttttgcttgacaaactgctgttcacccttcaagcactgtgcccacattgcactttgaagctttgcctgaccatcccatttccagccaggtggagttgccttgatctcctttccacccccctgcccttgctgccaaccttaatgaatagatctctcgcaatcttgtctctcccactggactctggactctttttaggtaggtataatgacttgccaactatagtgctgtacatgttggcacgagctccatgcctttttcctctggcatgacatagtcattcagaatccatatttctctgacgttaacaccagttgcaccagctgccaatgaaggatgccctcttctaacaaaaactttactgaaaattagcccccagag

SEQ ID NO: 685348 - DNA, 1129 bp, Homo sapiens
tctctgccctttgcctgctttgcttttgcttcttagaatttttcacaactggacatattatttacctgctaattatatgtatccttcattaggatagaagatagagtcagctccttgaagggaaaaattttgttttgctcaatgcaatatctgcagtaattagaattacagacaggtagtaataatcaatgaatgtttattatgtggtagctagaatatgtgcgtcaggcagcattagaaataatacatacagggacagtgtgtcatcatggttaaggctgcagatttgggtcaaaatgccaacttgaatcctggatccattattcactggcaatgtgatctgagtaagcctgtctgtgcctctgttgtatcatctacaaaatggaaataatattagtacccctatcaaggaatattgtgaggagtaatttgaattaattcatataaagctctcagaataaagcttgtgacatattaaacgcttcagtaatattatccattgccacagacttgattgaatgatacrgtattaacaaggctttcactgtactacttttatcatcattaaatgacctttttaatacttgatcatttgcaaaggaatttttacatatgttattgtgctccattctcacaaccaacatatagagcataaataaccccaagctggagataagacttaggcacagggaagtaaaagagagcatgcacacgtgtgtacacatgcatatgcacacattcgcagatcctcttttgcttgacaaactgctgttcacccttcaagcactgtgcccacattgcactttgaagctttgcctgaccatcccatttccagccaggtggagttgccttgatctcctttccacccccctgcccttgctgccaaccttaatgaatagatctctcgcaatcttgtctctcccactggactctggactctttttaggtaggtataatgacttgccaactatagtgctgtacatgttggcacgagctccatgcctttttcctctggcatgacatagtcattcagaatccatatttctctgacgttaacaccagttgcaccagctgccaatgaaggatgccctcttctaacaaaaactttactgaaaattagcccccagag

SEQ ID NO: 685349 - DNA, 792 bp, Homo sapiens
ttttctcccctctccataaaacattacaatatcacatatactactgaaatccttagcaatagaaggccttagttaatctacaaagaaaactttcagaacttctggtttattcctatttatatatcaagaatatattcaaggccggctgccatggctcacacctgtaatcccagcattttgggaggccaaagtgggtgaattacttgaggtcaggagtttgagaccagcctggccaacatggcgaaascctgtctctactaaaaatgcaaaaattagctgggcgtggtggggcatgcctgtagttccggctagtagggaggctaaggttgggagattgcttgaacttgggaagcagaggtttaattgagttaagatcgggccactgcactccagcatgggcaacagagcaataattctactgtgaaatcatcagatgtttctagatcagcactgtccaatagaactttttgagatgatggaaatgttctataatctgccttgttaactgggctgcactgtgcactgaaaattttgttgtgagggtagatctcatggtaagtggtcttaccaaaatgggtatgttcaatagcttgtggtgatagtttcatgggtgaatgcttatgtccatactcatcaatttgcacacattaattatatgcagtttttaaaatatcagtcaccattttatatcaataaagctgttaactttttaaacagcatatgctttgttttttgtaattattacttttttcttctaaatacatttccttaaaagtattcactgttaaatca

SEQ ID NO: 685350 - DNA, 792 bp, Homo sapiens
ttttctcccctctccataaaacattacaatatcacatatactactgaaatccttagcaatagaaggccttagttaatctacaaagaaaactttcagaacttctggtttattcctatttatatatcaagaatatattcaaggccggctgccatggctcacacctgtaatcccagcattttgggaggccaaagtgggtgaattacttgaggtcaggagtttgagaccagcctggccaacatggcgaaagcctgtctctactaaaaatgcaaaaattagctgggcgtggtggggcatgcctgtagtyccggctagtagggaggctaaggttgggagattgcttgaacttgggaagcagaggtttaattgagttaagatcgggccactgcactccagcatgggcaacagagcaataattctactgtgaaatcatcagatgtttctagatcagcactgtccaatagaactttttgagatgatggaaatgttctataatctgccttgttaactgggctgcactgtgcactgaaaattttgttgtgagggtagatctcatggtaagtggtcttaccaaaatgggtatgttcaatagcttgtggtgatagtttcatgggtgaatgcttatgtccatactcatcaatttgcacacattaattatatgcagtttttaaaatatcagtcaccattttatatcaataaagctgttaactttttaaacagcatatgctttgttttttgtaattattacttttttcttctaaatacatttccttaaaagtattcactgttaaatca

SEQ ID NO: 685351 - DNA, 792 bp, Homo sapiens
ttttctcccctctccataaaacattacaatatcacatatactactgaaatccttagcaatagaaggccttagttaatctacaaagaaaactttcagaacttctggtttattcctatttatatatcaagaatatattcaaggccggctgccatggctcacacctgtaatcccagcattttgggaggccaaagtgggtgaattacttgaggtcaggagtttgagaccagcctggccaacatggcgaaagcctgtctctactaaaaatgcaaaaattagctgggcgtggtggggcatgcctgtagttccggctagtagggaggctaaggttgggagattgcttgaacttgggaagcagaggtttaattgagttaagatcgggccactgyactccagcatgggcaacagagcaataattctactgtgaaatcatcagatgtttctagatcagcactgtccaatagaactttttgagatgatggaaatgttctataatctgccttgttaactgggctgcactgtgcactgaaaattttgttgtgagggtagatctcatggtaagtggtcttaccaaaatgggtatgttcaatagcttgtggtgatagtttcatgggtgaatgcttatgtccatactcatcaatttgcacacattaattatatgcagtttttaaaatatcagtcaccattttatatcaataaagctgttaactttttaaacagcatatgctttgttttttgtaattattacttttttcttctaaatacatttccttaaaagtattcactgttaaatca

SEQ ID NO: 685352 - DNA, 792 bp, Homo sapiens
ttttctcccctctccataaaacattacaatatcacatatactactgaaatccttagcaatagaaggccttagttaatctacaaagaaaactttcagaacttctggtttattcctatttatatatcaagaatatattcaaggccggctgccatggctcacacctgtaatcccagcattttgggaggccaaagtgggtgaattacttgaggtcaggagtttgagaccagcctggccaacatggcgaaagcctgtctctactaaaaatgcaaaaattagctgggcgtggtggggcatgcctgtagttccggctagtagggaggctaaggttgggagattgcttgaacttgggaagcagaggtttaattgagttaagatcgggccactgcactccagcatgggcaacagagcaataattctactgtgaaatcatcaratgtttctagatcagcactgtccaatagaactttttgagatgatggaaatgttctataatctgccttgttaactgggctgcactgtgcactgaaaattttgttgtgagggtagatctcatggtaagtggtcttaccaaaatgggtatgttcaatagcttgtggtgatagtttcatgggtgaatgcttatgtccatactcatcaatttgcacacattaattatatgcagtttttaaaatatcagtcaccattttatatcaataaagctgttaactttttaaacagcatatgctttgttttttgtaattattacttttttcttctaaatacatttccttaaaagtattcactgttaaatca

SEQ ID NO: 685353 - DNA, 654 bp, Homo sapiens
caatcgtgtttggtgagggaagaagctgcccatatgtttaggtttggctaatggttgtgattactaattcaagtgtgtgtgtctgtgtgtggtgtggatgtgtggagtgtggtctcctctgtgtgtgtgtgtgtgtgtatgtgtgtgtttgtggtgtggggtcctctctgtgtgtgtgtgtgtgtgtgtgtgtgtgtgtgttttagatagtgcgttaaatttaggataattttgcattatttttaaagataggtctgagctaatgctaatattttagttccacagaaggaaaaagtccagtttgctatgagaatagtaacattgtctacgctctctctagcagaaaggaaaggatggtgagtctcagtgggcagcctggggaaggtcagagaatgccagcttgttcctgagtggcctcagtgatgacccagacatrgtcagtcatgattcctcagacttgggcataatcgaaggatcatctggatctctgcttctcctaatgcctttatcccctgcattccaaagcaagaggggagaaaagcaaaattgaatctgaaggcagactccatgtgaccactttaattaaatgtaagagtggctgctgtgtgaggcaaaaggaaaaaactcaggagaaagggcatgatattgttttga

SEQ ID NO: 685354 - DNA, 654 bp, Homo sapiens
caatcgtgtttggtgagggaagaagctgcccatatgtttaggtttggctaatggttgtgattactaattcaagtgtgtgtgtctgtgtgtggtgtggatgtgtggagtgtggtctcctctgtgtgtgtgtgtgtgtgtatgtgtgtgtttgtggtgtggggtcctctctgtgtgtgtgtgtgtgtgtgtgtgtgtgtgtgttttagatagtgcgttaaatttaggataattttgcattatttttaaagataggtctgagctaatgctaatattttagttccacagaaggaaaaagtccagtttgctatgagaatagtaacattgtctacgctctctctagcagaaaggaaaggatggtgagtctcagtgggcagcctggggaaggtcagagaatgccagcttgttcctgagtggcctcagtgatgacccagacatagtcagtcatgattcctcagacttgggcataatcgaaggatcatctggatctctgcttctcctaatgcctttatcccctgcattccaaagcaagaggggagaaaagcaaaattgaatctgaaggcagactccatgtgaccactttaattaaatgtaagagtggmtgctgtgtgaggcaaaaggaaaaaactcaggagaaagggcatgatattgttttga

SEQ ID NO: 685355 - DNA, 583 bp, Homo sapiens
aaatggatgattactgaggcagtcctcaccattaagagatggacagtccacagagagttctgtgatacaattattataacacgatgtgaatctttatatggaaggtatgcaaaggaaatgcagagtgttaagtccacaaatctacagagatcttgtgtgtgttaattttggtgggtatgggcatgtgtgtgggtggagaaggtgarttattagggaaatattaatagaagaggtagcacttaagctgagatttttaaaggctaaatataaacaaaggcctggaagatcaatggcggaaaggattccaggcaggtggaatagcctgtgcaaaaaatcagaggcatgaagacatatggttttaagtatttatacataattgtttgagcctgggatttaacgtgcagtagtggaagttctggtgagcattaagtgcgaacatgtgggctggcatctaaacatgacaagcaaaaggactgtaggatactcctgagaatcttggatgatcatctgcaagattggagcgagagtcacatgaacagatctctgtgataaacagtgccctctagcagcagaatggaggagg

SEQ ID NO: 685356 - DNA, 583 bp, Homo sapiens
aaatggatgattactgaggcagtcctcaccattaagagatggacagtccacagagagttctgtgatacaattattataacacgatgtgaatctttatatggaaggtatgcaaaggaaatgcagagtgttaagtccacaaatctacagagatcttgtgtgtgttaattttggtgggtatgggcatgtgtgtgggtggagaaggtgaattattagggaaatattaatagaagaggtagcacttaagctgagatttttaaaggctaaatataaacaaaggcctggaagatcaatggcggaaaggattccaggcaggtggaatagcctgtgcaaaaaatcagaggcatgaagacatatggttttaagtatttatacataattgtttgagcctgggatttaacgtgcagtagtggaagttctggtgagcattaagtgcgaacatgtgggctggcatctaaayatgacaagcaaaaggactgtaggatactcctgagaatcttggatgatcatctgcaagattggagcgagagtcacatgaacagatctctgtgataaacagtgccctctagcagcagaatggaggagg

SEQ ID NO: 685357 - DNA, 630 bp, Homo sapiens
tgcagaaaactagcttaaatggatttaaaatggtgaaaaattgagcatttgctttgtaaaatatgttgtaatatatatactttcactaaagtattttgtttttatgtattgtcttttgtttatattttccctgctttcatggggccttaaaatccttgatggcggacgtttttgtcttatctttggttatttagtattaactctatgttgcttttatgtgataagttattttaaaaatctgcaaaaagcaacagcttttcagaaaacttagagacttgacaaataaaaatctctgaaatgctctaatgatggagacagataatcttacctgaattttagcacagtcgaatcacactaaaattggtaacytttatgttgatggttttcccattaatctgtccatagaattttgttaaatttttcctttttttgttaagtaaaatttttttatatatgaccatttattttactctctggtttcaaagggtattttgtaaaatgtgattatttaagtttataactcagattgatggctattatgcttagtagacattttttctagatatttcacaacatatatctaagatttctaggctacaggccgtgtttttcttctccagttggaaacat

SEQ ID NO: 685358 - DNA, 630 bp, Homo sapiens
tgcagaaaactagcttaaatggatttaaaatggtgaaaaattgagcatttgctttgtaaaatatgttgtaatatatatactttcactaaagtattttgtttttatgtattgtcttttgtttatattttccctgctttcatggggccttaaaatccttgatggcggacgtttttgtcttatctttggttatttagtattaactctatgttgcttttatgtgataagttattttaaaaatctgcaaaaagcaacagcttttcagaaaacttagagacttgacaaataaaaatctctgaaatgctctaatgatggagacagataatcttacctgaattttagcacagtcgaatcacactaaaattggtaacctttatgttgatggttttcccattaatctgtccatagaattktgttaaatttttcctttttttgttaagtaaaatttttttatatatgaccatttattttactctctggtttcaaagggtattttgtaaaatgtgattatttaagtttataactcagattgatggctattatgcttagtagacattttttctagatatttcacaacatatatctaagatttctaggctacaggccgtgtttttcttctccagttggaaacat

SEQ ID NO: 685359 - DNA, 628 bp, Homo sapiens
catacctttgaatctttgtccatttatattgatgaaacctcttccattatttggccccaaataccatatttattttttatgttttatcatagagatatttaagacagaggagaacgacrtgcatcatacttcattatcttacattgtgagaaattaagactatccacataaattaacattactagaagctaaagctaagcattttttatgtttacaaactttcttctaatatcatctattctatatcgaattgattttgaaacattttgaaatatatattttctgctttctcaaaacagcatttttaaacatgatttaacatctgtatgatttttttttttaacttttaagttcagaggtatatgtgcaggtttgttacgtagataaacttgtgtcataggggtttgttgtgcagattatttcatcacccaagtattaagcctagtgctcattagctatttatcctggttctccttctcctccaaccctgcacccaccctctatccttcaataggccccagcgtgttgtccccctctatgtgtccatgtgttctcatcatttatctgccacctataagtgagaacatgcggtatttggttttctgtttctgtgttagtttgctgagga

SEQ ID NO: 685360 - DNA, 611 bp, Homo sapiens
caagatgaatcaaacttaaaaaaaattactttggcttttttttctcatttggaaggtaactattagaaaagaccaccaaatattataccaagtattatcaytggggagagaattctgatttttaagaagtaataggcatttagtggcatgattcaccaaatgcaaaccctggggatccaagtccagccctaagatgacagtgagcagccacactggctgatttcttgctgggaaagaaggccagtgctgctgactcgtgtcccaggtggcgcagccggaacaattgtatccttggagtatagttgttaagagcagctgctgaggaacacaggagcctgagcatcaggcctgtgacaccagacaagctcaatcacttctctctcagcttttccttatattaaacagaatagtcaggttgtgaaaaatacaaaatgcaaagaatcaaaatcatggttttgttaaaaaattaaaatatgcaataatgggaattatatcatctatgcccaaaataaaaatatttagggtgtcttatctaatatgtatgggagaagacactattccatcttttaaaacttttggatgggcttttttttgtggccaggatgaggaca

SEQ ID NO: 685361 - DNA, 611 bp, Homo sapiens
caagatgaatcaaacttaaaaaaaattactttggcttttttttctcatttggaaggtaactattagaaaagaccaccaaatattataccaagtattatcattggggagagaattctgatttttaagaagtaataggcatttagtggcatgattcaccaaatgcaaaccctggggatccaagtccagccctaagatgacagtgagcagccacactggctgatttcttgctgggaaagaaggccagtgctgctgactcgtgtcccaggtggygcagccggaacaattgtatccttggagtatagttgttaagagcagctgctgaggaacacaggagcctgagcatcaggcctgtgacaccagacaagctcaatcacttctctctcagcttttccttatattaaacagaatagtcaggttgtgaaaaatacaaaatgcaaagaatcaaaatcatggttttgttaaaaaattaaaatatgcaataatgggaattatatcatctatgcccaaaataaaaatatttagggtgtcttatctaatatgtatgggagaagacactattccatcttttaaaacttttggatgggcttttttttgtggccaggatgaggaca

SEQ ID NO: 685362 - DNA, 611 bp, Homo sapiens
caagatgaatcaaacttaaaaaaaattactttggcttttttttctcatttggaaggtaactattagaaaagaccaccaaatattataccaagtattatcattggggagagaattctgatttttaagaagtaataggcatttagtggcatgattcaccaaatgcaaaccctggggatccaagtccagccctaagatgacagtgagcagccacactggctgatttcttgctgggaaagaaggccagtgctgctgactcgtgtcccaggtggcgcagccggaacaattgtatccttggagtatagttgttaagagcagctgctgaggaacacaggagcctgagcatcaggcctgtgacaccagrcaagctcaatcacttctctctcagcttttccttatattaaacagaatagtcaggttgtgaaaaatacaaaatgcaaagaatcaaaatcatggttttgttaaaaaattaaaatatgcaataatgggaattatatcatctatgcccaaaataaaaatatttagggtgtcttatctaatatgtatgggagaagacactattccatcttttaaaacttttggatgggcttttttttgtggccaggatgaggaca

SEQ ID NO: 685363 - DNA, 611 bp, Homo sapiens
caagatgaatcaaacttaaaaaaaattactttggcttttttttctcatttggaaggtaactattagaaaagaccaccaaatattataccaagtattatcattggggagagaattctgatttttaagaagtaataggcatttagtggcatgattcaccaaatgcaaaccctggggatccaagtccagccctaagatgacagtgagcagccacactggctgatttcttgctgggaaagaaggccagtgctgctgactcgtgtcccaggtggcgcagccggaacaattgtatccttggagtatagttgttaagagcagctgctgaggaacacaggagcctgagcatcaggcctgtgacaccagacaagctcaatcacttctctctcagcttttccttatattaaacagaatagtcaggttgtgaaaaatacaaaatgcaaagaatcaaaatcatggttttgttaaaaaattaaaatatgcaataatgggaatwatatcatctatgcccaaaataaaaatatttagggtgtcttatctaatatgtatgggagaagacactattccatcttttaaaacttttggatgggcttttttttgtggccaggatgaggaca

SEQ ID NO: 685364 - DNA, 648 bp, Homo sapiens
gtccctggtaactaaggagttgactgagtactgctcactggtactgacagatgcaggaagcatgtaagagggagaatccctggagaatctccagcccacctgccactgggagaatggggtggagccaccgagaagtttctgccttgtgcacgggggaggagcctgggctcttgagctcctgtgtggtggcctggtattcaatctgtgagatgggagccgttggcaggaacccctctcactttgctgagagttttttcttttttccttttcgcccaataaattccattccccacccttcaatgtgtctgcatgtctaagttttcctggttgtgagataaacccgaatttagctgaactaaggggcaaaaattctgcaacagtaatatatataccgagtacttgtcctggccatccctgtcccctgtggtgtcctgcttccacacccacagggrtagaggccattttatttgttgatatactttctcagtgcctgcccattgtcaggctgggtttctgagtatctcctgattctctaatgctatattttgttagctttttggatcatctcttatacttggtgttggatcctttgacacctggtgcattcatgaactgtctctggaacatggaactctgagctccagactg

SEQ ID NO: 685365 - DNA, 1300 bp, Homo sapiens
tgaaactgatctagtgatttgcttttgatttcctattgcagtgtttgattgtcatctaactgattattttaagtgatttaattatattataagatgaataaaattcaggcttccagttaactaactagcttttgttccctgaagaaattggcagaaaaggacatatctatttatgattttttttcctcaccaatttctactttaagagacatgttctcaagtagagaagattttcccacagacggcattaattggaaacgttgtaatgacaataacaagtatgcagaaatctagttgtttagaagaaattttctctttcttcatgaatatttggacaagctattccrtcaaatgtctgatatatttaaaatgaggccaagaagacatgcatttggttcacagttttccaaagtgtgtgttctagaacacttttatcactagatttctgctgggtttgtgtgacagtgcatcttatctccctcttcattaaataccttatttctcattcattgtttcaaggttttttgcttgtttgttttttgtttttttgttttgtgttgttttgagatggagtcttgctctgtcacccaggctggagtgcaatggcacaatctcggctcactgcaacctccaccttctgggatcaagtgattctcctgtctcagcctaccgagtagttgggattacaggcaccccaccataaccggctaatttttatatttttagtagagatggggttttgccatgttggtcaggttggtctcgaactcctgacctcaggtgatctgcccactttggctgcccaaagtgctgggattacaggcgtgagccaccgcgcccggcctttcaaggttttaatatcttctacagcaaagaaatctgattaaccttgcttaacccaatgtttaccaaatgtatttactgacagaccaattacatatttacatcagaccaattacatttacatcagaccaattaacatattctgagactagcatttcgggaagcaaatgctgctaaaacaccttagcaatttctgtgagaatgaaatccatatccagttaacagcgtttttcagtgttgtataaccttgtggacaatttgatactggtttaggttcttgaattattgaccttttaagaagtctgcaggtgaataataattggccacatacacagcaatgcacttagagcattattttaagttccgcacttggaaatttgccagcactactttggaaatggcaactaaagcaagcatttcatatattggattctatggaactttgctgaatttggag

SEQ ID NO: 685366 - DNA, 1300 bp, Homo sapiens
tgaaactgatctagtgatttgcttttgatttcctattgcagtgtttgattgtcatctaactgattattttaagtgatttaattatattataagatgaataaaattcaggcttccagttaactaactagcttttgttccctgaagaaattggcagaaaaggacatatctatttatgattttttttcctcaccaatttctactttaagagacatgttctcaagtagagaagattttcccacagacggcattaattggaaacgttgtaatgacaataacaagtatgcagaaatctagttgtttagaagaaattttctctttcttcatgaatatttggacaagctattccgtcaaatgtctgatatatttaaaatgaggccaagmagacatgcatttggttcacagttttccaaagtgtgtgttctagaacacttttatcactagatttctgctgggtttgtgtgacagtgcatcttatctccctcttcattaaataccttatttctcattcattgtttcaaggttttttgcttgtttgttttttgtttttttgttttgtgttgttttgagatggagtcttgctctgtcacccaggctggagtgcaatggcacaatctcggctcactgcaacctccaccttctgggatcaagtgattctcctgtctcagcctaccgagtagttgggattacaggcaccccaccataaccggctaatttttatatttttagtagagatggggttttgccatgttggtcaggttggtctcgaactcctgacctcaggtgatctgcccactttggctgcccaaagtgctgggattacaggcgtgagccaccgcgcccggcctttcaaggttttaatatcttctacagcaaagaaatctgattaaccttgcttaacccaatgtttaccaaatgtatttactgacagaccaattacatatttacatcagaccaattacatttacatcagaccaattaacatattctgagactagcatttcgggaagcaaatgctgctaaaacaccttagcaatttctgtgagaatgaaatccatatccagttaacagcgtttttcagtgttgtataaccttgtggacaatttgatactggtttaggttcttgaattattgaccttttaagaagtctgcaggtgaataataattggccacatacacagcaatgcacttagagcattattttaagttccgcacttggaaatttgccagcactactttggaaatggcaactaaagcaagcatttcatatattggattctatggaactttgctgaatttggag

SEQ ID NO: 685367 - DNA, 669 bp, Homo sapiens
gttagagaatgctcaaatgctcccaaaacttcagttatcaccttcgtgcaactgactcaatctttaccttgaatttgcatattcatcctgaactttttgttctgaatttcccataggtactacagattcaactaggcactaaactgagattattagttccccttataaacatcaatttatttctcctactctcactccctgatttgggctgaagttaaattcagtgtttaggttctcccatcccacttgtcctctgcctcctaaaccatattattcttttaatctggactattctctccctctctcactttatgtttgaacatgataatttttcatttaggtacagcttgagttctatctcagtgatacctaccctgttcaattcagaaagaatgaaagaactctcatgtaattaacttcattgcatcgtgtttcatcattagttgtagacatgtctgtattgttttcctcatcagaatgtaagtctctcaagcgatctttgtggaacttgtaagtcggtcattaccttctttctttctttcttttttttttttttttttgagactgagtctcgccccgtckcccaagctggagtgcagtggtgcaatctccactcactgcaagctccgcctcccaggttcacaccattctcctgcctcagcctcctga

SEQ ID NO: 685368 - DNA, 1049 bp, Homo sapiens
tatcattataggttcccacaaaataatatattctatgatacaaacacattcttcacccaagtaaagtactagaaattaaacacatttaatgtgcttgaaaaaaatcttcctaatgttgaccattgtttatattagtcatatgttatgtattaggaactaaaagaatgttttctcagtgcatatgaataagttagctttactttttacaaagataatttgtactatttgaacattttgaagagcataatagacctgttgaattttgttactgtttaaggctgagtgcaatctcatttccttatgcccttagagagaactacctgaaagcaaatatctaaaaaacaatttaatttgctacttaaaatgatatgctatcaagttgaaatcactctaaagataaggaaactaaaaagactacaggaataatgtatgaacagttaaaattggctcattataaagaataccaaccctctttcaatggtatttcaggtagacaagcattgaataactcttaattacttactcaaggaacattaccgcatttgtttagtgccacccttttttccatagcaagtcctcaaataagtattcccaaagctgtattttatcttccaaattgctttaaattttcaatagatccatagataataaaaagttatcaatacttcatattttctgaggaactgaagttatatgtcacacacatacacacatacayacacacacacacacacacacacacacacacacacacacatgcacacaaagctaagaatcacaaggccccatttaattttttttttttaagagatgaagtcttgctcttccacccagactggagtgaagtggtgtgaacatggctcactgcagcctcggcctcccagactccagtgattctcccgtctcagccccctgtaatactccattctcccactgcagataaagacatacctgagactgcgcaatttacaaaagaaagaggtttaaaggacttacagttccacatggctgggaaagcctcacaatcatggcggaaggtgacaggcacg

SEQ ID NO: 685369 - DNA, 1049 bp, Homo sapiens
tatcattataggttcccacaaaataatatattctatgatacaaacacattcttcacccaagtaaagtactagaaattaaacacatttaatgtgcttgaaaaaaatcttcctaatgttgaccattgtttatattagtcatatgttatgtattaggaactaaaagaatgttttctcagtgcatatgaataagttagctttactttttacaaagataatttgtactatttgaacattttgaagagcataatagacctgttgaattttgttactgtttaaggctgagtgcaatctcatttccttatgcccttagagagaactacctgaaagcaaatatctaaaaaacaatttaatttgctacttaaaatgatatgctatcaagttgaaatcactctaaagataaggaaactaaaaagactacaggaataatgtatgaacagttaaaattggctcattataaagaataccaaccctctttcaatggtatttcaggtagacaagcattgaataactcttaattacttactcaaggaacattaccgcatttgtttagtgccacccttttttccatagcaagtcctcaaataagtattcccaaagctgtattttatcttccaaattgctttaaattttcaatagatccatagataataaaaagttatcaatacttcatattttctgaggaactgaagttatatgtcacacacatacacacatacacacacacacacacacacacacacacacacacacacacacatgcacacaaagctaagaatcacaaggccccatttaattttttttttttaagagatgaagtcttgctcttccacccagactggagtgaagtggtgtgaacatggctcacygcagcctcggcctcccagactccagtgattctcccgtctcagccccctgtaatactccattctcccactgcagataaagacatacctgagactgcgcaatttacaaaagaaagaggtttaaaggacttacagttccacatggctgggaaagcctcacaatcatggcggaaggtgacaggcacg

SEQ ID NO: 685370 - DNA, 1049 bp, Homo sapiens
tatcattataggttcccacaaaataatatattctatgatacaaacacattcttcacccaagtaaagtactagaaattaaacacatttaatgtgcttgaaaaaaatcttcctaatgttgaccattgtttatattagtcatatgttatgtattaggaactaaaagaatgttttctcagtgcatatgaataagttagctttactttttacaaagataatttgtactatttgaacattttgaagagcataatagacctgttgaattttgttactgtttaaggctgagtgcaatctcatttccttatgcccttagagagaactacctgaaagcaaatatctaaaaaacaatttaatttgctacttaaaatgatatgctatcaagttgaaatcactctaaagataaggaaactaaaaagactacaggaataatgtatgaacagttaaaattggctcattataaagaataccaaccctctttcaatggtatttcaggtagacaagcattgaataactcttaattacttactcaaggaacattaccgcatttgtttagtgccacccttttttccatagcaagtcctcaaataagtattcccaaagctgtattttatcttccaaattgctttaaattttcaatagatccatagataataaaaagttatcaatacttcatattttctgaggaactgaagttatatgtcacacacatacacacatacacacacacacacacacacacacacacacacacacacacacatgcacacaaagctaagaatcacaaggccccatttaattttttttttttaagagatgaagtcttgctcttccacccagactggagtgaagtggtgtgaacatggctcactgcagcctcggcctcccagactccagtgattctccygtctcagccccctgtaatactccattctcccactgcagataaagacatacctgagactgcgcaatttacaaaagaaagaggtttaaaggacttacagttccacatggctgggaaagcctcacaatcatggcggaaggtgacaggcacg

SEQ ID NO: 685371 - DNA, 492 bp, Homo sapiens
gatacttgttaaagcatggtaaggaagacttcaattcaagaccattacaataggtgtggggacaattaaaatgggatcttgcagtcagggagagagattggactcaactctgaatatggaaaggagaaatttacagccaaggagcagggtgagggtcagtggttggaaaattactaagggagattctggctaaaccgacccaacaagattcttgctgaagacaggccagggtgatcagacatcacctgggggatgatggagggtgtgtaacataatcagatatcaaggataatcagatattgaagacrgagcgttctggctaaacttactaagcaggtccctttgctaaagctggattttacaaggaagtgcacagatgggccctgggagaaggtccagaatcctgagtaaagtttggccaagagaagactctttgtcacatttcagatgaatctatcatgaaacaattagtgtttctgctgatattataca

SEQ ID NO: 685372 - DNA, 492 bp, Homo sapiens
gatacttgttaaagcatggtaaggaagacttcaattcaagaccattacaataggtgtggggacaattaaaatgggatcttgcagtcagggagagagattggactcaactctgaatatggaaaggagaaatttacagccaaggagcagggtgagggtcagtggttggaaaattactaagggagattctggctaaaccgacccaacaagattcttgctgaagacaggccagggtgatcagacatcacctgggggatgatggagggtgtgtaacataatcagatatcaaggataatcagatattgaagacagagcgttctggctaaacttactaagcaggkccctttgctaaagctggattttacaaggaagtgcacagatgggccctgggagaaggtccagaatcctgagtaaagtttggccaagagaagactctttgtcacatttcagatgaatctatcatgaaacaattagtgtttctgctgatattataca

SEQ ID NO: 685373 - DNA, 646 bp, Homo sapiens
tggtctcaaactcctgaccttgtgattcacctgcctcagcctcccaaagtgctgggcttacaggcatgagccaacgtgcctggctgatatttactgtttttactccatcatgtctatacttggcttctatatcatttgaagaaggtattcygctgtttactgaaaactgaacaaagaaaaaaccccatagataaaaaatttttggtgttagtaaactgaaaaaggctgttttaaacaggaaaatattgagataactttaatcaatgagtttaagattttactctctccactggaaagaacacctaagaggacaatgagatcaattctagaaacaaaggaacactgcatatatataatctagcacatatgaattatactgcttatattttgacctatttcatgtcaaatacataaagcataggtgatttggtgcaggagggtgaaaagggggcaggcggattacttgtacccctcaccagaaaatccctgtggcacctccagaggcagatagaagtgtttgaaacccagtgatccatctggggaaattggtccttctatctttaagtgactttacaataacacaactacttagttagtgcaggagcccacactggcacccagggacttaacttctaggactttaaca

SEQ ID NO: 685374 - DNA, 1858 bp, Homo sapiens
tgtgggattatataaataaattagcttctttgtagaccttcaaaaagtattagagatgcagaaaaagtattggagagtcagaagcggggaggtttggagagggagagagataaaaaattacctattggatgcaatatacgctatatttgagtgatgggcatagtgaaagcccagacttcaccactatacaattcatccatgtaaccaaaaaccacttrtagccctaaagctattgaaatttaaaaaattaaaaaattagaaagaaaggaaggaaggaagcagctctgggagagggagaatatgaactgtgatgcagtctcagtggaggtctcaactagttgtatgagaagttccggagcagagataaaacttgagttgtcttagatgggggccaagtttcccccatgttacttattagacctctatctccccagaaaggaaatgtggccttgggccaggagcctctttttagcacaagcaatctccttcgtgagctggcactgaagcctgtcccaggcagcatttgcagcaggaaaggaaaaacgtgaaggagctaggggcatgcatcacagcatctaccatagtgagtcaatatgcagagctagatctcactttgtagtgacctcaagcttattaggacagtggctggcactttgatagccaatctcttaaccgagatcactctatcattgctgttgttctctcttagggattgtctaagcacaagacagcatagtcaaaagaccatcaaatcatattttcagccataatttctgagaattctgagaaaaaagtaacatcagccattaaatagtgtaacaatcaatttgctagtcttagtgcaaactgtggcttgcatcaggccacattacaaaggggcagggaggagtaaggaccaaatttgagcctatgttcaacttagcaagacttgtcctggtgacaatctgtgtctgcacagcagaaggggttgtcttactgcaatctggctgctacagaggcagcattttctagcttgtacaaaggtgctgtgtattctagcaagggcttggtccttattgcttattttcactttcatctgaacactgaacacatgtataccccatttaattcctcttcttttctctttcagatgctaacaatgatcatgttggcagtggtgaaagaattccatttctgtgctatcagcctaatgggttgcatattgtaaagaatcactatatttaacatatatatatatgaatcacataatggacttatttgtgccactacacaaaacaaactagaagaaatatgatagtgaaaataaatatattaatcaacttaagcactctgaattattgtttggtttttagaacaccttaaaatttccaatactgaaatccataaaattaagaattcataaagtaaaattttgcaggaaaacattaatattatttctattcatattaaaaagtaaacactttcatgaattatactaaatgtgttcacatttaatcacatttactgccataaattttaatctgcatttccactatttgacatactgctggctgtataaataaatataatactaagtaaatgataatgataacaaaatatccctggaattcttcaagtttttgtctgggttctcatttgtttacatatatgaaattatacacagagacaactcttttccagttcttcaattcaaatcaaagagtatttaggtaacagtgccacctattgctataaaattaaagtagcccaatatgttatcattcccctcttgtttgatcctataattcttatttttctgactccttctgtttctaagttttcattttaattgcaaagaaatagataatttcaagtgctt

SEQ ID NO: 685375 - DNA, 1858 bp, Homo sapiens
tgtgggattatataaataaattagcttctttgtagaccttcaaaaagtattagagatgcagaaaaagtattggagagtcagaagcggggaggtttggagagggagagagataaaaaattacctattggatgcaatatacgctatatttgagtgatgggcatagtgaaagcccagacttcaccactatacaattcatccatgtaaccaaaaaccacttatagccytaaagctattgaaatttaaaaaattaaaaaattagaaagaaaggaaggaaggaagcagctctgggagagggagaatatgaactgtgatgcagtctcagtggaggtctcaactagttgtatgagaagttccggagcagagataaaacttgagttgtcttagatgggggccaagtttcccccatgttacttattagacctctatctccccagaaaggaaatgtggccttgggccaggagcctctttttagcacaagcaatctccttcgtgagctggcactgaagcctgtcccaggcagcatttgcagcaggaaaggaaaaacgtgaaggagctaggggcatgcatcacagcatctaccatagtgagtcaatatgcagagctagatctcactttgtagtgacctcaagcttattaggacagtggctggcactttgatagccaatctcttaaccgagatcactctatcattgctgttgttctctcttagggattgtctaagcacaagacagcatagtcaaaagaccatcaaatcatattttcagccataatttctgagaattctgagaaaaaagtaacatcagccattaaatagtgtaacaatcaatttgctagtcttagtgcaaactgtggcttgcatcaggccacattacaaaggggcagggaggagtaaggaccaaatttgagcctatgttcaacttagcaagacttgtcctggtgacaatctgtgtctgcacagcagaaggggttgtcttactgcaatctggctgctacagaggcagcattttctagcttgtacaaaggtgctgtgtattctagcaagggcttggtccttattgcttattttcactttcatctgaacactgaacacatgtataccccatttaattcctcttcttttctctttcagatgctaacaatgatcatgttggcagtggtgaaagaattccatttctgtgctatcagcctaatgggttgcatattgtaaagaatcactatatttaacatatatatatatgaatcacataatggacttatttgtgccactacacaaaacaaactagaagaaatatgatagtgaaaataaatatattaatcaacttaagcactctgaattattgtttggtttttagaacaccttaaaatttccaatactgaaatccataaaattaagaattcataaagtaaaattttgcaggaaaacattaatattatttctattcatattaaaaagtaaacactttcatgaattatactaaatgtgttcacatttaatcacatttactgccataaattttaatctgcatttccactatttgacatactgctggctgtataaataaatataatactaagtaaatgataatgataacaaaatatccctggaattcttcaagtttttgtctgggttctcatttgtttacatatatgaaattatacacagagacaactcttttccagttcttcaattcaaatcaaagagtatttaggtaacagtgccacctattgctataaaattaaagtagcccaatatgttatcattcccctcttgtttgatcctataattcttatttttctgactccttctgtttctaagttttcattttaattgcaaagaaatagataatttcaagtgctt

SEQ ID NO: 685376 - DNA, 2141 bp, Homo sapiens
atgaataaaatgttttgcaaccttttttttttaacaaataagaacattgattcaaaaaacacttatataaatttgagtattagagtaaacgggaaaaacaaaaggatttacgttacaggaccaacatatcaaggatcagaaaagtactgccaaaagggtcacctacattgagtgacaaaaacattctttaaataaaatgcttaattttgtttagaaatcatattttataaaataagaaatatgaagatgttcaatttcaccaagttacatgaacatattcagatgaactaaaatgtagcttgatttctaggggctttataataagtttcttctattattttctataacctttcaaaatcaaaataatataaagaaaacatttacttttctttaaaactgacatcagaaaatgacttccaaacattgcttctaaactgctttataaaagagttaatttactgtttttgtatacaaagatgtggccaaatcgatgaacatatcagcattcaaatgtgacaaattaggagccacatgggcagctggtggctcccagtaagccagattcttgtaagaaggttagcagttaggaagcatttaaaaagcattgaggaatataactcttttcggcagcaagacagcaggagggatcacctggagatgagctgctagaatgaggaaattgtctatgaaagagcggtcaagggcatgaacattaatacatgaaaacaaaatagaaaggaattattctttggaattcatgaaatatgatatgaactaaagtttctttaataattttgtattcactaagcctttaattttatatttatcaaacaaaaataaaatatttgacatatgttggttaaaatattattaattaattatccaaggtcctaaaagtctttgaaatcaaattttttatataataattactcgaaaaaagtcctattagatttgcaacctttattttatttgagaaaaaagttgattttgtattttcagacaatcagctacatataataactaacattatgtctactattttcctttcccaaatcaataagaatatgtgtatcaagaacatgatttttatgttttaagtatcttccttgagtctatacttcattaatgaagaaactcattaatttaaatagcaattaatagaataaaaataatacataaacgtaggcatgtccatatgtgcatatcattaggaagtgaatcaatttactgacgtgttatgaacaatttcaagaagatgtaatacaggagcagttctgtactttcagggaagaaaactagaatattgtacagagcactcgtgagctgatgaacagactgccctactttcccagggaagagaaggaaagaagtaggaagcagatggagatggcactttccaagttcacctggaaattctacctaggaatttttccaacatattttctggagatagtctgactatgcagggtttttggaggtccatggtaggctgtctctacaatggtctctgatattcctgcctcctgatattcatagcctcatcgaatcctctctccttaactacgggttagatttattaacccatttctaactaatagaacacagtagaactgatgttacttctaagattacgttctacaaagaatggtagcttctacctgagcgtcctctctagttctctcttggatccctcagttctaagaaagcaagctgccttgtcttgaggcactcctgagagatgcttatgtgagagggctggaaggcaagtcctctctcagttgaaccttgagaagcctgcagccccagcaaacaccttgactgcagcctggtgagagaccctgagtgagatctgcccatgtaagccacgcctagatcrctactccacagaaactgtgagacaagaagtatcttgttttcagccactaagttttgggatcatttgcttcatagtaatagataactaatacaaggcctttcctgatactgtaattcagaaaataaaatatacaaatttagtacatgaaaaaattcacctgtgccagtatgttttgttccctcatcaatttttgacgctctcggtttggcttagtgataaccacatccagaacttcttgtccattattaggcacatcagcaacaaa

SEQ ID NO: 685377 - DNA, 1362 bp, Homo sapiens
aaaaaaggcttaataggaaaccaatctttacataggaaatatgcaactcaaaatcttctctttctaatgttcggtaggaactcaatcaaaagcagatgatatatatacaaccgaacagagggccctgacagcagatgtgttggttaccagccctgcatttcacttcatcctttcctaaggatgctgccacaggtcctaggtatttggggttctgctcctttccttagagtcattcccatgcaatggcaacacttccctttgcaaagtcaatgacactgtcaagtctgccatgtagctgaagtccatatggaacatcctagggggtaaaacccccaaaattatttatctgaccacctgcttcagaaatttcaccatctcagatgcagtatctggggatttcaaagtttccaaagtcttcaagatgtccccgttaagatgaaaataactctgggagagaaaaatatcacaagctaattatcctcaaacctgggcctttggaatcacctggagagatttttcaaaaacacaaatgcttgggcctcattctctccatgtactaagtcagaatatctgaaatgggacctgggattttctattttattttcagctttctaaataattccatgcctgggtttgggaaccagggacttaggacattctcagttagttcagagattcttcagcaactcagaggtgttttgagggatgatgatttgggagacagaaaaggagagagcaggaatgggaaggttctggaaactttatggaaaggctcaaaaggacaagcatggtttcttctcagccttgtttcgccttgactaaaaaatggccatttgtaaaacaatatacaatatttcattacccttgccttatggaaatrtctgatctcattctctttctaatcatcaggaaatattgtgtcacattttatttatatccttttgttttcccctaatttataagatcaatggaacatgggtatgggggttggaataatcttctgaattcctgggagaaatcctcaaagggccttgggctccatcctcacttcctggaggagagatggaacttctgggagagtgactagttcctcaggaccaggcctgagtgagaaaggcaacctaaagcactctgcagcttccatcatctctgtgatcagaccttcagatcagagaccttttccttacatctgacttcatcttttcctcttaatattcaagtctgtttccccagctttctactctctggagatatggagaacagctgcttggggacctcctgatccctgaagctaaagaattctcccattaacattttttttccagacaaaataactctgatttccataaccttttttatggt

SEQ ID NO: 685378 - DNA, 649 bp, Homo sapiens
tggaatatatttgccagttaggcacacctggcttctcaaactttggaatcaaattggacactgccacctgcattttacgctctatgctaattttcctgtagcacttgcttttcacaaacagcaaccaccaaaaacctagctttacagaggtacaagctgatactgttgaaacggtgarctgctttgagctatgaattcttccagtggctgacagtcattgaacactgctgggttgcccttgaatattcagactgtctcccttactccaatttgtttgctgcaaggacccagggtgccttggcacacagtttgggaattgtgctaactcattccacttaattttcacactagcatagcacagtaggtatttatatacctgttttaccaaccagaaatgtgatgttagaaagtattgagccagtagttcctaaggaactgaactgggactcacaccgggtgtgtttgattctcaaatctgtactgtaatgatgaatctgtaatgacaatggcttccaatgtcacaaatatcgctacttccccaactcaattcaatatgaacaaagttattttattcagttttttatactatgtctcaaaagtcagaaacacttgcattgcagtagctcaaagcagaactaaattcaatcga

SEQ ID NO: 685379 - DNA, 1354 bp, Homo sapiens
tgactccaggtgaaatctggagatggttggagagtagctgagagagacagaagagtccctgagggctgggggtgagaacatgagggagacgggggagtaagtcagtgaaattcgtgagttcggtggtgtatcgtgggtgcctggaactgactccagctggaatctagagaagttttgagagtagctgaaggagacacaagagtccctgtgggctgagggcaaagacctgagagagaccagggaggacctcagtgaagtctgtgagtctgtaggtgattccggagtgtgggaggctgactcccgctgaaatctgggcgtggtgggagagtagctgggacagacaggagagtcccagggggctgggggtgaagacatgagagagactggggagtaactcagtgaaattgctgagttggttggtgatacctgggtgcctggaactgacccccgctgaaatctgggcatggttggagagtagctgggacacacaggagagtccctgagggctgggggtgaagacatgagcgagaccggggagtaactgagtgaaactggtgagtttggtggtgactccggggtgcctggaactgactccagctgaaatgtgggcgtggttggagagtagctgggacagacaggagagtccctgaggactggtgaagacatgagagagagtggagagtaattgagtgaaattggtgagtttggtggtgattcctgggtgcctggaactgactcccgctgaagtgtgggcgtggttggagagtagctgggacacacaggagagtccctgagggttggagakaaagacgtgctagagactgaggagtaactgagtgaaattggtgagtttggtggtgattccggggtgcctggaacggactccagctgaaatgtgggcgtggttggagagtagctgggacagacgggagagtccctgagggatggtgaagacatgagagagactggggagtaacgcagtgaaattggtgagtttggtggtgatttctgggtgcctgcaacggactcccgctgaagtgtgggcgtgcttggagagtagctgggacagacaggcgagtccctgagggttggagataaagacgtgctagagactgaggagtaactgagtgaaattggtgagtttggtggtgattccggggtgcctggaacggactccagctgaaatgtgggcgtggttggagagtagctgggacagacgggagagtccctgagggatggtgaagacatgagagagactggggagtaacgcagtgaaattggtgagtttggtggtgatttctgggtgcctgcaacggactcccgctgaagtgtgggcgtgcttggagagtagctg

SEQ ID NO: 685380 - DNA, 1354 bp, Homo sapiens
tgactccaggtgaaatctggagatggttggagagtagctgagagagacagaagagtccctgagggctgggggtgagaacatgagggagacgggggagtaagtcagtgaaattcgtgagttcggtggtgtatcgtgggtgcctggaactgactccagctggaatctagagaagttttgagagtagctgaaggagacacaagagtccctgtgggctgagggcaaagacctgagagagaccagggaggacctcagtgaagtctgtgagtctgtaggtgattccggagtgtgggaggctgactcccgctgaaatctgggcgtggtgggagagtagctgggacagacaggagagtcccagggggctgggggtgaagacatgagagagactggggagtaactcagtgaaattgctgagttggttggtgatacctgggtgcctggaactgacccccgctgaaatctgggcatggttggagagtagctgggacacacaggagagtccctgagggctgggggtgaagacatgagcgagaccggggagtaactgagtgaaactggtgagtttggtggtgactccggggtgcctggaactgactccagctgaaatgtgggcgtggttggagagtagctgggacagacaggagagtccctgaggactggtgaagacatgagagagagtggagagtaattgagtgaaattggtgagtttggtggtgattcctgggtgcctggaactgactcccgctgaagtgtgggcgtggttggagagtagctgggacacacaggagagtccctgagggttggagataaagacgtgctagagactgaggagtaactgagtgaaattggtgagtttggtggtgattccggggtgcctggaacggactccagctgaaatgtgggcgtggttggagagtagctgggacagacgggagagtccctgagggatggtgaagacatgagagagactggggagtaacgcagtgaaattggtgagtttggtggtgatttctgggtgcctgcaacggactcccgctgaagtgtgggcgtgcttggagagtagctgggacagacaggmgagtccctgagggttggagataaagacgtgctagagactgaggagtaactgagtgaaattggtgagtttggtggtgattccggggtgcctggaacggactccagctgaaatgtgggcgtggttggagagtagctgggacagacgggagagtccctgagggatggtgaagacatgagagagactggggagtaacgcagtgaaattggtgagtttggtggtgatttctgggtgcctgcaacggactcccgctgaagtgtgggcgtgcttggagagtagctg

SEQ ID NO: 685381 - DNA, 1354 bp, Homo sapiens
tgactccaggtgaaatctggagatggttggagagtagctgagagagacagaagagtccctgagggctgggggtgagaacatgagggagacgggggagtaagtcagtgaaattcgtgagttcggtggtgtatcgtgggtgcctggaactgactccagctggaatctagagaagttttgagagtagctgaaggagacacaagagtccctgtgggctgagggcaaagacctgagagagaccagggaggacctcagtgaagtctgtgagtctgtaggtgattccggagtgtgggaggctgactcccgctgaaatctgggcgtggtgggagagtagctgggacagacaggagagtcccagggggctgggggtgaagacatgagagagactggggagtaactcagtgaaattgctgagttggttggtgatacctgggtgcctggaactgacccccgctgaaatctgggcatggttggagagtagctgggacacacaggagagtccctgagggctgggggtgaagacatgagcgagaccggggagtaactgagtgaaactggtgagtttggtggtgactccggggtgcctggaactgactccagctgaaatgtgggcgtggttggagagtagctgggacagacaggagagtccctgaggactggtgaagacatgagagagagtggagagtaattgagtgaaattggtgagtttggtggtgattcctgggtgcctggaactgactcccgctgaagtgtgggcgtggttggagagtagctgggacacacaggagagtccctgagggttggagataaagacgtgctagagactgaggagtaactgagtgaaattggtgagtttggtggtgattccggggtgcctggaacggactccagctgaaatgtgggcgtggttggagagtagctgggacagacgggagagtccctgagggatggtgaagacatgagagagactggggagtaacgcagtgaaattggtgagtttggtggtgatttctgggtgcctgcaacggactcccgctgaagtgtgggcgtgcttggagagtagctgggacagacaggcgagtccctgagggttggagataaagacgtgctagagactgaggagtaactgagtgaaattggtgagtttggtggtgattccggggtgcctggaacggactccagctgaaatgtgggcgtggttggagagtagctgggacagacgggagagtccctgagggatggtgaagacatgagagagactggggagtaacgcagtgaaattggtgagtttggtggtgatttctgggtgcctgcaayggactcccgctgaagtgtgggcgtgcttggagagtagctg

SEQ ID NO: 685382 - DNA, 1323 bp, Homo sapiens
taaataaattataataatcaagctccagtgtttgaattaaagctttttgttgcatgatttgactgaatactgtaaaaacctcattaatttgtatgccattaatttgtaatttgtgataaagsaaaggcaggagaattggaaagaaaggggtgacctgactaaagggttttcttttttttctttctttctttctttttttttttcttttttgccctgcaaatctttttcatgaaagtgcaaatcagtactgtaaacaaggttgcagggggtcttatttaaaatacttaagaaaataaacttttcaaataccttttagaagcatcatttacatgcatacaatttatatgctaattacaaataactctggtctattcactggagtaattcccttgacaacatctactgggctttttggggttttttgctttgttttgttttttcgcctgtgttaagttactattgtacttgaaatttacaaaatgtgtgtccaccaacacattttatttaaatgattttgtttaattaatttaaatcagtaaaaatttcgctgcagcttctaagggtcactttactttttttctcttgctttctaatgtgatcctaaaatgctcaggaatttgctgttctctaaatcagagttcctaacagaggtgaggaaaccagcttcagggtggaggcagggggccacagactccagtcatagcctggagctgaaattagcttttatgagaattttttgagtttaggtgtgtgtgtgtgtgtctgtgcctgtgggtgtatatgtagatatgcacatacacatatagaaaaaacacagcaaacttgtaatcctggtgttcgttttaaatttccaaatcatttactatcagaggtcacaatccacaaacaaatcaaagatttttttccccccagtccagggccatcatgctccctgtgctggaaaaatggaatccaatattgaggtcgtatctgcaaaaacaaacaggttttccaactatccacaaaacaataggcatgtagctctgcactccgtccccagccaccctgcccccaaagagagtgctgaaaagccccgtgttctgaaaacaaaaacattttggagtgggaaggtgggaaaagcaatggaatccatttgatccctggcttggctgtgtagcacagccctgatgcactgtcaactgataagctcagcttctaatttatttactttactaattggtttacaaaataaaattaacatcagcaacaaacaccctccttcaaaccgtgtaaattacatattgcacctctcagaatataactttagatagtaatataattaag

SEQ ID NO: 685383 - DNA, 623 bp, Homo sapiens
tttctttcttttttttttttgagatggagtgttgctctgttgcccaggctggagtgtagtggcatagtctcggctcactgcaacctccgcctcccaggtgcaagtgattctcctgcctcagcctcccaagtagctgggactacaggtgcacatcaccacrcccagctaatttttgtatttttagtagagatggggtttcactatgttggccaggctggtcttgaactcctgaccttgagatccacccaccttggcctcccaaagtgctgggattacaagcatgagccaccgcccccggcctacattctcatgttttcaagttgataacactttgatattgtctatagtatattgcttaagaaaacttattcacaaagaattggccaaatgtatcagtcagttaacattttatatatatcaaacatacaaagcttaagagtattaattattaaaaacatttatgtagaaattttttcaaaagggaaatgaaagattgcagatatttatagaaatatttggtggctttttgattctagatatttatggaaatatttggtggctttttgattgcagatatttatagaaatattttgtggctttttcagaatcctctcaaaagggat

SEQ ID NO: 685384 - DNA, 623 bp, Homo sapiens
tttctttcttttttttttttgagatggagtgttgctctgttgcccaggctggagtgtagtggcatagtctcggctcactgcaacctccgcctcccaggtgcaagtgattctcctgcctcagcctcccaagtagctgggactacaggtgcacatcaccacacccagctaatttttgtatttttagtagagatggggtttcactatgttggccaggctggtcttgaactcctgaccttgagatccacccaccttggcctcccaaagtgctgggattacaagcatgagccaccrcccccggcctacattctcatgttttcaagttgataacactttgatattgtctatagtatattgcttaagaaaacttattcacaaagaattggccaaatgtatcagtcagttaacattttatatatatcaaacatacaaagcttaagagtattaattattaaaaacatttatgtagaaattttttcaaaagggaaatgaaagattgcagatatttatagaaatatttggtggctttttgattctagatatttatggaaatatttggtggctttttgattgcagatatttatagaaatattttgtggctttttcagaatcctctcaaaagggat

SEQ ID NO: 685385 - DNA, 623 bp, Homo sapiens
tttctttcttttttttttttgagatggagtgttgctctgttgcccaggctggagtgtagtggcatagtctcggctcactgcaacctccgcctcccaggtgcaagtgattctcctgcctcagcctcccaagtagctgggactacaggtgcacatcaccacacccagctaatttttgtatttttagtagagatggggtttcactatgttggccaggctggtcttgaactcctgaccttgagatccacccaccttggcctcccaaagtgctgggattacaagcatgagccaccgccccyggcctacattctcatgttttcaagttgataacactttgatattgtctatagtatattgcttaagaaaacttattcacaaagaattggccaaatgtatcagtcagttaacattttatatatatcaaacatacaaagcttaagagtattaattattaaaaacatttatgtagaaattttttcaaaagggaaatgaaagattgcagatatttatagaaatatttggtggctttttgattctagatatttatggaaatatttggtggctttttgattgcagatatttatagaaatattttgtggctttttcagaatcctctcaaaagggat

SEQ ID NO: 685386 - DNA, 599 bp, Homo sapiens
tgaaaagagaaaaatgaagtacaacctctatatgcagtctctggagggagaaatataagtctggtggatacaacgaaccaataagaaagtcagtgggagaaattggaattataagaattgtgttgaagacctaagtattgactagttgtktatgttggaccacattttaatttcacagaatttattttataaagagaaagttatgacagaattgtattttatctactttaatttttgctcttaactatgctattttttttctacagaatatttgaggcagtgatacacaaaaacaaataaaagatacaaacactgatacatatatcagtcttctaattataatggttggcttataaaatatgtggcatagtcattcccagtagataagatattatgaaaactttatcagtggaggtatgttcagtaagcagtaataattgttaattactgtataacattatttttcttaaatttagcaaggtattataaaatatgaaaaattctattttattttaaagtaaattttaaaaataaaatttagcttgaagttttgtattcagtgaatacaattctgtctgaggtgcattcttattacttcc

SEQ ID NO: 685387 - DNA, 608 bp, Homo sapiens
tgttaacgactcacattttcattgaatgaagaatgttcattaatatcacatctgcagagatattggcattttgtgtagctttttaggaaaaaaaataattattattctggaatacattgaactagtgttttattctggcttgtgaattaatttttagtgtttagaatatcagctttttattctagcattgttttgagtttaacccagtgccaaaagtcattactatattcttctttatgaattgcttttataaaagccctctaggaacaataaaaaaggacaaacattatacattgatgattcatatttctaagtaagtttctttgggcatttatgaagtacaaaagagagatcccatcattgcctggaactttctccagaaaagacaatactattggactcaaaacatgtctcaacaaatttttaaaaaataatatcgtatcaagtgtcttctcagacaacaatgggataaaaccrtaagtaaaaaacaagaattttggaaattgtacaaatacatggaaattgtacaatgtgctcctgaataaccagtgagtcaattaggaaatgaagaagaaaattgaaatttttcttaaaatgagtaaaaatgg

SEQ ID NO: 685388 - DNA, 998 bp, Homo sapiens
ccgcctatttctcccctaacatcaccaagaatctatatctgaattttcttttactgatcttttgtgtaggtaaaaaaaattaagttgataaagtgtgattgcatggatactgattatattttttgaatgaaggacttatatgtatgtattcataggcacatgtttatttatatgcacatgatatatgtatttacatgtctatttgaaattttaaataactcctctaatttttcaaaataacaagttttttttcaccatttaagttctttgcaatttacacactattacacaacttttcaagataggaactttggaggaaatctgactgcaacatgtgtccctaaagcaggaataaacagtttgttctctgtgaaacccatagcatcagcgttatagttcaaacttgaaaatgttagtattttaatgatattttgaatttcatcaaggctacatactcattaaaggtctttttaaagatagactatttgagaaatcatattatagagaactgttagaagtcccagtgctttaatgttaaattgaaagattagcatatgtaaagtatataaagtttaaacttttattgatattttgctctattctctatagcaaaaattttgtcagttttttatgcataatcgaactataaacattaaaacttaaaattctaacattgtttacatgaaagccaaggcagcagcctttagagtggacttgaccaccatgtcaagtatagatttrctcaatggtttaaagatattcactgatgatcctgtattagtccattctcatgctgctaataaagatatacccaatacagtttaatttataaagaaaagagacttaattgacttacagttttgcatggctgagggggcctcaagaaacttacaatcatggtggaaggggaagcaaacacgtctttcatcacatggcagcaggagagagaaggattagcaaagacgggcgaaagtcccttataaaaccatcagatcttg

SEQ ID NO: 685389 - DNA, 660 bp, Homo sapiens
acaagacagagtgaactcaggaatcctttttgagaattgcctctcacgctctaatgtctaagcaggtctaagtcacgctggaaccttcttcccaaatccttctcttcccttcacagcctcctaaatctcttcctccctttcttccctgctcttatcactctcctggcctttaaaatctaaactgacagtaggtgcaggaaaacaatgagagtggaaaaaccgatcaagtcagggatggagacccccgttcccttcgccgcgttgcccgacagtcgccaccccacacccgaggggtcggtgagcagcacggccccttcctctaacgtgtctgtctggttccggctccagagtaacgccagcctcagaatgaggtgggaagtgcctcctcttggcttctggaagagtctgtgtaaaactggtgtggtggagttcatgaagtcatttgggcctgaagttttcyctgcaggaagattgctagttactaattcctctaatagatacagtgttcattgtgttttgacgtttatgtcttcggtagtcgatgtcctttagaatgtgtttatgtccttggtagtcgatgtcctttagaatgtgtttatgtctttggtagtcgatgtcctttagaatgtgtttatgtctttggtagtcgatgtcctttag

SEQ ID NO: 685390 - DNA, 646 bp, Homo sapiens
gcaggaaagtgggagaattttagtctgagaagatttggaaaatccttaggaattgctgacttccaagttgtttcactaccatctgaaaaacccttacaaggctcgggctttcctggaaaacaggagatcaggctatttattttttatttttttattttttttcctgagacagggtcttgctctgtcacccaggctggaatgcagtggtacaatctcagctcactgcagcctcaacctcctgggctcaagccatcctcccacctcagcctcccaagtagctgggaccacaggtgcacaccaccatgtctggctaatttttacatttgtttgtagagatggggggtggtctcactacattgcccaggctggtcttgaacttttggcctcaagtgatcctcccgccttggcttcccaaagtgctgggattacaggtgtgagccaccatgcctggtcttaggtcagtttttaaaacaacagcaagattttttttatgttgtttctgccatgttttaggaattgcttttcctcccggggcttgcatgtttaaatttttattctcagaacrttgaagggacgcactgcatttcaggatcctgggtctccgtccgtgaaggactttccttctgtgggtctttcctcttgcagc

SEQ ID NO: 685391 - DNA, 607 bp, Homo sapiens
agtgagagacgtgtgacctttccttgcccttgaacttttacttgaaaacttggaggctgtcgtagggttcttaattggcctaatgtcagtatggttgtgtctcagggaatagggaggcctgagcccagggagagagatagagaatggctggtcagtggagcagtcaggacgcacccagctcttatccattcacttcatcttagatgggcacagttcgtggcaccccaaaacaatgacaacagtaaccccaaagatcacagatctccgcagcagatatgatagcaatgagaaagcttggaacatcatgagcattattgaaacgtgacacagagatatgaagtgggcacctgctgttggaaacgtggtgcccacagacatgcctggtgcagggttgccaaagacctcccstttgtgaaaagcagtgtctgaagcacagtgaagtgaggcttgcctgcaagacatccacaaaaggcgcagctctggagacaggagactgctgcgtgggaggaggtggtgctggaggcccttgggtgagggaagaggcaggagactgctgtgtgggaggaggtggtgctggaggcccttgggtgagggaagaggcaggaga

SEQ ID NO: 685392 - DNA, 1224 bp, Homo sapiens
tctactagaatttaagcaccatgagtcagaaacttggttctaagatggtgcatagtgggtattcaataaatacttgcaaatgaaggaattggtcattactttttcttccgttttaaaaatgagaaaaccaagactgtaaaaattaaatactttttcctaatgtcacagatattaaaaggcagaactgagatgcgaacccaagtttttctgatttaggagccgtttaaaactctattatataattttctgctagaataaattaacggaggacagaggcagagcataatcccccactcacaaaactgaaagaagaattgtctttgtagctatatagacttaggaagaaattccatgaattttattagattctcaaaggagttcttgagcccccaaattttaatcattgtctctttggttgctactatggcaacttacaatgttagagtctcaatacagtacgaaaaatttaaactgcttgctgactaaagcattatgttatccagtcctaaacataaacatttgtcaacactttaacttttctggatttaatacattttttcacaggccattgggcatccctatttgcctccatactggtctctgggatttcagctgtgtcgatggggttacaatagcctagatatgctgaaaaccacagttggacatttaagacaatatgatattccccatataaatgtactcaaacagtatggagggcattgagaggaacaaggaaatcagaaagtatagtaattatcctgtaatatatatgtgtgtggatgtggatgtgtgtgtgtataagagagagagacgtgtaactgtaatcattttcatatattatcttctcagttccaataaaataatcattttcattctctttttcttacaagataacccaaaactcacactaatatttaaatttctaattgaatgcagtcacttataagctacttgtgaatctgcaacaatatctgtttgtctgttttcctgatgttggaatctyatatctgtgttgctccttggtacaggatgttcagtattgtgatatcgactgcatggaacgtcagatggacttcatatatgatgaggacaaatttgatggtctgcctgagtacattaaggaactgaaaatgatggaatgcaatatatcattgttttggtaaatttcttttgaagatcaaacacaatattttaatttatattttctaagcatttctaaatata

SEQ ID NO: 685393 - DNA, 2330 bp, Homo sapiens
tgaactattatgtcacaaatactgaatacttaaacttacatcactgaatgtgtattgcacataaagtactcccttctttcaatagaatctacaaaacgaacattaactttagaaaataaaggtcaatgttatatttatttttttaaatttagattttgatcaactaagctccaagtccataagttgtcctaggttgtttacttagaatcctctgggggaaatttttttttaattgattaatcactggcctccaacttacatttttcatgatgttctttggaaaataaaaaataaagttaatctgatgaagtagacctcatcatcttaccatactttccactttttcctcattttcttctttcattttatatggaaaaataagagacaaggagctttgttttagacatgttttcaacactttcatttagcaaggagggatatggtataatgacattgtggacaacctcctcctgaagctctctatrttgtccatatatgcaaacacacaatcacagactgacatcggcatctctctctcccactgccaatattcttctgatttcaattcttgcctctaaaattcagaatctctttcaagtgttagatatttaatcagattatcctgagataattcgctgagagaaaaagaaaagaaaataaactaaaaagggacataaaagagttctggttatcatgaaaatccaggccctggggaggcttctgtaccttcccttaatttctatccagaagcaacgagccatattatctatatgtaagattaggagagtatcttcgtatttggcttcacattctcttgttcaatcttttcatcttttttattaaaatgattcttcttcttgcctgtctttctcactgatgatagatgtgaggtcaatgtggagaaagaagaaatgctttgagcagtaacctcagaagcattattgtctgtgatgtagtccctgaaaactcatttctgatttgtaaaatggggcctctttgaatatatttatcaatctatatagtaagtatgtatcattcttatcatgggagtcatttctgttgttctgaggaaatccttttcttgagacggggcctcactctgtcacccaagctggagtgtagcagtgcaatcatagcttactacagcctcaacctcctgggttcaagcaatcttcctgcctcagcctcctgagtagctgggactacaggcatgtgctgcgacacatggctaaatttttaaaaacagtttgtagagataagatctcactatgttgcccaggctggtcctgaactcctgggcccaagtgatcctactgtcttggtctcctaaagcattgggattacaggtatgagccgccatgccgggcctaaaagtcttccctaataatttactgatccatgacattagatcaaaggaaaacatggataaataaaagagaaataaataaacaaaaacactgatgttgtgcctttgctagctatatcttgacctgttttcttgggtcaagccgtatctttttcctctactacacatcattcaacgaagggttcaggtctgttcaccacagaacctcagtagtcccttctttctctgacttaacagctatacaactttccattcaaatccctactccttaagactggtgtcctcattcctcccaaaatgccaatgtattcatgagaagaaattttatatcagcactctagtaaaacagagaaatatgttctcctttcaggtaaccatagtgtattttgttatcaccttcctggagataatgtctcacctgtgttgcttaatccagaggagtgtcagggataaggaaaatttcatgttcctgtacagtaatgttgaaaaaagcagaattttgttaatgatgtttattacatcatatttattttgtgagcctaggtctccaataatgttaataaagtcatatagaaattcagaacatttcaactattgtgctgttagtctgcttaccaatagaatcaccatcatcccagaaaatggagccagatgcttcttcctgtttgtctagagcaattctgaggccaaaaggattcagacagctatagaggaagagtgaaaattgatattaattttctttcataagtgtgtattttcagggttagaaaagtctatctccagtcatcttatagaactatgcagaaaattgttgagttctttctgaaacatctttaccaaatcttcacttattatatttaccaaatgttcaagtttatctttgaatacctccaatgataagaaacttaaaatatccctaagcaacctattctacctctgaatagctcaatctgaaaaaaaaaaa

SEQ ID NO: 685394 - DNA, 2330 bp, Homo sapiens
tgaactattatgtcacaaatactgaatacttaaacttacatcactgaatgtgtattgcacataaagtactcccttctttcaatagaatctacaaaacgaacattaactttagaaaataaaggtcaatgttatatttatttttttaaatttagattttgatcaactaagctccaagtccataagttgtcctaggttgtttacttagaatcctctgggggaaatttttttttaattgattaatcactggcctccaacttacatttttcatgatgttctttggaaaataaaaaataaagttaatctgatgaagtagacctcatcatcttaccatactttccactttttcctcattttcttctttcattttatatggaaaaataagagacaaggagctttgttttagacatgttttcaacactttcatttagcaaggagggatatggtataatgacattgtggacaacctcctcctgaagctctctatgttgtccatatatgcaaacacacaatcacagactgacatcggcatctctctctcccactgccaatattcttctgatttcaattcttgcctctaaaattcagaatctctttcaagtgttagatatttaatcagattatcctgagataattcgctgagagaaaaagaaaagaaaataaactaaaaagggacataaaagagttctggttatcatgaaaatccaggccctggggaggcttctgtaccttcccttaatttctatccagaagcaacgagccatattatctatatgtaagattaggagagtatcttcgtatttggcttcacattctcttgttcaatcttttcatcttttttattaaaatgattcttcttcttgcctgtctttctcactgatgatagatgtgaggtcaatgtggagaaagaagaaatgctttgagcagtaacctcagaagcattattgtctgtgatgtagtccctgaaaactcatttctgatttgtaaaatggggcctctttgaatatatttatcaatctatatagtaagtatgtatcattcttatcatgggagtcatttctgttgttctgaggaaatccttttcttgagacggggcctcactctgtcacccaagctggagtgtagcagtgcaatcatagcttactacagcctcaacctcctgggttcaagcaatcttcctgcctcagcctcctgagtagctgggactacaggcatgtgctgcgacacatggctaaatttttaaaaacagtttgtagagataagatctcactatgttgcccaggctggtcctgaactcctgggcccaagtgatcctactgtcttggtctcctaaagcattgggattacaggtatgagccgccatgccgggcctaaaagtcttccctaataatttactgatccatgacattagatcaaaggaaaacatggataaataaaagagaaataaataaacaaaaacactgatgttgtgcctttgctagctatatcttgacctgttttcttgggtcaagccgtatctttttcctctactacacatcattcaaygaagggttcaggtctgttcaccacagaacctcagtagtcccttctttctctgacttaacagctatacaactttccattcaaatccctactccttaagactggtgtcctcattcctcccaaaatgccaatgtattcatgagaagaaattttatatcagcactctagtaaaacagagaaatatgttctcctttcaggtaaccatagtgtattttgttatcaccttcctggagataatgtctcacctgtgttgcttaatccagaggagtgtcagggataaggaaaatttcatgttcctgtacagtaatgttgaaaaaagcagaattttgttaatgatgtttattacatcatatttattttgtgagcctaggtctccaataatgttaataaagtcatatagaaattcagaacatttcaactattgtgctgttagtctgcttaccaatagaatcaccatcatcccagaaaatggagccagatgcttcttcctgtttgtctagagcaattctgaggccaaaaggattcagacagctatagaggaagagtgaaaattgatattaattttctttcataagtgtgtattttcagggttagaaaagtctatctccagtcatcttatagaactatgcagaaaattgttgagttctttctgaaacatctttaccaaatcttcacttattatatttaccaaatgttcaagtttatctttgaatacctccaatgataagaaacttaaaatatccctaagcaacctattctacctctgaatagctcaatctgaaaaaaaaaaa

SEQ ID NO: 685395 - DNA, 1373 bp, Homo sapiens
atcccacataaaaatgacagggatgatatgtgatggccttagacttaaatggtagccaagcaaaagatagaaaaggataatcacctctacacaggaaatctgatttattccttagtgtgggaaggtgagctgtgttacagatgcccaaggtattgttacagactcagaatagtaaagatggcacattcatatgttgtatcagtggaggatgataattattctctcaaaacaatgttaatgctacttttcaaaaggaaacttcagagtgggaagcaaaaccgtggcagctacccatgtgctttgagttgaggggagcctgttctctcaattcaacagacaagtggttttctttcgttttcygtcaggagatgaactcctcggcatgaaggcgttacaaatccagaaaagtaaagggacaaaatatcctgccacagagttaaaatgttgtcagtaaaggacagcaattaatctaatagtgttttttttttttttcaatttagtcatgaattaatttgttacaatcttttcttcaaaaggaatgaaacccaaataaacacatgtaaacagagaaaagtattcaaatatgtcctgaatatggcacattaatgaatactagtgggagaagcaatggtgtggaattcatattttcacggaaaaaggaatacatgtgtctgttccatctagatcatctaggtatatagatccctctttatttttataagaccataaagctttagtaatagattcaaaaattagaattgagggtatttctacaggaaatctcagctctgtcagactttttcaagcataatttgcaaagtagagttttgcaggtcatcctttaaatgcagtgcatctgtatgaagataggaagtgttcatcttttcctaaaccaaggaatttactcactgtctgcgcttcctcccaatatactgacatgtaacatggattctgaagacaaggctaaagataagaaaagggaaacatcaaaagttctgagagtaaattattattaaaacgaagtagtattcattatataatagctactttaaaaatcaccttaggcggctgggcacggtggctcacgcctgtaatcccagcactttgggaggccaaggcgggtggatcataaggtcaggagatcgagaccatcctgtctaacacagtgaaaccccgtctctactaaaaatacaaaaaattagcctggcgtggtggcgggcacctgtagtcccagctactcgggaggctgaggccggagaacggcgtgaacccgggaggcggagcttgcagtgagccgagattgcgccactgcactccagcctgggtgacagagcgagactctgtctcaaaaaaaaaaaaatttacctttggca

SEQ ID NO: 685396 - DNA, 694 bp, Homo sapiens
tcagtctatgcaaatttgtcttttctcctactttatgttttttaagaaaatcaaacaattcatcaagattttgaatgtattttcacagttactgaaagtcatctcttataattattctaatcctcagtatacataaatarttccctttctttttcctaattttgtgaatttgttatttctccctttttttctccactaggttaactgctagttcatctatttgttgttttgttcttggtttttccaaagaatcagctttgggatatctttacacatgagacctgttaaaatgttttctagtcctataagctttctgacttttattaatttctctttcagctttcttttatctgtggttctttttctacaaatgcttaactcatttatttttaagtcataaaaatgtataaaactatgacatttaagatatttcctttagtaagtacagcattgagggtctcacataggttttaacatttgttatttagatcataattattctttacatatctagcaataaggcttctatttactctttgacaaagagttgtttaggagataattttcttggcttccaggtaattgcagtttttctttttttatgtgtctgattttctttcttttttttctatttagtttctaagttaagtatattttagggagattgttttgtcacatttctacctatttctac

SEQ ID NO: 685397 - DNA, 694 bp, Homo sapiens
tcagtctatgcaaatttgtcttttctcctactttatgttttttaagaaaatcaaacaattcatcaagattttgaatgtattttcacagttactgaaagtcatctcttataattattctaatcctcagtatacataaataattccctttctttttcctaattttgtgaatttgttatttctccctttttttctccactaggytaactgctagttcatctatttgttgttttgttcttggtttttccaaagaatcagctttgggatatctttacacatgagacctgttaaaatgttttctagtcctataagctttctgacttttattaatttctctttcagctttcttttatctgtggttctttttctacaaatgcttaactcatttatttttaagtcataaaaatgtataaaactatgacatttaagatatttcctttagtaagtacagcattgagggtctcacataggttttaacatttgttatttagatcataattattctttacatatctagcaataaggcttctatttactctttgacaaagagttgtttaggagataattttcttggcttccaggtaattgcagtttttctttttttatgtgtctgattttctttcttttttttctatttagtttctaagttaagtatattttagggagattgttttgtcacatttctacctatttctac

SEQ ID NO: 685398 - DNA, 694 bp, Homo sapiens
tcagtctatgcaaatttgtcttttctcctactttatgttttttaagaaaatcaaacaattcatcaagattttgaatgtattttcacagttactgaaagtcatctcttataattattctaatcctcagtatacataaataattccctttctttttcctaattttgtgaatttgttatttctccctttttttctccactaggttaactgctagttcwtctatttgttgttttgttcttggtttttccaaagaatcagctttgggatatctttacacatgagacctgttaaaatgttttctagtcctataagctttctgacttttattaatttctctttcagctttcttttatctgtggttctttttctacaaatgcttaactcatttatttttaagtcataaaaatgtataaaactatgacatttaagatatttcctttagtaagtacagcattgagggtctcacataggttttaacatttgttatttagatcataattattctttacatatctagcaataaggcttctatttactctttgacaaagagttgtttaggagataattttcttggcttccaggtaattgcagtttttctttttttatgtgtctgattttctttcttttttttctatttagtttctaagttaagtatattttagggagattgttttgtcacatttctacctatttctac

SEQ ID NO: 685399 - DNA, 694 bp, Homo sapiens
tcagtctatgcaaatttgtcttttctcctactttatgttttttaagaaaatcaaacaattcatcaagattttgaatgtattttcacagttactgaaagtcatctcttataattattctaatcctcagtatacataaataattccctttctttttcctaattttgtgaatttgttatttctccctttttttctccactaggttaactgctagttcatctatttgttgttttgttcttggtttttccaaagaatcagctttgggatatctttacacatgagacctgttaaaatgttttctagtcctataagctttctracttttattaatttctctttcagctttcttttatctgtggttctttttctacaaatgcttaactcatttatttttaagtcataaaaatgtataaaactatgacatttaagatatttcctttagtaagtacagcattgagggtctcacataggttttaacatttgttatttagatcataattattctttacatatctagcaataaggcttctatttactctttgacaaagagttgtttaggagataattttcttggcttccaggtaattgcagtttttctttttttatgtgtctgattttctttcttttttttctatttagtttctaagttaagtatattttagggagattgttttgtcacatttctacctatttctac

SEQ ID NO: 685400 - DNA, 1130 bp, Homo sapiens
taagtaaaacatccwatgtatatacttggaaaaaaattaagcaaaaataatagataagtaaatatggaaaattttaacaattgctaaatataagttttgaatgtataaaagtttattatatgattttatctactcttcatgacaaaaagtaaagcaaaaatccttaaatataatgaaaatatatattattaaatcgtagccagatattgcctgcagaagacctaagcctaaggcttactctttctttactgaaatggatgaatatcacagactagcaccaaacgaagacactttccttgatgtaatcagaagtaaagagcaagcaaagtggggaaagaggaataacataacttaggacagccgtctgctgtgacaactcattacacactgagcatctgtctattcaccaaacttgaaacatatctcaaaatgtatttcaaggaatcaagacaaaagccaactgaatgagacttgataaccagaaatgccttcctttagagataacaaagtgtttattagtacgcaacttcttggcacgaccaaaggcagactgcagtgcacttactttttgcttgcctcacagacatctgtaatattggagaaaagatggtgcctctcggttttagtcattgtatcactcagttctttagaatttttaaacattcgtatcaagatctccaagctgagtaaatatgaatgttcagaggatatgacttcaaagatagcctggtaagaaggaaaaagaaatgtattattaattcttttaattaaagaactaaatatagctctcataattttgctgtaagaataacaagatactccacttttcaggtatagtatcttggaaagtacaaaaagaacattaaagaaacaacatcacaaaactactctctttatataatatacatttacccaaatcttaaaaaataatcactatctgtaaatatgaaaaaaatgaaatcatgtggatgacttgacatcacatcctgaggtcatgcctttgccaaggggtagaatctatggaaggaagcgagggcatgtcataaaatctcagtgagacattaattaacctttggggtcatctcctccagccctgctttcaaagcatgctgctttagggacagtaagga

SEQ ID NO: 685401 - DNA, 1130 bp, Homo sapiens
taagtaaaacatccaatgtatatacttggaaaaaaattaagcaaaaataatagataagtaaatatggaaaattttaacaattgctaaatataagttttgaatgtataaaagtttattatatgattttatctactcttcatgacaaaaagtaaagcaaaaatccttaaatataatgaaaatatatattattaaatcgtagccagatattgcctgcagaagacctaagcctaaggcttactctttctttactgaaatggatgaatatcacagactagcaccaaacgaagacactttccttgatgtaatcagaagtaaagagcaagcaaagtggggaaagaggaataacataacttaggacagccgtctgctgtgacaactcattacacactgagcatctgtctattcaccaaacttgaaacatatctcaaaatgtatttcaaggaatcaagacaaaagccaactgaatgagacttgataaccagaaatgccttcctttagagataacaaagtgtttattagtacgcaacttcttggcacgaccaaaggcagactgcagtgcacttactttttgcttgcctcacagacatctgtaatattggagaaaagatggtgcctctcggttttagtcattgtatcactcagttctttagaatttttaaacattcgtatcaagatctccaagctgagtaaatatgaatgttcagaggatatgacttcaaagatagcctggtaagaaggaaaaagaaatgtattattaattcttttaattaaagaactaaatatagctctcataattttgctgtaagaataacaagatactccacttttcaggtatagtatcttggaaagtacaaaaagaacattaaagaaacaacatcayaaaactactctctttatataatatacatttacccaaatcttaaaaaataatcactatctgtaaatatgaaaaaaatgaaatcatgtggatgacttgacatcacatcctgaggtcatgcctttgccaaggggtagaatctatggaaggaagcgagggcatgtcataaaatctcagtgagacattaattaacctttggggtcatctcctccagccctgctttcaaagcatgctgctttagggacagtaagga

SEQ ID NO: 685402 - DNA, 1130 bp, Homo sapiens
taagtaaaacatccaatgtatatacttggaaaaaaattaagcaaaaataatagataagtaaatatggaaaattttaacaattgctaaatataagttttgaatgtataaaagtttattatatgattttatctactcttcatgacaaaaagtaaagcaaaaatccttaaatataatgaaaatatatattattaaatcgtagccagatattgcctgcagaagacctaagcctaaggcttactctttctttactgaaatggatgaatatcacagactagcaccaaacgaagacactttccttgatgtaatcagaagtaaagagcaagcaaagtggggaaagaggaataacataacttaggacagccgtctgctgtgacaactcattacacactgagcatctgtctattcaccaaacttgaaacatatctcaaaatgtatttcaaggaatcaagacaaaagccaactgaatgagacttgataaccagaaatgccttcctttagagataacaaagtgtttattagtacgcaacttcttggcacgaccaaaggcagactgcagtgcacttactttttgcttgcctcacagacatctgtaatattggagaaaagatggtgcctctcggttttagtcattgtatcactcagttctttagaatttttaaacattcgtatcaagatctccaagctgagtaaatatgaatgttcagaggatatgacttcaaagatagcctggtaagaaggaaaaagaaatgtattattaattcttttaattaaagaactaaatatagctctcataattttgctgtaagaataacaagatactccacttttcaggtatagtatcttggaaagtacaaaaagaacattaaagaaacaacatcacaaaactactctctttatataatatacatttacccaaatcttaaaaaataatcactatctgtaaatatgaaaaaaatgaaatcatgtggatgacttgacatcacatcctgaggtcatgcctttgccaaggggtagaatctatggaaggaagcgagrgcatgtcataaaatctcagtgagacattaattaacctttggggtcatctcctccagccctgctttcaaagcatgctgctttagggacagtaagga

SEQ ID NO: 685403 - DNA, 623 bp, Homo sapiens
caaaacacgaaactctatacagactttctttaatttcttgcccgactccccaaaaatatcacttatcaagtacctataatatgcctgaaaactagtcatacattttataaaggtctcatgagtcctcctaattccccctaaggaaagcattatcattgactctctattatagmtgagatagtgcagagtaggtaacagcacagccaaggccacagagatcctgaagggcaaagacagggctgaacctgggtctgtgtagactgaaagcctcacacaccactgtgtcttatactttcctacattcttagcaagttcatgacaggggtatcggtacaaactgaaaaaagtcctcagtgtcaaaggccaagaatagcaaatatttagaaataggcataaattcttgtttctaaaaagctataaaaaggcatataaaaacaaataatcatggattaagtataaaataaaatgagctaacaaaaaagaaaaccttctttcttttaaaaaaggaaaaagtttttctcatagttaattgtacttgactgaaaacaaagccaatgtgcaatgaaagtgccttgccagacacctggcatagagaaaacattcaataaatgtaatgctctctg

SEQ ID NO: 685404 - DNA, 463 bp, Homo sapiens
tctaatcctcatytgaaataaataaatcatgtacttttggaggaaattgttattattactattattattttgaggcagagtcttgctctgtcacccaagctggagtacagtgacgcgatctcagctcactgcaacctgggcttcccaggttcgggtgattcttatgcttcagcctcccaagtagctgggattacaggcatgcaccacctcacccagctaatttttgtatttgtagtagagatgggtttttgccatgttggccaggctggtcctgaactcctgggctcaagtgatccacttgtcttggcctcccaaagtgctgggattaggggtgtgagccaccacgtcaggtcctggaggaaatgaaaatattcggagattctaccatatggcaacatctctagcgccacagaaacaccaaagggaagtatcatttgaatgattgtttttctttagtcaggta

SEQ ID NO: 685405 - DNA, 652 bp, Homo sapiens
tgggactacaggtgtgcgaccattcctggctaatttttaatatttgtatagagacacagtctcactttgttgcccaggctggtctcaaattcctggcctcaagtcatcctcccacttaggcctcctcaagtgttgggattaccggcgtgagccaccgtgcctggccagtattgtcttgattattgtaattttgtagtaagttttgaaattgggaaatgtaagtcctcctgctttgttctagttccagattgttttggctcttctgagtcctttgcatttccaaataaattttaggacctgcttgttggtttttggaaaagacccactgggattgagatggagattgcattgaatataatgatcaatttggggagagttgccattttgatagtattgattcttccaatccrtgtacatgaggtggtctcttcatttattttcatatttcctttaatcatttaaacatgttgtacactgacacacacaacagacacacacacacacacacacacacacacacactctttctcaatttggtaaccagccttatcatgctttcctatttcttccttctcttcatcctgatgccttccattttaaaattatgtctcacataataatcctcttacttggatttattccttttctcccc

SEQ ID NO: 685406 - DNA, 656 bp, Homo sapiens
tgatggcaagatcaatggactaaagtagaaattcttaaggcagttatgttgaagaagataatgttcacttagatttttatgttttgggtattaattaatatgagctttattataatatttgaaattacttcctagagtaatttagtaacttgatattttataataataacattttgaaacatttcaagaatatgccctagatatatggaaaataagtcacaaattcaacaataagatagataagagatggagaaccacaattacagaagaaccaggaggtattctcccccaagatcaacatgaaataagatctcatgaaaacagcaaaataaaggacagttaaaggtggcagagttaccgaaaacctcactttgatacacaaaaagtgtcagcaatctgttagagcacagaaatagtgattgcccctttcrctacaacatggaaagattccacttggctttgctagttgctttctgtctctccatatgggaaaaatataactaactggataattttcaaccagcaaaaaaaggtggagcataaattctaaaaataagtatgatataaaaatgctgaaatgctaaaaatgttcgataagttataaatgggaaaacagataagaaaagacatagtaaaagatttttacagctatgtga

SEQ ID NO: 685407 - DNA, 612 bp, Homo sapiens
ggccaatggtgaagagggtaaaagttggaggcggaggttttttagctagactggtgagagaatcctctctgggaagtgatatttgagaagatccagaaacaatccagaagctttcaaggaaaaagagtgttttagtcagtgggaacagacatgtcgttatctaaagagacattccaatctgagagaagacaaaggtcaaagacttaaatcaagagtgtgcttagcatgtttgaagaagaacaygaaggccactaaggctacagaatacgaaacaagaggaagagtgatcagataggctttcagaaaggtaaccaggatccaagtccttgccttagatgttatggaaagtctttgggggattttgaacaagggagtcttaaattcagttttctttttaaaaatgtcattctgttgctctatagataatttttaaaaatcattcttttgttacgtggatagtagagtagtagatggttgcagtggtgaggattggaaaagataagtgatcatgacaatggatgaaactcagaaatttaatgatgtgtgatcatatagatactttttttgtttttttcaagaaagcgtctcactgttacctaattggaatgcaat

SEQ ID NO: 685408 - DNA, 612 bp, Homo sapiens
ggccaatggtgaagagggtaaaagttggaggcggaggttttttagctagactggtgagagaatcctctctgggaagtgatatttgagaagatccagaaacaatccagaagctttcaaggaaaaagagtgttttagtcagtgggaacagacatgtcgttatctaaagagacattccaatctgagagaagacaaaggtcaaagacttaaatcaagagtgtgcttagcatgtttgaagaagaacatgaaggccactraggctacagaatacgaaacaagaggaagagtgatcagataggctttcagaaaggtaaccaggatccaagtccttgccttagatgttatggaaagtctttgggggattttgaacaagggagtcttaaattcagttttctttttaaaaatgtcattctgttgctctatagataatttttaaaaatcattcttttgttacgtggatagtagagtagtagatggttgcagtggtgaggattggaaaagataagtgatcatgacaatggatgaaactcagaaatttaatgatgtgtgatcatatagatactttttttgtttttttcaagaaagcgtctcactgttacctaattggaatgcaat

SEQ ID NO: 685409 - DNA, 590 bp, Homo sapiens
agctgtaaaatagactggccaacatagtgaaaccagtctctactagaaatacaaaaaaattagccagatgtggtggcaggcacctgtaataccaggtactcaggaggctgaagcaggagaatcgcttgaacttgggaggtggaggttgcactgagccaagatcrcgccattgcactctagcccaggcaacatcacgagactccatctcaaaaaaaaaaaaaaaaagctgtaaactaatgaatttttaattttttaccataacaatttttaatgattaggaaagttcacaaatgaaattaaaaggcactaatgaaattaaaaggaaacctgggaactaatatttggtacatgcaacaaagaagatgctgattttcttaacatgcaaagagttgtaacaattaaatgtgggaaagatggcctatttgcataaaagacctgaaaatgcagtttatcagagaagaaatgcaaatggctaataaacctgtaaaaataattttccacccattcccttgcactctgatgacatttttctagtgctcgcttgatgtctgtgtgttttgctattctttttattcttttcctgaattatc

SEQ ID NO: 685410 - DNA, 980 bp, Homo sapiens
caagcaattctcttgcctcagcctcccgagtagctgggactacaggcgtgcgccaccatgcccagctaatttttatattttagtagagatgaggtttcactgtgttggccaggatggtctcgatctcttgacctcgtgatccacccgccttgacctcccaaagtgctgggattataggcgtgagccactgcgcccgcccggaaccagtattttaacttaggtwtttcttaactcctaattgtgtgcttcagcatcacaaatatgacctctgttctttttgtcaatttataaaaggtggccttactttttccttgggtggctcttgctcttttccatctttatttgctatttatcctacttctttaacaaatagttgagcacctgctatgtgccaggcattattacaggtgctaggggtccaacacttaatcagacataaaaaagcctgccctcatgaaccttaggttctagtttacattatacttaaattaccaaaatatatgtcaagcggttataggttctatggagtgcagggcgttggagggaggaattttggtactttattgtcaatgggaattagaattaaagtctgaaggatgaagaattagagtaagggactttttatggtaactgatgtaagtagggattaaaaagaaatcccttatggtcttgagacagaggttgtgaatctctagattttgccagaagtgcagcaagttctggggtacctcttcattgtggaggccagggaatgggtggttttatctatgtttgtggagctgatggactactccctcttcacttctgtctatggaggccagagaaaaggaatcttattgtataatttttcctttactacttagtgttttgataaacctcattcctgctgagtgattcagttactttcagttgccaaaacaaataataaagtattttataaagtgtattttcctatcaccttctcaaagaaagtaggtgga

SEQ ID NO: 685411 - DNA, 980 bp, Homo sapiens
caagcaattctcttgcctcagcctcccgagtagctgggactacaggcgtgcgccaccatgcccagctaatttttatattttagtagagatgaggtttcactgtgttggccaggatggtctcgatctcttgacctcgtgatccacccgccttgacctcccaaagtgctgggattataggcgtgagccactgcgcccgcccggaaccagtattttaacttaggtatttcttaactcctaattgtgtgcttcagcatcacaaatatgacctctgttctttttgtcaatttataaaaggtggccttactttttccttgggtggctcttgctcttttccatctttatttgctatttatcctacttctttaacaaatagttgagcacctgctatgtgccaggcattattacaggtgctaggggtccaacacttaatcagacataaaaaagcctgccctcatgaaccttaggttctagtttacattatacttaarttaccaaaatatatgtcaagcggttataggttctatggagtgcagggcgttggagggaggaattttggtactttattgtcaatgggaattagaattaaagtctgaaggatgaagaattagagtaagggactttttatggtaactgatgtaagtagggattaaaaagaaatcccttatggtcttgagacagaggttgtgaatctctagattttgccagaagtgcagcaagttctggggtacctcttcattgtggaggccagggaatgggtggttttatctatgtttgtggagctgatggactactccctcttcacttctgtctatggaggccagagaaaaggaatcttattgtataatttttcctttactacttagtgttttgataaacctcattcctgctgagtgattcagttactttcagttgccaaaacaaataataaagtattttataaagtgtattttcctatcaccttctcaaagaaagtaggtgga

SEQ ID NO: 685412 - DNA, 980 bp, Homo sapiens
caagcaattctcttgcctcagcctcccgagtagctgggactacaggcgtgcgccaccatgcccagctaatttttatattttagtagagatgaggtttcactgtgttggccaggatggtctcgatctcttgacctcgtgatccacccgccttgacctcccaaagtgctgggattataggcgtgagccactgcgcccgcccggaaccagtattttaacttaggtatttcttaactcctaattgtgtgcttcagcatcacaaatatgacctctgttctttttgtcaatttataaaaggtggccttactttttccttgggtggctcttgctcttttccatctttatttgctatttatcctacttctttaacaaatagttgagcacctgctatgtgccaggcattattacaggtgctaggggtccaacacttaatcagacataaaaaagcctgccctcatgaaccttaggttctagtttacattatacttaaattaccaaaatatatgtcaagcggttataggttctatggagtgcagggcgtyggagggaggaattttggtactttattgtcaatgggaattagaattaaagtctgaaggatgaagaattagagtaagggactttttatggtaactgatgtaagtagggattaaaaagaaatcccttatggtcttgagacagaggttgtgaatctctagattttgccagaagtgcagcaagttctggggtacctcttcattgtggaggccagggaatgggtggttttatctatgtttgtggagctgatggactactccctcttcacttctgtctatggaggccagagaaaaggaatcttattgtataatttttcctttactacttagtgttttgataaacctcattcctgctgagtgattcagttactttcagttgccaaaacaaataataaagtattttataaagtgtattttcctatcaccttctcaaagaaagtaggtgga

SEQ ID NO: 685413 - DNA, 723 bp, Homo sapiens
  misc_feature 622, 623, 624, 625, 626, 627, 628, 629, 630, 631, 632, 633,634, 635, 636, 637, 638, 639, 640, 641, 642, 643, 644, 645,646, 647, 648, 649, 650, 651, 652, 653, 654, 655, 656, 657,658, 659, 660, 661, 662, 663, 664, 665, 666, 667, 668: n = A,T,C or G
  misc_feature 669, 670, 671, 672, 673, 674, 675, 676, 677, 678, 679, 680,681, 682, 683, 684, 685, 686, 687, 688, 689, 690, 691, 692,693, 694, 695, 696, 697, 698, 699, 700, 701, 702, 703, 704,705, 706, 707, 708, 709, 710, 711, 712, 713, 714, 715: n = A,T,C or G
  misc_feature 716, 717, 718, 719, 720, 721: n = A,T,C or G
ggatggggaataaattatcctggtgaacgaaagcttcagatgattctcaaatagaggattctgaaagagtctctgataatgtgaagtcctacaccatgagcttaggaaattgtaagatgatatttggcttagggtaaaactaggtgctgtcttagtaacgtcactgtgcttgagaagattcttacctttgatggatgactggattgtatgaattcttatgttccttacatatttgatattttatagtgctaggaatagtggttgtcataattttcaaagagtgggaagaaggcaggctaaccagagggtaagttggaatcccaagggaagagaagaatttctggggtactgaggaatgcagaccgtttgatgctcttctttcttcatcttatgctgcrcttcagttccaagactaaatatgctgtttctattgcccctgccatcttgaagctttgtacttttaataccataacccataacccatctgattcatgcatcctccattgttattcccaacttgagctttacttcattttaggtagaatcttccctatgagagtgcagggtaaattaaaaagttatatagagaccaaaaggaatacataatctagtactttaatgnnnnnnnnnnnnnnnnnnnnnnnnnnnnnnnnnnnnnnnnnnnnnnnnnnnnnnnnnnnnnnnnnnnnnnnnnnnnnnnnnnnnnnnnnnnnnnnnnnnncc

SEQ ID NO: 685414 - DNA, 647 bp, Homo sapiens
catatattatgcctcctcttgtccctctcctctaccaatcaatattcagatagtgggatgctcataattctagttgttgatycattatttaccactattttaagatttgttttttgatcactgtacatcctacataggttttaaagtaagttaccattggaagttttagtaaatacatttgataattctttgaaaagaattataaaaactactgaaagaaatggtagaaaaatctaagtaattgtatatctgttgaaaacattgaattttattatttaccacatgtaagtagtacatttagattcccatctaatagagggaggaaatcagaacacttatttggctctctcacttataaacctggttatttgtgggaagtcagctctagtccaattgtcactgttttaaacttttatattttctttacctttgatattctatagtttcgatgtgatgtgtttaggtgtgggcatttttatgtttatcctgttgcttggaatttatgcttctaggatttgtggttttatcacttttgtctggaaaagtttcagcccatagctcttcaaatattggctcttccttattctctttctgttccccttttggaacttgagtttcttgtacacttattgtgtccttgatacctt

SEQ ID NO: 685415 - DNA, 647 bp, Homo sapiens
catatattatgcctcctcttgtccctctcctctaccaatcaatattcagatagtgggatgctcataattctagttgttgattcattatttaccactattttaagatttgttttttgatcactgtacatcctacataggttttaaagtaagttaccattggaagttttagtaaatacatttgataattctttgaaaagaattatmaaaactactgaaagaaatggtagaaaaatctaagtaattgtatatctgttgaaaacattgaattttattatttaccacatgtaagtagtacatttagattcccatctaatagagggaggaaatcagaacacttatttggctctctcacttataaacctggttatttgtgggaagtcagctctagtccaattgtcactgttttaaacttttatattttctttacctttgatattctatagtttcgatgtgatgtgtttaggtgtgggcatttttatgtttatcctgttgcttggaatttatgcttctaggatttgtggttttatcacttttgtctggaaaagtttcagcccatagctcttcaaatattggctcttccttattctctttctgttccccttttggaacttgagtttcttgtacacttattgtgtccttgatacctt

SEQ ID NO: 685416 - DNA, 647 bp, Homo sapiens
catatattatgcctcctcttgtccctctcctctaccaatcaatattcagatagtgggatgctcataattctagttgttgattcattatttaccactattttaagatttgttttttgatcactgtacatcctacataggttttaaagtaagttaccattggaagttttagtaaatacatttgataattctttgaaaagaattataaaaactactgaaagaaatggtagaaaaatctaagtaattgtatatctgttgaaaacattgaattttattatttaccacatgtaagtagtacatttagattcccatctaatagagggaggaaatcagwacacttatttggctctctcacttataaacctggttatttgtgggaagtcagctctagtccaattgtcactgttttaaacttttatattttctttacctttgatattctatagtttcgatgtgatgtgtttaggtgtgggcatttttatgtttatcctgttgcttggaatttatgcttctaggatttgtggttttatcacttttgtctggaaaagtttcagcccatagctcttcaaatattggctcttccttattctctttctgttccccttttggaacttgagtttcttgtacacttattgtgtccttgatacctt

SEQ ID NO: 685417 - DNA, 647 bp, Homo sapiens
ttgatttaaaaaaactattttaaacatattttgttttttatttgtaaaaaagatatatgatttatgattatgggcaagatttatgattatgggcaagaactgaagagataatcacagatatgtataagtatcagtgtagtatagtgtaatgaaaaaaaaccctggaattatgaataagtataattaaatttattattgcctattgaatgtttaccatatgccaagagctatttgaaaatctttatacgtataaaccaatttaatcctcacaagtagttaaaattgtgtccctcactttatagataaagaaaggtacatgaaaaaaggactagttgatccaatgtcacacaactaataattggtagagataagatttaaatagaacratgctttaattgtctaaattttaacagtatgaaaagtatagtcctcaaattcctacaacacagtgtcaccgttgactcagacaaataaatgtatcttaatgaaaattatttctaattagattattttagtcccaccattagagctctgcttctgatacacttcttatctatttaaatgacaaacaagaatagatgttaataacaaatgggacagcagaatgttggcaacaaaattagaatcatgcttccaagatactaaaa

SEQ ID NO: 685418 - DNA, 580 bp, Homo sapiens
tggtgcaagcctgtaaccccaactattcgggaggctgaggcaggagactcacttgaacctgggaggtggaggttgcagtgagccgagattgtgccattgtacgccagcttgggcaataagagcgaaattccatctaaaaaaaaaaagccggcatcatctgccagataagtgagtgaagtcatatccaggtgattccagcccccaatcgttgcattacccacagcctttgagtcttcctgactgaggtttcagatatggtggagtgaagacaatcatccatacccactgtacccaatctgaattcctaacccrgagaatctgtgagcataataaaatggtcattttatgccactaagttttcaggtaatttgttacacaataatggtaactgggacatatatgttacctacaagccatattaatgacaatactctcaatttcttataaatttcccctggataaaaccatacaataagcctcatgtattttcaaagtagtcttcaaatgtgaaagaagaataatagcaaatgaccctaaagggaaccaagatatgaaaaagttacaattcatatattaatag

SEQ ID NO: 685419 - DNA, 674 bp, Homo sapiens
tgcctttgtgttgtcattattactgtatgcgtcaattaccactcctagatgggtaagctccttgagtccgcgggatatattgcaccacttattggtagtagacatgcaggaaaagtgcgaatgagtgaatgaatggattaatatgaataaatgaaccagtgacattctaagagtctctgccaggaagcagtgttgttatgacttagccaaggatctttcctcttagagttgctaataaagtgggaaaatgagctcagatataatctgaagtggagctttgaacacaaacagtacatgacaaacctatacgtggtgagcacacctattttgctgtggtcttctctttaccaatgtttctttaatttccctttccatgccagtacttcttgcaggccacgttagctctggggcaatcagatagatatgtctcacctttttcttttgctatctgacagttctttcatttggaatgctgaagagacttttcaatctttgtccaccttttacagatatagcaaatcctttagctgttggtaagccattggccacactggtctccttgtcatcttctcattgtttttaatcttctyatgtctatggcctccttgaccactgtgttctaattggagcagcaaggaaattctttttgaaggaggtcacactggctgtcctga

SEQ ID NO: 685420 - DNA, 588 bp, Homo sapiens
agacaagacagtaatgtgatagagtgacggattggggcagcagaggtgggcagtgacttcagattaagggttcagggtaggcctcagaggaggcgacacttgagatgagacttgagggagccaaccgctgagatcaagaaggtaggargaaagagcaagtccagaagtcctgaggctggaacaaccttgagtgtttcaggaacaaaggggagtttgggaggaggcaaaggctagagaggcatgaaccaagtggtgggttgtgggagaggaacaggggccaggtcctgcatggccttttaggcatgtggaagcatttgtattttgttcccactatgaaaggaagtcacagggatttgagcaggagtcaggctcggtcagatttgcatttttagaaggacctttatggctgttgtgaggggcgtggactgtaggaggcaagagtgaaggcaggaaaccaatgaggaggctgtggcagtaattcctgccaggggtgctggtggcttgagccagcggaactggagaaattcaggaaagtggctgacagcttgctgatgggttgggtgttggaggtaagagaatgaggtatat

SEQ ID NO: 685421 - DNA, 664 bp, Homo sapiens
tttccctcacaaccagactgtaagctctctgggcatggtcacctctgcatcccagaattgcctggcacaggcacagagtagatgagcaatgaatcttttttttggaaacagagtctcgctctgttgcccaggctggagtgcaatggcgcagtctcggctcactgcaacctccgcctcccaggttcaagtgattctcctgcctcagcctcccaagtrtctgggattacagacacacactaccatgcctggataatttttgtacttttagtagaggtggggtttcaccatgttgtccaggctggtctccaactcctgacctcaagtgatccacccgcctcagcctcccaaagtgctgggattacagcttgagccaccacgcccggccaggcaataaatatttgaacaaatgaatggaagactggaagggaggtctgaaggaagcatcaccctctctgcttcaccggtgtcctgccaattctaggctttcacggagacgcagaagaaacggctgctatcctggaaacagcaagtgctgaagctcctccggacattcccgcgcaaagccgcactagagatgcagaactaccggcagcagaaagggtaggcgggtggccaggttacagggacctgccctccataggcctttgctggttagcagatcgtg

SEQ ID NO: 685422 - DNA, 946 bp, Homo sapiens
tatgattcttggattcatcgtgagcccagacctgacacagccccaaggactcgtcctgatgccgggaccctgtcccagtgtttgggcttcatccaggtcctctgactcccatccgctatgcccctccctcactcggggtcctcccatccgctatgcccctccctcactcggggtcctcccatccgctatgcccctccctcactcggggtcctcccatccsctatgcccctccctcactcggggtcctccctcccagtcgtgatccctgatccttgcccaatgtcacaaccccacgtaccagcctggacaggacactacgaagctccgaggtttggattaggaaatagaccctccaaccaatcaatgccccctgcctgtcccccctgcccctgacctgctgaactcgtagatgtcctcaatgttggcaaacagcgtgcccacctgctccacgctcagccccaggaccccgccgtccagcagagggcccaggtagtcctgttgggatgactggggttatgggggccaaggggctggcctgggtacccactgccctctggtgtctgcccgccttacctccacgatgctgcggaggtccctgacataggcccgttctgtctccacgatctcccgggccacacgctccagccttgagggtctggctgaacctgggatccccaccggagagagatgtaggcggatgggaggccctggaaggggctctggcctggaggctgagcaggctggagtgggcccaggggctggatccccctcagagcccactgtgctcagggatgtggagctcccagaacctcggggggaggccatggtgggggctgcaggagctgctggggtgtggaacaggaggtcagagaaatctccccatgcacggacttccacagcctttcatgcgttcagcccacaccctcacccacacctgtccaacagc

SEQ ID NO: 685423 - DNA, 946 bp, Homo sapiens
tatgattcttggattcatcgtgagcccagacctgacacagccccaaggactcgtcctgatgccgggaccctgtcccagtgtttgggcttcatccaggtcctctgactcccatccgctatgcccctccctcactcggggtcctcccatccgctatgcccctccctcactcggggtcctcccatccgctatgcccctccctcactcggggtcctcccatcccctatgcccctccctcactcggggtcctcmctcccagtcgtgatccctgatccttgcccaatgtcacaaccccacgtaccagcctggacaggacactacgaagctccgaggtttggattaggaaatagaccctccaaccaatcaatgccccctgcctgtcccccctgcccctgacctgctgaactcgtagatgtcctcaatgttggcaaacagcgtgcccacctgctccacgctcagccccaggaccccgccgtccagcagagggcccaggtagtcctgttgggatgactggggttatgggggccaaggggctggcctgggtacccactgccctctggtgtctgcccgccttacctccacgatgctgcggaggtccctgacataggcccgttctgtctccacgatctcccgggccacacgctccagccttgagggtctggctgaacctgggatccccaccggagagagatgtaggcggatgggaggccctggaaggggctctggcctggaggctgagcaggctggagtgggcccaggggctggatccccctcagagcccactgtgctcagggatgtggagctcccagaacctcggggggaggccatggtgggggctgcaggagctgctggggtgtggaacaggaggtcagagaaatctccccatgcacggacttccacagcctttcatgcgttcagcccacaccctcacccacacctgtccaacagc

SEQ ID NO: 685424 - DNA, 1508 bp, Homo sapiens
aagaagtacaattctgtcttataagggaaatcatatatactttctaatgtaaattataaataggtaatttaaaaagctgagaaggagctgcttttaaggaaacagaagtggagggcctgggggccagcccaccaagctccttcctatccttgggcagacccctgtggtggcatggtgaagctgcaaagctccaaattatcctcactgaaagctactgatctaatctagtgtcctggggttacacagtggaggactgagttccgagatcaaatgcctctgtcaatgtcacatagctagttaatggtgtatcaatctgagcccagggcttttgaattggaccagggtccagtactttttttttctttacacaaaagtgactgccctgctttgactttcaagatttgtattgaaatgacacagtattccaatgcctatatattttctaatgcctctccaaacagaaacaaaagaaaacttcattaaagcacttgtgtaacatcgacaatctgtgggaagacccacagttaccaactgtccacrttaaaattcctcagttttgggagatgacgtccaaaaatatggctatgatggaaagcaaatacctagacacttgagaaggcagttgtttcagcaagatatattcaatatacagcacacagaagatttcacaaaatcaaacagcaacacaaaatctgtttcaatgaatgacagtttctcagcttaatataacatttaccagcaaacatttttcctattttattatactagtaaagaaaaattgaataaaggtataacaatatgactatattagctcaaatacctaaacaacaatcaaatgtgttgggctttcagttaatatatgtaaaacatttaaaatagtgcttggtatataagaagcattatatacgtattagctctcagtattttttttttaaatcacccttaaatatctctgctaaaatcaggaaaatgtgcaaaacaaacagttgtaatttaaaacaaacaaacaaaaaaggcctattagtaaactgcttttagacatcatccattataagtagctacattatttagaactctgccatatctactgccacccactggtacatatctggatataccgcaatgagttaagagttttctcatccggccttaccacagaaaacacacaggttaaaatgaagaacaacattcaaaaagtatggctatcccttgtggtttgtctcagacactgaaacaacatgctggtctacagatggagcccaattggtccaataaatgaaaggtttacagttcactgtctgtcttgggtatgtggtaaaacatccaaatacaggtactcatgtttttctttgatgttaattcatttctggtgaaactttccacttcgacaaccttagagatttaaaaccacttgccacaaaactgtcacagtacagaaaatagcataataatctaccccattccacctcatgcttgagtctggcactgagaaacatcctgatatagaa

SEQ ID NO: 685425 - DNA, 1520 bp, Homo sapiens
tccacggtacacactggctttattggctgtggtcttggtcaaagcacagaatgaaccttggccagcagcatgaggtctctcaagctgcagctgttgggcggaggctgctctgccagtgactctgggcaggaagtgcctcgttagaactgttgcatctattttactcaggccagagggggggaaaaagaaagaaagaaaaagtccctaggtttctccaaacctcttttaatgccaccgtgttagatggctttgctacccatcactgtttcacttctggtaactaacagcttggggttcattatgatgggaagtttcaaatatgctaagtattataaatcaagcctgtatcttcactcacagtggaattaatgacagcataaataaaatgaaaatccaaaatgacagacaagcacagggcaccccggctgaaaaacatcagaaagccgatcactctgcacccagacccaaactgctagccagcagtctataaagaacatgaaggattactgcaactttcatcagaaatgtgactttatagtgaacatcaagttcaacaggacttctcacaatgcttctttccaggaccctgcatcacataaaggatgaagtgctaccacagttttttccttccagtaaacagtttaaaatgtgtgttattaaaggcaacccagcttcctctgtgttcatatcattttacagaactcctgccatccttcattcccttatccagctaagtgctgagcaacaatggacaaacaaaatctaaactagcataaccactamcctagggataacactgaataagagttatgcagtatgatctgataatagctggcttcaagagctaagaagaaaagggggaaaaaagcttgtaaaggggatatatttgaaattgaaattttaaaacagatgtgcaactggacacacattttgggaactgctcttttggctataaggtgatgaaggtgatatgaataggttctctgatatatgaagtacatataaatactgtattaaaaatagctgtgtattatcacacaaggatgaagaataatgatctcattttaccaagagaagcctttcacacctggttaatagaccaggtcacaccttaagaaaaataacaaaagtgtttcatgtattaatctcactaactccgcttgcaactatcctgttatcttaaaatacatgcacaggacaagtgagcacgactctagcccacaggctggccctaataaaggacagaaagttgcttctaaagatcactgaggagaggactggataccagagaaggatatcaaagagagagagactgggagagatgaaatatttccaatagaaatatagtatctcaaggacaaagagatgtactgtttcgaagtacaaattttcacattattggtgaagtgtcttgtacttttgaaagccatttgaatgcttggtggcttcaaatgattcacaagtacaccagactctcaatttaaaaatttataagaaaaaaacaaaaggaaactgtgtaa

SEQ ID NO: 685426 - DNA, 585 bp, Homo sapiens
acttcagtttcctgaaacattgcaagttatccttgtaagtacaggtrataaatattgcaaggctctgttttgactacagtagcatttcccacccccaacattctcatttatgtgctcaaagacattaggttctacattgtaaaagctggaggccatcagatgatatattgtttcaaacatcttcctgaaaggaagctaacatgtagctatgtttagaaatccactatattcctgtagagagcaaggtcaagttcacatccacaatcatcacagggctttgcacccacgttagaatacagctatgttagagaagaaaagatgcccaaccacagaagtatccctagggttttagccataagaatggccaaagacatatgcaatataaatcatttcctaattggctgcccctgaaaagaaatgcaggggctacaaaccctagactcggcccttacagtgtgggtcgaacacttactagacttcagcggtcaacaataggggctatcctggtaaaacactaagggtgacttgtgctgggcttgaatttaggtaggatatggtcataggcatagctatagcaggagaagc

SEQ ID NO: 685427 - DNA, 2024 bp, Homo sapiens
gagaatctattcttccagtcctctccattaatggggataattaagagtctgcagtgatcccaggagaacagacaatgcacaaatatcaaataactgaactagagaaattaaatgcaaagactagtacttggttaccctggcaacttaattgaatatttcacattactcttgggtcagtcaaaaactatacaaaatgtatttccatgtattttctacagaatatttttgagaataatctcaagatatagagttttccaacgcttacctacattcttaagtgttttctttgttgagttcataagaaatatacatataaagagaattgaacaagttgtagtggataacaatttaagattttgaaatatattttcagaatttcaaggtacataggcccaaagcatttatattttcagtcacattatgcatatcaaaaatacatattttaagaataagacgtttgtatgtaaaagatgattcgtaaccctaggcacacaacctactcaatgtatccactcaagggatcctgttaagaaaaggctttctgtcaaaagccatacataaacacacacctcatcaaaacatgattataaaagcacttaggctctgcatttaaaatgtgaagttggtggttgatcagcacacatattgctgtctacaacggaacataacctttcctaaagtggcacactgtgtgggttctgcaggccctgataatgaatgctgacagaggtatccaattattcaggcttggctgcagccacagtcccttaactatgtgagatgaatgggatgatggagaacacacagagggaacacaaaccttagatagccaagtataaaatgaaagaaatacattttcaaaaacagaacttaaaaacagtaattttaagttgataggaaggctcataatatttttagaaagaatcatgcctcagtgaaataagcaatgaatcagaagtcaggacctaattttggctcaggccttaagtagctgtgtgatcttgaaataaaattttctggacttttgtcctcatttgtctaaaggcaggaggtggcaattgaacgctgaaatagattaactgtaagaccccatttagctatgacatttcatgattcaattatacacatacattctttatatatgggaaatgtgtattttatactggtatgtatatcttatctcacaatactaattgtttaaccaatatatcaaatcttatgtaaaaacactttaatagcttcacagactcactttcaaaggatacttacatttatttatttatttatttgtttacttactcattttgggatggagtttcactcttgttgtccaggttggagtgcaatggcatggtctyggctcattgcaacctctgcctcccaggttcaagcgattctcctgcctcagcctcccgagtggctgggattacaggcatgcgccaccacacctggctaattttgtatttttagtagagacagggtttctccatgttggtcagactggtcttgaacttctgacctcaggtgacccatccaccttgacctcccaaagtgctgggattacatgcgtgagccaccaagcccagccaggatacttatattaaataaaattgcgactgtttaagcttcttgaaattctactcttagaactgcattcaggatgcatttctgcaatttttgttagcaattaaaatctttattctttgaaattgaaattttataacactccaaggaatcaataattattttatttaataaaactagagaataatccaggtaacaagtttgagataaaacaaagcagatatttcaaacaatgccacatggttggagtaggtaaactccttccccaggcgaccaacttgaaggacaatggtcattttaaactgtaagcttagatgtacgaggatcttctagatagatgcatatgcaagtggatgtgctcaaacacagattgagtttcaattaatattgattaaataaaatgggctgtttgactatttttacgcacatagacactgaat

SEQ ID NO: 685428 - DNA, 2024 bp, Homo sapiens
gagaatctattcttccagtcctctccattaatggggataattaagagtctgcagtgatcccaggagaacagacaatgcacaaatatcaaataactgaactagagaaattaaatgcaaagactagtacttggttaccctggcaacttaattgaatatttcacattactcttgggtcagtcaaaaactatacaaaatgtatttccatgtattttctacagaatatttttgagaataatctcaagatatagagttttccaacgcttacctacattcttaagtgttttctttgttgagttcataagaaatatacatataaagagaattgaacaagttgtagtggataacaatttaagattttgaaatatattttcagaatttcaaggtacataggcccaaagcatttatattttcagtcacattatgcatatcaaaaatacatattttaagaataagacgtttgtatgtaaaagatgattcgtaaccctaggcacacaacctactcaatgtatccactcaagggatcctgttaagaaaaggctttctgtcaaaagccatacataaacacacacctcatcaaaacatgattataaaagcacttaggctctgcatttaaaatgtgaagttggtggttgatcagcacacatattgctgtctacaacggaacataacctttcctaaagtggcacactgtgtgggttctgcaggccctgataatgaatgctgacagaggtatccaattattcaggcttggctgcagccacagtcccttaactatgtgagatgaatgggatgatggagaacacacagagggaacacaaaccttagatagccaagtataaaatgaaagaaatacattttcaaaaacagaacttaaaaacagtaattttaagttgataggaaggctcataatatttttagaaagaatcatgcctcagtgaaataagcaatgaatcagaagtcaggacctaattttggctcaggccttaagtagctgtgtgatcttgaaataaaattttctggacttttgtcctcatttgtctaaaggcaggaggtggcaattgaacgctgaaatagattaactgtaagaccccatttagctatgacatttcatgattcaattatacacatacattctttatatatgggaaatgtgtattttatactggtatgtatatcttatctcacaatactaattgtttaaccaatatatcaaatcttatgtaaaaacactttaatagcttcacagactcactttcaaaggatacttacatttatttatttatttatttgtttacttactcattttgggatggagtttcactcttgttgtccaggttggagtgcaatggcatggtctcggctcattgcaacctctgcctcccaggttcaagcgattctcctgcctcagcctcccgagtggctgggattacaggcatgcgccaccacacctggctaattttgtatttttagtagagacagggtttctccatgttggtcagactggtcttgaacttctgacctcaggygacccatccaccttgacctcccaaagtgctgggattacatgcgtgagccaccaagcccagccaggatacttatattaaataaaattgcgactgtttaagcttcttgaaattctactcttagaactgcattcaggatgcatttctgcaatttttgttagcaattaaaatctttattctttgaaattgaaattttataacactccaaggaatcaataattattttatttaataaaactagagaataatccaggtaacaagtttgagataaaacaaagcagatatttcaaacaatgccacatggttggagtaggtaaactccttccccaggcgaccaacttgaaggacaatggtcattttaaactgtaagcttagatgtacgaggatcttctagatagatgcatatgcaagtggatgtgctcaaacacagattgagtttcaattaatattgattaaataaaatgggctgtttgactatttttacgcacatagacactgaat

SEQ ID NO: 685429 - DNA, 1211 bp, Homo sapiens
ggtattggtgatgactacctagacccatttcttattaaggatgcctgtgttgctcttctgattttgtcagttgttctcgtgtattcagtagaattagggtgttggagtttcttctcaagttgtgggagtttcagtgcaaaactggcaaagtcccgaaaaaccaggacaagttgggtactttgatrgaacacttctacacacagaacgtcccttcactcaccatttggctacacaggtgtacagtttatacaggaaaggcgctcaagtagttttgacagaaatgatgaatgctacccttggagctttctagataatttgcctttagaaacattgtgtttatctcatttgattaatgtactttctttttatttttacatttttgcttttgatcatgtataatttcctaatggactttagtcaagcattcattgagatgttcttgaaataaataggctactacatagaaatatcacagtaaaacacacatgctggagtgaaaaactgaagagaaaatagtaaaaataagaaaaatatcaacaattctaaaactgcattacaattttaaaactgaggagttacaaagagcagagaacggctgaaagtttccttttcaatatcaggatatgcctggtctgaaaactctggaaaataaattctggagtaattggctgattaaggagattcttaaaaagttgtggctaaagtttgggaagttacttgatgatctttggtaactgggaaataaaactgaatttctgctgaattgggaaaaaatattggttcatatgaattaaaaataaatattgagaacctacaagttaaaagtactgtggtccttgagggaggagaggaaaaggaggaacatatcctgccatagagattttactgcttgtaattcagttgaatattaaaaagatggcacatgaagcataaccatgctttcctttgcaagtgagagtcatgtactcggagaactttgatctgaaacagacttcagtgatcttatttctagagatctcattttaggtattgtgaatcctatacccagaaaggtagacctaccgaaattaactgttaagggtaagtaaaattagataattagcttaagactggaaagcaattttcagaacagagttgaactaatgtgtccctgttttaattgattcttgagaaagggaactttaagtgctttctttgaactcctgggatcc

SEQ ID NO: 685430 - DNA, 1211 bp, Homo sapiens
ggtattggtgatgactacctagacccatttcttattaaggatgcctgtgttgctcttctgattttgtcagttgttctcgtgtattcagtagaattagggtgttggagtttcttctcaagttgtgggagtttcagtgcaaaactggcaaagtcccgaaaaaccaggacaagttgggtactttgatagaacacttctacacacagaacgtcccttcactcaccatttggctacacaggtgtacagtttatacaggaaaggcgctcaagtagttttgacagaaatgatgaatgctacccttggagctttctagataatttgcctttagaaacattgtgtttatctcatttgattaatgtactttctttttatttttacatttttgcttttgatcatgtataatttcctaatggactttagtcaagcattcattgagatgttcttgaaataaataggctactacatagaaatatcacagtaaaacacacatgctggagtraaaaactgaagagaaaatagtaaaaataagaaaaatatcaacaattctaaaactgcattacaattttaaaactgaggagttacaaagagcagagaacggctgaaagtttccttttcaatatcaggatatgcctggtctgaaaactctggaaaataaattctggagtaattggctgattaaggagattcttaaaaagttgtggctaaagtttgggaagttacttgatgatctttggtaactgggaaataaaactgaatttctgctgaattgggaaaaaatattggttcatatgaattaaaaataaatattgagaacctacaagttaaaagtactgtggtccttgagggaggagaggaaaaggaggaacatatcctgccatagagattttactgcttgtaattcagttgaatattaaaaagatggcacatgaagcataaccatgctttcctttgcaagtgagagtcatgtactcggagaactttgatctgaaacagacttcagtgatcttatttctagagatctcattttaggtattgtgaatcctatacccagaaaggtagacctaccgaaattaactgttaagggtaagtaaaattagataattagcttaagactggaaagcaattttcagaacagagttgaactaatgtgtccctgttttaattgattcttgagaaagggaactttaagtgctttctttgaactcctgggatcc

SEQ ID NO: 685431 - DNA, 1211 bp, Homo sapiens
ggtattggtgatgactacctagacccatttcttattaaggatgcctgtgttgctcttctgattttgtcagttgttctcgtgtattcagtagaattagggtgttggagtttcttctcaagttgtgggagtttcagtgcaaaactggcaaagtcccgaaaaaccaggacaagttgggtactttgatagaacacttctacacacagaacgtcccttcactcaccatttggctacacaggtgtacagtttatacaggaaaggcgctcaagtagttttgacagaaatgatgaatgctacccttggagctttctagataatttgcctttagaaacattgtgtttatctcatttgattaatgtactttctttttatttttacatttttgcttttgatcatgtataatttcctaatggactttagtcaagcattcattgagatgttcttgaaataaataggctactacatagaaatatcacagtaaaacacacatgctggagtgaaaaactgaagagaaaatagtaaaaataagaaaaatatcaacaattctaaaactgcattacaattttaaaactgaggagttacaaagagcagagaacrgctgaaagtttccttttcaatatcaggatatgcctggtctgaaaactctggaaaataaattctggagtaattggctgattaaggagattcttaaaaagttgtggctaaagtttgggaagttacttgatgatctttggtaactgggaaataaaactgaatttctgctgaattgggaaaaaatattggttcatatgaattaaaaataaatattgagaacctacaagttaaaagtactgtggtccttgagggaggagaggaaaaggaggaacatatcctgccatagagattttactgcttgtaattcagttgaatattaaaaagatggcacatgaagcataaccatgctttcctttgcaagtgagagtcatgtactcggagaactttgatctgaaacagacttcagtgatcttatttctagagatctcattttaggtattgtgaatcctatacccagaaaggtagacctaccgaaattaactgttaagggtaagtaaaattagataattagcttaagactggaaagcaattttcagaacagagttgaactaatgtgtccctgttttaattgattcttgagaaagggaactttaagtgctttctttgaactcctgggatcc

SEQ ID NO: 685432 - DNA, 960 bp, Homo sapiens
ggggcctctaaagagcaaatcgcttgtttatcacatgtaacaaaggcacggtgtctttttcctccttattttgataaaatcagcacaagtgaaatcaagaactgtttcaaaatgttaacatttttctgcagcagtgtaactgcatttgagctaaggtacttaagcacacacacagaacaaccatgcttttcatcgagaattttaaataacttgacatacataaatcttcattatttctgattaagcgaaggggtaaaacaaaactctgctaaaagatatgtagatatcttagtttcgtatgctggggcttaagacttcttctaaataacacttacaataatctctccagaagaaaaatattctttctatgatggccttcacagagctgttgattattatttwatattacacaggattaattaccagttattaaaggggaactaaaaaagggaaaaactatggtcttagtaaacacataaatgtacactgtacatgggctagttcttaggtaattataaaataccatgtaatgtaatcataagactacaatttttacctaaactttccatccataagaaaatactactacctgttcattgctttgtggctagcaagaagcatgaaccttctctgcgcagtttactatcaatctacggggccacggactcacagcagtgcccccacatttggacctggaatcgcagcatgctgcgtgatgccagaagagactgtaggacgaagtgaagggtgaggaagagatcggccgtcagagccctgaacagtgtaaggcaggagagctgagatgaggccctgctcttctttatcaagccgacttttttttttttttttttttttttttttttttgggagacaaagtcttactctgtcgcccaggctggagtgcaggggggtgatctctgctcactgcaacctccgcctcccgggttcaagcgattctcc

SEQ ID NO: 685433 - DNA, 1324 bp, Homo sapiens
tctcttccagctattttgaaatataccatacattgttgttaactatagtcaccctaccatgccatcgaacacgagaactttttccttttatctaactgtagatttgtgcccattaaccactttctctttactatccatttcctgcccccttcctgacatttcctagcctctgtatctagcattctactctctacctccctgagatcaacttttttagcttccacaaatgaatgagaacttgcgatatttgtttccgtgcccaacttattccacatatcatgacttccagttccatccgccttgttggaaataccagaatttcattcttttttctggttgaagactattccgttgtatgtttataccacattttctttagtttttattctcagtacattagagtctaatacatattagggctcaatatttgttgaatgaatgaaaataaaagcacattactcaaaagaaattggccaaataaaaatgaataaaatgaatttagggcagcaagtagggctacaaatcaggaatcagggctttttaaatatttccatttctatgcttctgtcttcctttctattttcttcattttgtgtttgttatatttccttacttaagatcattttagaactaactggtgtcctcaagactggagcccagatcttctgacttcaataactttattcttagagtctagcagccaaaacatcatgaaaagagaaacagatgttcatcagctttttctatgttacaaatactggcatgttatattctttgagacaatgaaaatatgacatatgcaacagtcaagaaaaccaatattcaattttgatattacttcaggattaagaattagcacagaccaaagaaatgctcaaagaatgtaatgactcgatcattgggaacatcagttccagttttacgtgtgtcagtcataaataattcaggttgtaataacacatcggaaccccttttctactcctgaaaacaaagggcctaaaacctgtataagcctcctttttgtagctgtacgagatagctttttcctctgaatgaataaaaaatgttctttgcctctggaattcattccttcattccttcaytcttttatatatttgtcagatatttatgaagaactaattaggcacaaataaacaaggcttgggaaaatacaagtcgcaataacatctgatatcataagagttaactttaggaaaggattatttcagaaaagaaataggtcaattttcagaaaaatggtaggagtgaggctcctcaatacgaagcagatgcagaaaccacacttgggaccttacagagttgg

SEQ ID NO: 685434 - DNA, 639 bp, Homo sapiens
ccttaaaaacttgaatatgtattcttctgctgttgggtggagtgttctgcaaatatcarttaggtcgatttggttgatgacgttacttgcatcttatatatccttatagattttctgtcaatatgctctatcagttacttttttaaaggggcgttaaaatatctgactataattgtgaaattgcatattatattatatattatgttatatgagaaaatgtcctttacgcatgtcatgaattaccaagttaatattatctacatgtatttggtttgggtagtgcatttttattacaacgttttcctatagattcccatgctttcatttacagttgaagcaatttgatagaaccaaggaacagtcagtttaagaaggtggaccatattttacactaaatatttcaattgataggtagcacaaacactttagctttataaaatatttgaagctttacataatgcacatactaaaaaccattcactaatatgttaactggcttcaaattaatcaataaggaatttataagaaaatacctcaagaatcaactacctacatagatatttaattcatgtaaattaaaatatttgtattgaaagagttgaggtttttaaaatacttcctatcccttgaagagttaaa

SEQ ID NO: 685435 - DNA, 1370 bp, Homo sapiens
catcgtataaaggtaaagaaaatacatataatttaagacacaaaatgaaacacaccaaaattttctttaaatggctacatttttktttgtttgtttgttttactttaagttccgggatacaagtgccgaacgtgcaggtttgttacatagatgtatgtgtgccatggtggtttgctgcacctatcaacctgtcatctaggttttaagtcccgcatgcattagctatttgtcctaatgctctccctccctttgttccccaccctccaacaggcccaagtgtgtgctgttcccctccctgtgttcataacatagccacatttataaatgtttatatatccttctgaatatatattcttctcaatcttctctgtatgtctctctgtgtcttattctcaatctctgtttgtcaatcgctttttaatgtttttttaacctatacgttctattaaatataccaggagaatatttctataacaataaaatttcagcataggctaattaataatgaccaaataaagttatattgtataacaaaatttatttacccaacctcctatggtgaacatttatgcttctccaaattttcattccaaatacaatatggtcataaaagtttcatagctaaacttttcacagatctctaaagattttcatagaataaaacattagcagtggcatttaaggtatttaaagattttgatacatctattgttatattgcccaccgacaagcagttccaccatttctcctggtctgtatcctgaccaccttaaccactgagtatcatcagagttttataggtacaacatggcagttcattgttgccaatttgcattcctttactaaataatgaaattaaacacattttcatgtatctgttggttaattttcttttctcttgcaaactgtgttgatgatctttgccatttgttatatgaattcttttcttaccaaatcttacattaaggatattttccttttcatatataatgaatgtatttttgttagtaaatagcttttggttggattgtgttcattcatggctttttttgtaaataaaaataaaataataaaatataaaagctattgctaaaaagttttcaacatttttacaatgggatctattgatccttcccttcatgaattctgctcatagcatttggcatagaaaggcatcacccgctgtataataacgtggatactaacctgtgatttatcctggtaattgtaccatttctgtttttagttgtaatattttttgatccacatgaaatttagattcatataatacatgaagtagagttctaatagtctcctctcccccagatggctagccaagtgtcccaacccttcgtgttaaagaatgcagc

SEQ ID NO: 685436 - DNA, 605 bp, Homo sapiens
tatacctagtgccacatcaaagtagtctatcacagatgccacttactctcccaaagatgatccttgacataactattttaccactttgagttatggaatatgatgtcccacccattaatgctaactctttaacccagactgagtcagagagctgattctaaattccaattgyctttatggtctgttgcctgcaaacttttttggagggggttctaattattgcaggaaacaggatatcaggtagaataatcataaagaatttttttttacagaatttcggcaagaatcagggaaactattttggttacttcacaggcaggattgatgcagattaatccactgtttgtttagtggaaacctcgaagctgccacctcctcctcagtacttgtgatagtggcacctctgctgcagatgcccatggaaattccatctccctgagtctagatgtcatctcacactgctcacttctgccttctaagtcttgtgtgaacatttctgtttggtggaaggacctccagctttatctcctctgtggtggaggaggatgtgtgagaagtggtggaagtaggtgtcaaattgcagtaactgccacaccaagaaataa

SEQ ID NO: 685437 - DNA, 3066 bp, Homo sapiens
aaaaaaaaaatcaaactcacagaagcagagggtatgccagaggctttgaggctggggtgaacaaggaaggagagatattggtcaacaggcacaaagtttcagttagataggaggaataagttctggtgttctactgcacagcagtgactataattaattacagcagtgtattgtctatttcaaaatagctaaaagaaccagtttttaaatgctgttagtaagatcaaatgtgaaagatctgtttaaactccagacaaatcatctaagacttaggaggagaaaaggagagggttaattgttacctacaacttgtgggattatatactgcaaggggtaatagtcaactcactactcaatagggagaaaaattttaaaaagagactaaaaccaacatagaaaattgtgtgtaggttcataataagtcaggcaggtatagttgaasatgcggataacaactaaaagttatcgagctctaactaagtcccaggcacttagatatttgattatacttgttcctcacaaaacactcttaatcctcacaaaatattacttatgttttaaatatggggaaattgaggcacagagaaatggagacccctgctcaagcagtcagggggtagggaatctgagtataagcctgggacccatcctcttaaacatgactctaaattaagtaaggataaaggaaaatattgtattacctaattggtagcatcaggcactaacacattctaaagtacttggtcatctaatccgaaaatagtttagggtgcttaaaaggcttttaagcatcagtcatacaccaaagatctttattcactggagccaagaggcagaaagtaagttccagttttcatttattcatcatttcactctgcccttggactcaaaagagcccatgccacctcctgatggaaaagcccaagttacgtttgggaattataatttctctttttctgattctacttactggcagggtaaaatatgtagaaaaaaagtgttcctccatttgccttcttaaatactttctcttgtttataaacctaacaatcatctatcagcaatgctgtttctaccctgccagaacaaggcctcaggaaaccatttcctctggagcaattccagaagggctcagtgagcactcaataccttttacactgatggactgtatgggtttcttgctctcagcccctgtaggatttgcacattttgttttcatgcccatcactcatggacagaagtaaaaatatgctatttacctctttccacttatgtagacctcacattttgtttcaccttagtggcagtgaggggggagttttgttcacatttagcaagtctgggctgcctattgtgcacaacagctattgcccaattgcagtttatggagagtctagaaccttttttttttctttttatgctaccaagggattaatgacaaaaaaattggcaaagaaattgcagtctgcaagttataaccaatatgagttgatgaaatccagatgtgaaaatctccctccaccatcctatgccttccacaatataggtgtatgacctcggtgaaggcagggcttgtaattgcttttatttggagacatgtgggctctgcttccccccaacccccaccttcttttcccactttgaaggaaagagtgacttgaaatgtatttttacacttactaaaacggatgtggaaataaaactttaattactggaaaaactattaagaagaagtatattttattcttccagagccatgagtttttcagagcaaagttgtcttagaccacttcagttaccacaaccccaggaatcaatggaaacctcacagactgggcagagtctctgccttaccctcacagtgatcactgagattcaaggatggaatgttctaacacatggctcatctgtcttgcaatttaaacctaattagactaacttttttccccccaattgccctgcttgtttccatggcagtgcaacaatcattctaaaacttggtggcttgaaacaataataatcgttttctatctctcacaattttatgggtcaggaatctaagagaagccaatatgggccttctgacttggggtctctgatgaggttgcagtcagacaatggcgagggccaggatcatactgaagacttcctccctcacatgttctgatgtctgatctgagaggactgtaggctgacttatctgggactccttgggcatctgtaacgctatggggtgtcttcacatgttctcccccgtatgggggcttcagggtagctgaatttttacatgttgacttaaagttctgaagataaatgtcccagaaaggtcacagccaggctaggaagacatagtgtcacttctggcatccactattagttgagacagttatgaaggtccatccaggcttgaggggaggcgtggagagagagggtaaaaatcctgcctcatgatggaggtctatcgatattatattgtaagaagaatgtttgagatggttatctttgaaaaaatgccacagtatgccacatcccttaagaaacaatatccctgaaaaaaaacaacatgctactcattatgtcagatttttaatatctaacagacctagttgtctgactacaacttgttaaatcagttaaaagtagaattttagatattcagtttttttattgcagagctactctaattggaagcctatacagaggcaagctctcaacaattaattaggaatccatgaacttgtgtggcatgtaagaagcatggttataatatggttataataaaaatgggaaataaattaagatctttgggcatctactatgtgtcagccactgtcatacattagttacctaaattataatcattagtcaaacaaacatttatgaaatgtctccaatctatcaatactagttgtgaggaagatcaatacgatagacctcattcaattctcaggaagtggaacaacagaaactcagattctcaattttatgttatttcttctgataagctttatttttatggattttacacatattaggatgcccaactttcaaattattggatggact

SEQ ID NO: 685438 - DNA, 603 bp, Homo sapiens
aattttagcttaacctcctgtgaaccttaagcctcattgccattttgaagtttgaatgaaataataaatactaggtatcatgcataatgcctagtacttagtaggcactcaatataagataactgtaattatgaagaaatatgtagttatcattttattttacaaaaggaaatgaaatctcatagagactcaggggtacactttgtgtggttaatgttcttctcacttccctacacattttccatatttacatagatgattttattacaaaatattatgcaaaatgagaaatgtcctttaagtgttttaataaactttatcagtgtttttttattatatcaataatttgtgacagtgaaaagttatatcagccacaaatcctatattaatactcacctcttcactagcagactgcatggtaagttccagatgggattcctctgaagtccaggtaaatgaactcaagygtatccttcatcccagttctgtgatgaaagcctgctgttccttgggaaggcaagaggaggaatttgaatggcatctttgttggtggaagagaggggatgataagagtgcttgtacatgattctttgtaagttatct

SEQ ID NO: 685439 - DNA, 1230 bp, Homo sapiens
attaaaagaaaattatgaaaatgttaaaaaaaaaaaaaaaaaaggcaaagacttgtgaggaggagtgtttttgcccttctgcctctccctgtctggagctttgatccaatgcggtagcagcagccatttatttaccaagacaatgaaagctgagagctaagtatggtggagcagaaagatggaaagatcctgattccttgatgacaacctttagcaactatgctggttttggtccacccacttctggattttgtgttatgtttaaaaaaagcctttactttttgttttgttttttgattcagggtcttgctctgtcacccaggtgggagtgcagtagtgcagtcaccgctcattgcagcctcaacttcctgggctcaagtgatcctcccacctcagcctcctgagtagctggggctacaggtgcatgtcaccacacctggctaagcctttacttttttgaactagttagtaaagtggccctcaaacttagctacccattaaaatcacctgtggagtcttaaagttcccagttttaagatctccctatacacccccaaatgaataggaatttttggtggtaggatctaagcctcaataattggaagcaggatttcattctgtctcccaggccagagggcagtggcacaaccatagcccattacagccttgaactcctggtctcaaacgattctgctgccttagcctcccaaagtgctgggattacaggtgtgaaccactgcacccagccctagcttcaataatttaaaaaactctccagcagattccaatgtgtagcccagattaagaaccagtggtttaaaccacctgttttggttgttaatattttttgttattcccagctggatacatttgtaattaatacatgttttgaagctatattcaaaaaattgaagcatgtaagttctcccatttccaaccagcttcatctctactcccatccctagcagaatcataatcctcagattgctgtacctctttcttcaaaatttcttctctgcatctacaaatgcatattagttttctaytacaaaaatccttccaggggctattcaagtgaggccagagaggtgacattgccatataagttagaaaaaccaggacagtgctgacttcaagttttctatctccataagccaccagaacacctggaaaatatcaatgttttagcatccaaactataacttccagcctgccttttgtagtctgaaa

SEQ ID NO: 685440 - DNA, 1230 bp, Homo sapiens
attaaaagaaaattatgaaaatgttaaaaaaaaaaaaaaaaaaggcaaagacttgtgaggaggagtgtttttgcccttctgcctctccctgtctggagctttgatccaatgcggtagcagcagccatttatttaccaagacaatgaaagctgagagctaagtatggtggagcagaaagatggaaagatcctgattccttgatgacaacctttagcaactatgctggttttggtccacccacttctggattttgtgttatgtttaaaaaaagcctttactttttgttttgttttttgattcagggtcttgctctgtcacccaggtgggagtgcagtagtgcagtcaccgctcattgcagcctcaacttcctgggctcaagtgatcctcccacctcagcctcctgagtagctggggctacaggtgcatgtcaccacacctggctaagcctttacttttttgaactagttagtaaagtggccctcaaacttagctacccattaaaatcacctgtggagtcttaaagttcccagttttaagatctccctatacacccccaaatgaataggaatttttggtggtaggatctaagcctcaataattggaagcaggatttcattctgtctcccaggccagagggcagtggcacaaccatagcccattacagccttgaactcctggtctcaaacgattctgctgccttagcctcccaaagtgctgggattacaggtgtgaaccactgcacccagccctagcttcaataatttaaaaaactctccagcagattccaatgtgtagcccagattaagaaccagtggtttaaaccacctgttttggttgttaatattttttgttattcccagctggatacatttgtaattaatacatgttttgaagctatattcaaaaaattgaagcatgtaagttctcccatttccaaccagcttcatctctactcccatccctagcagaatcataatcctcagattgctgtacctctttcttcaaaatttcttctctgcatctacaaatgcatattagttttctactacaaaaatccttccaggggctattcaagtgaggccagagaggtgacattgccatataagttagaaaaaccaggacagtgctgacttcaagttttctatctccataagccaccagaacacctggaaaatatcaatgttttagcatccaaactrtaacttccagcctgccttttgtagtctgaaa

SEQ ID NO: 685441 - DNA, 630 bp, Homo sapiens
ccgggcgtggtggctcacgcctataatcccagcacttcaggaggccaaggtgggcagatcatttgaggtcaggagtttgagaccagcctggccaacatggtgaaactgtcgctactaaaagtacaaaaattagcctggtgtggtggtccacggttgtaatcccagatacttgaaaggctgaggcaggaggattgcttgaacccaggaggcagaggttgcagtgagccaagattgcaccactgtactccagcctgggtgcttaaaaaaaaaaaaaaaaaaaagtgggaactcagcaggtctctcccagcaacccttgaaattcactaggccttgactcttctgaatccatcagtgcaagcttcctgaagggmaactgcagttctctagagggctagatgagagggagaactgtggatgatgaagaggagaaaagctggtgagctaggaaaggagtgtggaatgggagtggttttccaaaggatcgcatgtctttcagcaaataagcttattgttacagcacaaaagaactagaatgcatttgagaaggggcaagcccactggaaattgtgcagctcagcctctggcttactgcagcgggcgacagatgtataaatcatatgcagcaggtga

SEQ ID NO: 685442 - DNA, 1939 bp, Homo sapiens
agagctatttttcaaagactacctcatatctctaacaaaaatttttacctctttagaagacaacccagtgcacaaaaatcctcaacttaaaaacaagtaaactatgatgtgaccattcattttacaaatagattcgccacgtggttatttttaatagagtgctcccttgccctccatatctgattcagttttcaataatttgcctccataacaagggaaatgtaaattcaaactttgtaaattaggataaaattatttacacaccctttggtttagctttttaatccaggttggaaccaataaatgagaaaagtaaactatggtgatggaacgcccttgcccacaaaatagggatatgcgtgtagcagagacggcctcttgcccattgacatctctatcaggcctggtgagctggatctgctgcagggattctgctgctcctgcctctaacctcaccccttctccctctccaacaagccttgctgctttytgtcattcataagtgccttggctgtgatggggaccagtggatggtgaggcatgtgagaaaaggggaatgatgctctgcagccgggtgcatggcctagtgttagtgctcaaagaacagaatgaaagaggtttcattattttcagagttagccatagaacttgagtatctatcagaaggagttttatgtgctccaagaggctgagggagccttgggtagagtgagggatgtagttggtgctgagaccccacactgctcctgtggggattgaaactgtaaggggttgagggacagaaacaaggatccgcctataatcggaaacagtagagaaggtgagttgggccaggactagtgtggctttttatgcccacttgaatccactctattcagttcctatcatgtgccaggctatgcactagcatggaaaatacaagtgttgtgactcaattggcttccaaggcaaggcaaagtaagggttgcataggtcacaaatcccataatattggaagaagttagccgtgggttgtgggagaagtgtctacagaaagtctgagcatacagaggagacttacaggaggaaaatatttcctggagtgggtggcattcaagaggatcaaggactgtgagaggcaggaaaggggagggggatatcagtggatgtattagcttaaaagtgtggagctgggagacattacctgctcctgtctggttggagggtaaggtggagataggagcccggcgacaccatctgtacctgtgcagggaaagtgccagctacagaactaacagggtttgttttaactatagaaagagatatatatccatgggtatcttttttttgttgtttgtattttaaaagtgcacaatcagagcaaccatcaccactatctagttccagaatattttttatcatccccaaaagaaatttcatactcattaacagtctatcttctctccctagaccctggcaagcactaatctactttctgactctactgatttgcctattctggacattttattataaatggaatcatacaatatgtggccttttgtgtctggcttctttcacttagcataatgttttcaaggttcatccatgttgtagcacatatcagaacttcgttccttttgatggtcaaattatgtttcattgtatggatataccacattttgttgatctgttcatcagctgatggacatttgagttgtttcccccttctggctattatgaataatgctgctaaaaacatttatttacccataggcatcttaaataaatacacaggagtacccacttgagtgaatgaagtttcaaatattttcttctctaccaatgaatgtggaagtctttctagggcttcactctggcttagctctcaaaaaccttttacactctttgaggactagcttgctcttggccagcttgctctttttgcagtctctgaagt

SEQ ID NO: 685443 - DNA, 618 bp, Homo sapiens
cagtggtttttgtgagctctgttagccatcttataaaattagttaaacccgaggaggaggtcttgggaactcccaattgataactggttggtcagaagcacaggtaaaataacctggggcttgtgcctggcatctcaagtgggtatagtcctgtgggactgagcctctaacctgggggatctggtgctaactctaggtagtagatacggcatcgcctaacttcagctgaagtaaggaagtgcctagaaggaagaagaccgaggatatttcttgatttgcactaatgacagctacagagagagataataattcttgacatttcctgattgttttaaccatgaaacatgaatatttaatataatgcctagctcataagtgctcaattaatagtagatggaactattattgttattattattcagcagtttatattacatttccagcgtactttctaccatccatttgcatagcagatttcttctcaccctttttttacaactgagaatgcagaagtaaacataaattatacttctgtagatgtatcacatttttttttkttttttgagactgagtctcactctggcacccaagctggagtgcagtggcacaatcatagct

SEQ ID NO: 685444 - DNA, 463 bp, Homo sapiens; identical to SEQ ID NO: 685404

SEQ ID NO: 685445 - DNA, 2254 bp, Homo sapiens
ctttacaatgggataaacagcaccaatgacctcccaacatttctgagagtataataaaatgaggcaaaagaagtaaaatgcctggcacatgaatattagatgttattttgttatcccacatatctcctaagccttagctttctaagagctttagctttctaagagcataagcaatttagagagagaaagcaaatgcttttcaaagaaaatatagaaaatggagaaaacatttttcccatgaagaaatcataactaacttatttttaaaaatacattaaggtaattggttttactctagaacacaactgagcatgccttagaaccaacaccaggttgagacacatgagtttccagagtttagttagctgccaagtctccagaagccagccttagcttgtcgtgctgacattatttctgaaaggccataaacagattcctagagaaatgatctaataacaccaccaccatttcccgtttactgggtgcattacactgagctaggtgctttgcttacctctttgtattaattaactttttatgggctcataaagggtcactgaagtgggtattattagcctattatgaagtaggcatagttgaattttgaatcctggcagtaatatttcatattctttgctcttaactactacactatattaccacttggacctgttgccagtgaattatcagagcagtggcatgggaatcccatgtagggaagaaactggtaatggaatatctaacttggaaatttcaaggaattcacccagtaggaagctggactccactctctgtggtttggggcaaaggaatttagcccctgaataagatgtaggtagaggtaagcttatagcagggacgattttaaaatctaggtctagagagcctgagattcatagcaaattgccaaaaaaggactcaatcccaggattcaaggcagaatttcagttccaaagagaagagtagactgtctatacatttgactttatgaccacatttcagaacattattcagggtatgagctttaaagtgagaccagttttggttggaatctcagcactaccactaataggttatgaactttcatactcgttatatacttttctcagtcttagcttcctcacttgcaaatagcatgtaataacatctattttacagtattattgtgagtattagagataatttatgttaaaagatgaatttattgtctggctttagcagagaataaatggtacttactagtagagataacaggagcagtgacgagagtcccggtaggagtggttctgatctgggaatgaagctgaatcttcaaagggcagccaagtttgcctgatagtgtgtatagggtagaggaagtaatgcaaggatttagacatcaagcagagataaaactgaatcgcaaagagatttccctccaaaattcactatttgttgttgccactcatcttccatttatcttccttctgagtactaaagcccaacttctagaaatcagcctttccctacccttatatatgtggttgtgagtgaaacttctyattcttcctcactgagaaacagacctgagaccttgtcctcaaccagtcacaacattacatactctcagctacaataagtgacttggtgattggcatgttactcttccagagcctattaactgcctagcagccttgctaacattttggattacaatataattcatctttctttttttctttttcactgaacaatgaacttgagagagtatatggtctggagttgatactgtagggagtacagccagctcaaaagacatggagcctagagacttaacaaaaaaaaagacaacaggtttctggtgacatgatttgaacactagcattatgcagtgcttgcagccagcactactctttgactttctacctatgtgtctcattgaattgcttattactagtattattattattgttattattatttttgctcaaaccaatttgggccagatttctgtgacttaaaattctaaactcaaacattcctcacatcatataaagggaaagcaaaaaatgtaagcctttttcacttaccagcttctttttctttatcctactgatattttaattaggagattcagaactttgaatatatttccagcctgaagaatatggagtataagtaataacatattctcctaccaagagaaccattaaacatatccttgtggtgtttcctatagggagacattaactattcaattctcatacacattatg

SEQ ID NO: 685446 - DNA, 2377 bp, Homo sapiens
aaaaataggaccccttaatttccttcaatagagggttatggctaaataattttacattctatgcaatggaattcttgtactaatgaaaaagaatgagatggaactatacattctaagcagaaatgatatccattataacttggcaagagaaagaaaagcgagttgcaaacactgtgtatagcatactaattctatttttgtaaaacaattgcatatatgagttacagggatatataataatcatgtctcacaattactgaatgtttactgtgtaaaccaggagcattgaattattattactcccattctacatatgagaaaacaggaacagagtggttaagtaatttgcccaaggcggcacagctggtaagttacagagcaaggatttgaactctggcagcccaactccacagtctgagcacttaaccctatacatggccttataggccaaaaatacttctgttaacagggatgacctggaaaatcaagagtggaggggcagagtcactttttaataaatacttctaaatagacattaaaaaacacgaactggtaaaaaggacttatagtgaaaagcccatttcctgcaagccccctccccagaggcaaccacttctaatagttcgagctcatgtggcagttacctccagagccataaataacatgcttctactgccatttcctgatttattaaccttggacattatctgttgacttctgcaaacactcagaaaaggaaaaatcagcttaccttttttctcctttcttcttgttatgttgcttcttgataacagggctgtttgctgccactggctctggtctagaccctgggctggacactcgactgcacagttgccaagactaggcccactgaggttcaagacaaaaaaaggacttgcccaaagtcactgtgagttggtgttggaggtggcacccggctcctggtctgcatggctccagggccrggctgtctctgtgataccctttggcccaccctgagagtgactcttgtgccacccctggcccacgcgggcctctctcactctggcagaggcttagcatggctggggtgggtggccctggctgggttcctgctgagggctggctgaggcctcctgctcaggcaggggcaggcatatttgcagagcagcaggtgcagcctcccagtgtttggccagccaagggttttattctccaacactgccagacctagactttgaccctcagggacttctacacagctggccttccagatcactgcccccatagcctctatatctccaggggaaaggctgagccagtggctgagactggcaaagtgccgagcaccagatacccagaacccttagggcgaaaccaccagactcacatgccccaaccctgcagtcgcctggggccatcgggcgggtgtgggggtgggggtgtataggggtagaaggagctttaaaaaattaccagtgctggccaggcatggtggctcatgcctgttatcccagcactttgggaggaataggcgggcggatcacttcaggtcaggagtttgagaccagcatggtcaacatggtgaaaccctgtctctactgaaaatacaaaaattagccaggcgtggtggcgcatgcctgtaatcccagctactcgggaagctgaggcaggagaatcactggaacttgggaagcggaggttgcagtgagctgagatggcaccattgcgctccagcctgggtgacagagcgagactccatctcaaaaaaaaaaaaggatgtcctgaaggcctcttcagcccagagagacatgggcttgcgggctgggggcagacaacaaagaaacacggggttggggtgcaagcctgggacttgtaggggcccctagcagtgaagaaaggctttgcctagcacacggtggcccctgagaggatgcgggtggcaccgtccccacccttgtagtcccttttcccagacatgagctcctggcagctttatttggggtagaagaagggtcctatttatgctgtgtctgcatttagagaggctgttcactcattaagttacagactctccacctttctgaaccttggtctccccatctgtaaaataggtatatggtcaggaatgggggtgggaattgaggattgtgggagccttctggctttaaaattatgagccctgaggaagatccctgaaagagcctgtgctaggtaggttatgactttggctgctgtaacaaactcaagagtaagaacccatataaacaagaagccgtttacttccatcccatgcgagggaccaggctgcacggtggctgtggtggctcctggactttgggcactcataccccttccctttttgctcctccaaaagggtgcacctcttttttttttt

SEQ ID NO: 685447 - DNA, 2377 bp, Homo sapiens
aaaaataggaccccttaatttccttcaatagagggttatggctaaataattttacattctatgcaatggaattcttgtactaatgaaaaagaatgagatggaactatacattctaagcagaaatgatatccattataacttggcaagagaaagaaaagcgagttgcaaacactgtgtatagcatactaattctatttttgtaaaacaattgcatatatgagttacagggatatataataatcatgtctcacaattactgaatgtttactgtgtaaaccaggagcattgaattattattactcccattctacatatgagaaaacaggaacagagtggttaagtaatttgcccaaggcggcacagctggtaagttacagagcaaggatttgaactctggcagcccaactccacagtctgagcacttaaccctatacatggccttataggccaaaaatacttctgttaacagggatgacctggaaaatcaagagtggaggggcagagtcactttttaataaatacttctaaatagacattaaaaaacacgaactggtaaaaaggacttatagtgaaaagcccatttcctgcaagccccctccccagaggcaaccacttctaatagttcgagctcatgtggcagttacctccagagccataaataacatgcttctactgccatttcctgatttattaaccttggacattatctgttgacttctgcaaacactcagaaaaggaaaaatcagcttaccttttttctcctttcttcttgttatgttgcttcttgataacagggctgtttgctgccactggctctggtctagaccctgggctggacactcgactgcacagttgccaagactaggcccactgaggttcaagacaaaaaaaggacttgcccaaagtcactgtgagttggtgttggaggtggcacccggctcctggtctgcatggctccagggccgggctgtctctgtgataccctttggcccaccctgagagtgactcttgtgccacccctggcccacrcgggcctctctcactctggcagaggcttagcatggctggggtgggtggccctggctgggttcctgctgagggctggctgaggcctcctgctcaggcaggggcaggcatatttgcagagcagcaggtgcagcctcccagtgtttggccagccaagggttttattctccaacactgccagacctagactttgaccctcagggacttctacacagctggccttccagatcactgcccccatagcctctatatctccaggggaaaggctgagccagtggctgagactggcaaagtgccgagcaccagatacccagaacccttagggcgaaaccaccagactcacatgccccaaccctgcagtcgcctggggccatcgggcgggtgtgggggtgggggtgtataggggtagaaggagctttaaaaaattaccagtgctggccaggcatggtggctcatgcctgttatcccagcactttgggaggaataggcgggcggatcacttcaggtcaggagtttgagaccagcatggtcaacatggtgaaaccctgtctctactgaaaatacaaaaattagccaggcgtggtggcgcatgcctgtaatcccagctactcgggaagctgaggcaggagaatcactggaacttgggaagcggaggttgcagtgagctgagatggcaccattgcgctccagcctgggtgacagagcgagactccatctcaaaaaaaaaaaaggatgtcctgaaggcctcttcagcccagagagacatgggcttgcgggctgggggcagacaacaaagaaacacggggttggggtgcaagcctgggacttgtaggggcccctagcagtgaagaaaggctttgcctagcacacggtggcccctgagaggatgcgggtggcaccgtccccacccttgtagtcccttttcccagacatgagctcctggcagctttatttggggtagaagaagggtcctatttatgctgtgtctgcatttagagaggctgttcactcattaagttacagactctccacctttctgaaccttggtctccccatctgtaaaataggtatatggtcaggaatgggggtgggaattgaggattgtgggagccttctggctttaaaattatgagccctgaggaagatccctgaaagagcctgtgctaggtaggttatgactttggctgctgtaacaaactcaagagtaagaacccatataaacaagaagccgtttacttccatcccatgcgagggaccaggctgcacggtggctgtggtggctcctggactttgggcactcataccccttccctttttgctcctccaaaagggtgcacctcttttttttttt

SEQ ID NO: 685448 - DNA, 3033 bp, Homo sapiens
tgaaggctaagaagtaataaaccatcaaaagcttcattgcaaatgctctgaaaaatctcttttccttccacagctcagcagggtgcagctctgcttacattttcaggccatgaatgagaaagttgcctttggccttatctgacccctttctccatgtcagaaagggagagaacactcacaagatggaataaaagaattgaatggtttgcttcttgtttccgtcaacccaatgtctgctgccaaaaaaaaaaaaaaaaaaaaggaaaaaaaacacacattcgaagcaaatgcttcttattaatatgcatatggatctcctgatgatcttgataaattactgtttcaggacatctggggtgaggcctgaaattctgcatttctaacaagcttccatgtgatgttgatgctgccagcccaaggaccacattttgagtggtgtgttgggcagaatcctaacaatgcccttcttcctctaagattcttataccctggttatttaatcaaagatcaatttaggttctgctggaagggaagtttgcagttataattgaagttccaaatcagttttaattgaccttaagatgcagaggttatccaggtgggcctgctctaatcacatgagacctttaaaaagcaggataggggagcagaaaggaggtaaagaaattcaaaagatgctaggggtttgacatgctgttgttgctttgaacatggagcatgcgtgtgagaaggaatgtgtcagcttcaaagagatgagggtggcctccagatgacagccggcaaggaaatggggtcttgtgaggaactggatcctgccaaaaacttgaatgagcttggaagggagtttatccccagaacctccagaagagaatgcagccttgctgatacatggatgtcttgagaacaactgagaaactctagatagaaaaaaacagctcaaccatgctgtgcccagactcctggagtcattttaaatggctaagtttgtaataatttgttaggtagcagcagaaaactaatacaagtaggaaggttgtaattcaataaaactaagtgaaatcttgccattcatatttggggtaaaaaacaagttttgatccttgtttcttgataaccaaacatagaatcatttttaatgcaaagaacacagaatttgcaattgacaatatacatatagtggtctcaactctttctcttttacttctttgactttgaagaaacctttaaacctttctggacttcagtgtcctcaagatttttttttaaaaaaagattaatattacctctttcaactaactgctatagagaggttaagaatagcatacaaaataagtgaaaaagtcttgtaaactataaaatgctagtcatatatacagaatcagatatagtgtacgtttaaattacgcctcattgaacttttctctggtcataagaaagttcttcagatgttgaaataccataatttactgttcaaaaatctcatcattgcaagtgacagtagatgaaagtgaaaacaaacactttgaaaaccccttgtcgtcacccacccttcttatcagaggtagttttttaatagtagagtctcagacacaaatgtatatcacgtccttttttttttttttaagagctgtaaagtaaaagctgtattttattggattaattgaaaaaactagtccatccaactttttctcttttgatgtcaaatgtactcaggtacgttgtaaataattcaggtgttatttgtaaacaagattgctctcagatgaacaggatggaaattactgagagacaggatatgggtgagttgtgtgttgtgaaagagccatgcagaaatgaactcggggttaacagaagatatatctaatatgtaataccttcctatgcacggtgccaaatcattagtttatggcaacctttcctctgcttttagtgtgtgttaacttttgcagtgagcagatgcagccacgcacattctgttcggcagaaggcagatgccagtccctgaaatgggcgcccagttccaagggcaacatctggatccctgggcttggctctgttcctgtctgtgcttgtggctatacaatgccccctggagacattttatgattagtctgcgacagagttggcatgagtgtcttgtctccctggcaaccattttccctttgattcttatacatctgctcagcaatatactgtatttgggaaactgctccctaccttatttccaatcacaaagccaatgacagaggacttttgctgaatgggatatcattttccccggcgtctgaagctattgttttccagtgtgctcataactgcatcaaactgcagagtacatcttctctgcaaggccactaagtttaggacaagcattagattctaatgaatactcagaggcacctcttgaataagtgaggagttttcagaagctaagtgggagctaagtggttagagcagcctggccagccttgtttcttggctaagaagaacctggttggatgaatctgtatttttcwcttaaaacaaattattaatacaatttttgattgacaaagcataattgtatatgtttctggggtatgatgtgatgttttgatatatgtatacaatgtagcatgattaaatcaagctaatttacctgtctatcaccttgcttacctatcattttttaagttgagacatttaaaacttattctctttgttgttttgagatatataatacattattgttgactgtattcctcactgtctctctcttgctcttttttattgtcagatccttacttacggaagtaagaactcagacttcccttatctgaaagagcattaggctatacctttatttactccctcccagcaaaaggctattgttaacaggtatccctcaggttgcccttttgtctgtagagaaacaagtgtgagattgaggcatgtgtcaacactgagtcagttattagccatatcgcaggtgaaactggagaacagattagaagaaaaatgaactcttatccccagcccatcctgtatgtttcc

SEQ ID NO: 685449 - DNA, 656 bp, Homo sapiens
ttgacaatattattgtattgtctgcataatactttacsttagataccataatttattttattcttcccctttttcaatcatttagtttttaatttattattattacaaccaatgcctcaatgaatagccgtatgtgtcattaaaagtatagtcaatgatttatttgttttctctacactgatagagctgaaatcactgtgaaattatttaactattgcttctcatgtagacagaattaagaatacctgaaatgcagtctggggtttcctttggaagcatgtagatatttagataccttataatatgcacatttaatttttaatgggtatgtaatatattcattgacttcttttcttattatgttcttttgtacactatttatctcctagcttgtgataagagctcagtaattatttgttgaatgagagtttgaatgcaattcctggtcaaagtatgtaaataagtttaagagaacaagtcttgaaagggatcagaatagtgcaaacgtcaggactttcacaaggtagaaacttagtccagctttagcttttatgctttggctaaaaaggaggccatgtgtgcatgcactgtaaaacagaaaacatccctaattgccttgtgttcagacagtcctggggtgcactcatttcctgata

SEQ ID NO: 685450 - DNA, 616 bp, Homo sapiens
atacccaaggcctgtcaactaactagcagatatgaagtgtctactatgtgtcgggtggtctgctaagagtcagatatataaatggaataataagtgttagtatctttccttaagaaatttatagcccagctacaatttattatttttttctttggttttattgactaacctaaactgtgctgagccctttgccaaacaagttaatcttccaaatatttttaaattgtttattgtcagcttttccgttgcctcctcttattatctttcctatttggcaatacaattttaatttttttaatcattggctttgaaaaaaactttgctaataggactggttcagagtatttagccttcatgtcatcccctttcgaaagaaaatttctcaattrgattggaaaatttaattccttgcctgtatgttttccaaaacaaggactatttccatttactttcctgtgaagctgaatataattccagtttctcacaatttgctactcactgttctcctggggaaatgaatgattcatctgacttgtgtctttgggagagggaatcaagcatgtccaactcagatattttctcttctgctctgctcatatttggggtgagccaggca

SEQ ID NO: 685451 - DNA, 1295 bp, Homo sapiens
cattcattcatccattcatatcatcagcttgcctaagtgcctagtaacaagcaccccaaatatctcaagggctgaatttgtgtcttctacattgctgaatccctaggaattaaaattatccaagaaacgaactctcatacaaaagaagacaaaaatatgtcaacaattggttaagttctatgacagaagtatatataaaagacaatggtgagaccacctaagcacataggagattctcaataaacaatggctgaatgaataagcataggaaaatagaaggtagagtaatttcttagccagtagaatggaattaagttaaaaccaaaccagacagtgagaacaccttgtacaaagaccaataagtattgcagaggattcctagtcaggtttctaaataatgtctgggcatggttggaaagcagaagatacgacttttgcagacattcactttcccccttttccaccatatttggatttctattgcttctctgttcttccacctgattcaggactcagatgatcaaatgtctgttctgtgatgaggggcgtgctccacgctggacaattggccctaccatcttctctagacggaaatgaccagttacatttataactggcatccacaaagacttgtcaagtgttttaagactgtttatgggcttattaaagacaaattctagtagtggaaactacactgcttctggtttgcatctggcgatgacacttaacatgctgttttcctaaagaaaatactgaaactctataagcctcagttgcttcatttgtaagatgtgcataataagacttcacagagtggttagcaatggagtgaatggcatgcaaataaagttctgatacgttgttttccttaaccaatgtatctccctcctttttgatgttgtaaaatcagtaactgtattctcaaaggaacactggaattctggctcaataaccgagttttgtttttgttgttttcatttgatttactttaccgtctcttctcagctgtgatgttgtttaagtttgactaactgaggagattaactgaatttaacaatagaaatatactttgttcctgtattaaaaaatccaaagtttactttttgcatatgttttttcagttttattatgagaaaaacaccttctactggcctttacttgaaaagacaatagaattttactatatgttaaattggcctgagaagaaattcgaactsttttgtttcataagtaatcagttttgttcatgtatacatcctattatatttgtattttttaatattttgttaacccca

SEQ ID NO: 685452 - DNA, 693 bp, Homo sapiens
atcctttcaccccagcctcccaagtatctaggactacaggtgcatggcaccacatccagctacctttttttgtttgttttttgggtttttgttggtgttgttgttgttgktggtggtggtggtggggtatgtgtgtgtgtgcgtgtgtgtgtgtgtgtgtgtgtgtgtttagagacagggtgtcccaggatggtctcaaactcctggttgcaagtgatcctcccatctcagcttcccaaagtgctgtgattacagttgtgagccactgtacccaacccaaagatgctccctgctcagactcattattcttgtgttagcacatatcttcattcatttctgtttacattctagcactctacaattgaataattgagaaatttactcttgcctaaacccaccatgtcattttatgcttctgaatcttgtgattgactttcctaatctcttcaatgtccttcattgcttctattgcttctgtttgctcataccaaccttttcctctatattaaataattttctgtgaatggtttgcataacctttgtgttgatagagctaacattatgcttaattcatagctggtactcatttaatgtttattgacttgggatctgccaatgggatattgatcagcaacaatatccctctgcctgaagaaccagacaggttattttttaaaagattattttctttaa

SEQ ID NO: 685453 - DNA, 617 bp, Homo sapiens
ctctttctgtccgtaccccatgtgtagttttggatttggattacctgtgagtccggggcaggagacaccaaaggggaaaaaaaacccaggaaatttactgctggttcagtggtactttatattctggtctcttcccccaaactgcttactactatttgcttttcagaagcactagagagctgctccatgcactctgtccaaggctttttgttgcattcattgctttcagcaggaaagatagaatgtgatatacctcctccatcttcctcagagctggcttttaaaaatagttgcatttataacttttttgagtcattttgttatagatgtatctcttatacaaattatgaagttagatttagaaaacctcaacaatctgatagtttctgtcttttttgttgttgttgtttgtttgacatggagtctcgctctgttgccaggccgaagtgcagtggcgcgatctcagctcactgcaacctccgcctcctgggtttgagcgattctcctgcctcagmctcctgagtagctgggattacaggcacgtgccaccatgcctggctaatttttgtgtttttagtagagatggggtttcaccacgttggccaggatggtctcga

SEQ ID NO: 685454 - DNA, 457 bp, Homo sapiens
ccaaaaccttttgagttggggctattatttttcctactttacggaagagaagattaagtctgagaggataaataacttgcctgagctaaagaagctggttggcagtggggagagaatgaacctcagaaattctagctccaagccttgctcgcttaacaactagacaatagtatcatctctcagagattttctttattctctgcttgaattgtggttatgtcttgaccaaatgtagcacttgaatatgagactattagtatatgtgccagtgattgaaacctgtgtttagttccagagctttttgcacaccatgagtgtaagagcagagttatatgaaaggaataaaacmattgttcacttagggcacaaacagattgccttccttctgggccctatataaacctatggaaggatttttcttcatgagtttaaaggtatctggcttcttatttgtatg

SEQ ID NO: 685455 - DNA, 3469 bp, Homo sapiens
attgtagtgatattttcatggaatcaaagtaaaactacactattttactcatggtaatatcaattatatattttttgcaaatatttcttgatcgttaatttttcttgtccaatttttgtacacattcaaattttcccaatattcttccctattacacctgctggggtgtgattgacacaataactactttacattagaaactaaatattttatttaaatgaaatgtagtcaacttagttgatgaaatatttctatacccctgaaatcgttcttctgaaaagaataaatgttttgctgaaaactgttgtcattccttttcttgtcatcactttctttttcattttactgcaacatttaacacttcatagcccatgcaattttgctctgtaggatgaagacagagtgtgcattgctctgtctacatttggatggctactgccccatttagctagctgcagacaattggctcatttagaaaacatttcaccatccaggcaaaaatatgtaatgaaagaacaaaaaaggccttgaagatatttctttctagaaaatcttggaaaaaatgatactgataattttcttatagtaaaagatatttactaataaattaatttcatgcatgccagataacctgatgtgcgtgaaagaacaaaggatgtgtagtcatagtacttgtgttaaggtcctggctcaacaagtttctagtgtgtgtgaaggtaagccaatcacttaatattttgcctcagtttcctcattggtagataagcataatagcatgttccttccttacagagttgttgaaaagagtaaagaaaatcagacttgtaacacaatccttaaaactgtgacctatcatgcattttagagcatcaagaggttcctgatatctcatgcaaaattgcaggtttttgtgcattttcccgtacaaagagttaactaaattcttaaactagtccctgatcacttccatggaatattaacaactgctttatgcagtgctagaggttgccaacattcattgttacttttactattgagaagtagctggtgcaacagaaggagcacaaaatttagagccatgcacatcaggagatgaagctggacaggtctcatgtttactcagcagcaatggcttagccactccacgtccaattccttaattcttaaaatgaaatttataattctattagtaagaatgaggattataaattaggaactcaattaatattaattccttgatttctcccctatattttttcttatgtcattataaatttaagaaaaataataatcttgagaattcaagattctcaaatgaaaaaccttactttttaaaatttgtaatgacataagaaaaaatatagtaagttacagtaatttatttagaataaagattcaaattgttaaaaggcttttcaaccgatttttactggttttaaggattagcttagtaaggtttatttagggatatttcatgtctttttttttttaattttgagaactctctctaaactgattatttctgtgtgaaataccaataaatctttgttctctttattgtaaaacagtcaaagaagtttgtttttttttcctgatgtctaataaatgtaggccttgtttatacatataatcctttgctggaatgaaaacatagtctgcattgttttctttgtgaatttgtccttttaagttaatttataaatttaaggtggtcctttgactgtcatgttatttagtatataattttctatcttgaataaagaacttctttaaaaaaaacattcacagtattcaaacagtacattagatttgtgggatttactgtctattaggagtcatagggaaaattggccaatatgtttcttcaagaagtacttgctaatgtagtaggttcatgtacttttagagttggaacaaaatttaaaagctatgctccagcttttccactatgtatggagggtaataatggatctattgctaagtattcagagtaatagctccaatccttgtccatcacatagctagcatcgatgtatttcttaatatatactagtgcttgtgcttagtccatcattccatcctatttaatttttacaaccattctgtgaggtacttttatctcccttttaaagttaaagaagcaaaagattctaaaagcttgttaaaggacattgtwtaagaccacgtaactagtaaggggtagaatctgaattcaaatctaggtcttttatattttaaacttgtactattactatggtcaccattatcttattctaagtccactataaatgctgtctattggaattgtattataaacaatactatactgtatttttatgtattttattctactctgtaggcatgtattgtagctacaagccaagtaagtgattgaagacagtagccatggtaattaaagggctttttagtgtattttattttgctgtgccttggtattcaagaatatgtggcaaagctaatgcctgtattttctttcaagtaggtcgaaggaccaaatgggaactagcttgagttcaatagcttttatatgtaccatttttatgcctaatataccaaatcttttccgttattcatgaggagtctcccacatgaataaaataatgtcagtttccttttttgattgaacatttaacagtctatttagctttgttcaaatcctgttggattcgtttttattaattaatcattttatgttttattctttcagtattgtatgagtatatgtcactcatatttaattttatcccctcaaaaatagcttcttgcactcaggcatcttaccatttgtattgaataaattacaatatgaaatgcatttatattgaatgtattaaattataaattaaaaactctttgtgatggaggtcatctttatattctaacatttaatgtgaacgactgcatgtttcttaaattaaaagcacactgatggatgaatgccacaagcttctagccaagagcatgccctttccttgctttctacaacatattcctcttgtcatccaagtatagaaggacattgtttcagcaatatttaatactcccgcctcctccacttttctctccctctctctttttctctctatattaatcctttaccattgtatcagcaaacaaatatcctattatatgtcatgtaaaaacaaacacaattttatattggcctcacatcctctttcttctttttactgtaaaaatccttgtatgtattatcaatacttaatatttccaactttgtttataattctcacttgaaacccatcccaactaggtttttaccactaccactactctaatgaagcacttttatcaaagtctacaatgatctctacatggctaaatccattgattggtcccaattctcatcctagttgaaccatcagtagtatttgaaatggatgacctctccttattgagacattattttcattggatttttgtttcagtc

SEQ ID NO: 685456 - DNA, 1433 bp, Homo sapiens
aaaatatactcttattaatttcagactactcaagggcatgtaactattgtaactgacaattcagaagccaactgctattcctggtcaagcatgtccaggagaaacaacarcaactcatgttaaggctatttggaaggaagagagggaaatagaagggaggagaggggagggtatgggaggggatgggaggggatgggagaaaatgcagactttccaaggggtcatgatatacagaaattaaaatgttggatttatgcccttcaaaatgaaaaggaatctagctattatatcatagcctttttagaaattttccagggaagaaaaaattagaaacttaatttacaaccaatttgattggctttttccaaaaataattatagacattgtatacatatacagatgctccttgatttatgatgaggttacattttgataaacttattataaattaaaaataagttataatgcatgtaatacagctaacctatctaacatcatagtagggtttctactgaatgctgtggctttcacaccatggtaaagtcaaaaaattgtaagtggaacaattgtggggcctgtctgtactaatagccatatttaatcgtgtttcctcaaacaaaatgatgttcaaaattcttaacacattggagatactgagatacacataacttaaactcattcggagcctgatacagtctttcttcaaagccaggtattacagagctgtgtcagagagaccaggcttttagatacccctgaattgaaatgtctaaactcattatttattgtttgtctttaattgtgataaagtacatataatataaaatataccacataatcattctaagtgtacagttcagtagcattaaatgtatttacattgttgtacaaagatcaccgtcatccatcttcagaactcttttcttcttgcaaaactgaaactctgagtctctagatacaggacctatttttaatcacactgacctatgaataaggggtataaatatatatgtgtgtatttatgtatatatatgcacacatatatatttacatcccttgtaaatataaatatatgtgtatgtgtgtatacatgtatgtgtgtgtgtgtgtgtgtgtgtgtgtgtgtacatatatatatatagagagagagagagagagagagaaacagagagccagagagccaatactgaaataattaagtaggtgtggccaggggtggtggctcatgtctgtaatcccagcactttgagaggccgaggtgggaggatcgattgagcccaggagtttgagaacaacctggccaacatatcaaaccccccgctactaaaaatacaaaaagtagccgggtttgttggtgtgttcctataatcggagctcttcaggaggccaaggcaagagaatcgcttgaactcaggaagcagaggttgcagacc

SEQ ID NO: 685457 - DNA, 1433 bp, Homo sapiens
aaaatatactcttattaatttcagactactcaagggcatgtaactattgtaactgacaattcagaagccaactgctattcctggtcaagcatgtccaggagaaacaacagcaactcaygttaaggctatttggaaggaagagagggaaatagaagggaggagaggggagggtatgggaggggatgggaggggatgggagaaaatgcagactttccaaggggtcatgatatacagaaattaaaatgttggatttatgcccttcaaaatgaaaaggaatctagctattatatcatagcctttttagaaattttccagggaagaaaaaattagaaacttaatttacaaccaatttgattggctttttccaaaaataattatagacattgtatacatatacagatgctccttgatttatgatgaggttacattttgataaacttattataaattaaaaataagttataatgcatgtaatacagctaacctatctaacatcatagtagggtttctactgaatgctgtggctttcacaccatggtaaagtcaaaaaattgtaagtggaacaattgtggggcctgtctgtactaatagccatatttaatcgtgtttcctcaaacaaaatgatgttcaaaattcttaacacattggagatactgagatacacataacttaaactcattcggagcctgatacagtctttcttcaaagccaggtattacagagctgtgtcagagagaccaggcttttagatacccctgaattgaaatgtctaaactcattatttattgtttgtctttaattgtgataaagtacatataatataaaatataccacataatcattctaagtgtacagttcagtagcattaaatgtatttacattgttgtacaaagatcaccgtcatccatcttcagaactcttttcttcttgcaaaactgaaactctgagtctctagatacaggacctatttttaatcacactgacctatgaataaggggtataaatatatatgtgtgtatttatgtatatatatgcacacatatatatttacatcccttgtaaatataaatatatgtgtatgtgtgtatacatgtatgtgtgtgtgtgtgtgtgtgtgtgtgtgtgtacatatatatatatagagagagagagagagagagagaaacagagagccagagagccaatactgaaataattaagtaggtgtggccaggggtggtggctcatgtctgtaatcccagcactttgagaggccgaggtgggaggatcgattgagcccaggagtttgagaacaacctggccaacatatcaaaccccccgctactaaaaatacaaaaagtagccgggtttgttggtgtgttcctataatcggagctcttcaggaggccaaggcaagagaatcgcttgaactcaggaagcagaggttgcagacc

SEQ ID NO: 685458 - DNA, 2026 bp, Homo sapiens
caaatggtctatgacatatcccaaaaatacctaaataaatctaaatttcaataataattacgctgtactcaagttttgtaagagaccatgattgatttgtcaagtgctccttaaaggcaaactatcataatttgtcctagggaacaaaaatttaaataaaaaacatttttctcaagataacagtgtactatttgagtcctccaagaagcagacgacataacagaattagacctgaaaaagatcatttggaggaaacgcttaggcaggaaagtggagagagatccagagaagaaagaaaatgcacatctgacctccctgtgaagttgagagggaaggaagaaggatcaaggaagaacagttacagacttttgccagcccaaagctgttcattaaacaaatctctcctctcggaggaattggcctgtgtactcagtcactggctgttgacaatctgggggaaatatggcttcagcaagaacttagagctgatacagagggctcacagcagtacttgtaagtcaactatgcttcctgccccagaaggatttgatgaacaccttttcaagctgcacataaactaactgtgaaatgagctagaggacaaagtaaagttttcctaactttactaatgttaaactttactatataaactaataaatcatagtgtgactttataacacacgcacacacacgggaaacaaatttaaaagaagattatcattaagtgtttaaagagagcttcaaagaaaaaatagcaatatttcacctggcctttgaaggaggggtgggatttccgtagcacaagtggaagaatggctttccaagcaaaggaaccagtaaactacaacataaagacactgaaatctggccgggtgtggtggctcacgcctgtaataccagcacttcaggaggccgaggcgggtggatcacctgaggtcaggagtttgagaccagcctggccaatatggtgaaaccccgtctctactaaaatacaaacattagccaggagtggtgccgggcacctgtagtcccagctacttgggaggctgaggcaggagaatcgcttgaacctgggaagcggaggttgcagtgagtcgagatggcaccactgcactccagccttggtgacagagcaagactctgtctcagaaaaaaaaaaaaagacactgaaatctgtgttgtgtgtgtgtggcatccagcattttgatggtcctggtgtagagttatgcgggaactaggttagaagagattgaggagaaagtatcctgcagatcaagaaagtgacctgatttgatcattacacattatatatacatgtatcaaaatatcacactatactcataaatatgttcaactattatgtgtcaattaaaaataataaggccgggcgtggtggctcatgcctgtaatcccagcactttgggaggccgaggctggtggatcatttgaggtcaggagtttgagaccagcttggccaacatggtgagaccccatctctactaaaaatacaaacattagcccagagtggtggcatgtgcctgtaatcccagctacttgggaggccgaggcaggagaacctctttgaacttgtgaggcagaggtttcaatgagccaagattgcatcactgcaytccaggttgggcgacagggtgagacatcatctcaaaataataataataataataatattaaaagcaaagacaaagtgagaaatgaagtcacatgaaggggttaattccagtgtcagcaaagaggctgggtcggaagtggagagataaggaatgagtatgaggtggctcagaagcgaaggtgaaagacgatgcaaaggcaatgggaatgaggacaagctgaagattgtcagtatctggaggagcaaggaggaaagagagaatgagtctgaaatcagtcagtacccttgtcttgcaggactgtgcaggtaaagaacatagaggaaagagttttcagagaagaaatgttcagattaacactgagttcaaggcacagtgcatagtatattggattgtca

SEQ ID NO: 685459 - DNA, 1535 bp, Homo sapiens
tcttcaaaaggcactaatcccattcattagggccctgacctaatcacttctcaaagctcccatctccaaacaccattgcattagggattaggcttcaacatataaattttggagggacacaaacattcagtccatgtcatttggtattattttgcaataagaggtctcagtcatttagctgtagagatgtttacctatacgtctagtttcaggggatacagttctaatctcaactaaaaaattataaattaaagaatagggaatttgctggcctctttctggccttgtccttaggcaaggaaaatggggacataggagtaggcttggacaacaggggaacatatacctccaggtcttttcaaaatgtctgcaatggatctctctctatttccccaatgtgaagattcctccactttgaggttggaattcttatgtaccatggacaaagtaacttttcaagattatataaggaaagttacatctccaatactgaaagccattactcttctgtgctgagattaatgcttttaccaggagaaaaataatgggcaacagaaacccagaaaaatgtatcagatttggtgatttgggaagcagtctgattgaagatgacatacaccaagagagaccccaaactgaatcgataagcagtttaccaaaggagctgcgttatcagaaattccaaaataataaaacaaaatattgcaattcatgtarctaaccaatttggaagtgaatcttcaagtaccagtcagaagtagattgttgtgatgataatgtctctactcttacacccttgcggaaattcttcttcattacttttcttagtgtaacatttaatcatacctgacaagtaaaactcttgcagcatcaaagacaccaggataaactgaaagctcagtgaaggcagatgtttgtctaattttgttcactgaaaaatactcaatgcctagaacagttttcagaatacagaagatgctaaatacctgattactgaatgaacaaatgaagaatagaacgcacaagcaggtgccaagaaacagtccatttccaaagaactgagttcctaagctgattccaaggacattctttggtccttttactcacctaacaaatccttaccctctaggattcacaaaatgctataggatataccaatatattttgggaatatcttttcttcattgcctctttctaaatatgggtgttttttagttgtcttcttttttcttccattttgtatgtctttttcttttttgctgtcattttaagatcacaggcagtatttcattccctcatgtgtgaatacagcttcaaagaccctctcaatctccttattttgactgagtctgtttctataggacatcagattccattttttggaagaatatacgaagttcaatagactcatcatgtactaagcaattattgggccatgtattcaaaacaatgatgcattagctttgaaaacacttacatggattagaataaagttgtggcttccacaatcaacagtaattcctataattttaaaa

SEQ ID NO: 685460 - DNA, 606 bp, Homo sapiens
tcatgacgatcttcacctaagtgtctggacatgtcggacagggtcactttagagtgaggataagtttttttgttagagataaagtcatttctacaggtaaagtcagcatgtgagaattaggagtgtagggacagagatgcaaaattttttaaagcgtcaactaatgtaaaactagttttaacaatgtttttaaagcagaactatgaagttgaaggagtagtaattagaaacagaaggggcagagaaaatggagaagaagaaagaccttaacatttaaaataaataaataaattgaatttgaaatatctttctggtttgcaggtactcttcatgagggttcagtagcgataaccaaaccactctacatatttcaaccacaaaaaaattaactcatgtaatttggtgtttaagaattcattgtaatttgtcagagagagagagagagttcttgtagtatggtcttctttggtctccccagaagggtccccggaatcttttaaaacagacccagcagagaggggaacacctggggcaccactaagawggtatcagaaagctaccacaggactttccaagtttaaaaattcaccactgaatttttgattc

SEQ ID NO: 685461 - DNA, 625 bp, Homo sapiens
tctgaagagttccaaagttggcacagagcatcacatggcaaggaacctgaatatgctagctcaggtttgtcttcctcttgttataaagctccaagttccactcccgtaataacccattaatccattaatccaagaaagaattmattcattcatgagggcagatccctcatgatccaatcatcttttgaagttcccacctttcaatactgccacattggggattaagtttccaacacttgaagtttgggggacacatttaaaccataacaccattttatttatttcaaatataataattcatacttatctatactaggttagaggagagcatagaaccttgacaaaataggacagaaagtaggcattcccattttaatcaccaatatttcgtatttttcattgtctttcagaaaagagaaacaaatccttcagctcaatctttccagggacattcttaacacaaactacatgttgtattaggtcatgggaattgtaataatttcaaaaattagaatttaaataggcctaatttataaaatattaaacaggtaaaacaattattgcaaaacacaagtaatgcaatgtctaggaatttgtgcaaaataggtagttataaaaaacacac

SEQ ID NO: 685462 - DNA, 393 bp, Homo sapiens
  misc_feature 2, 3, 4, 5, 6, 7, 8, 9, 10, 11, 12, 13, 14, 15, 16, 17, 18,19, 20, 21, 22, 23, 24, 25, 26, 27, 28, 29, 30, 31, 32,33, 34, 35, 36, 37, 38, 39, 40, 41, 42, 43, 44, 45, 46,47, 48, 49, 50, 51, 52, 53, 54, 55, 56, 57, 58, 59, 60,61: n = A,T,C or G
  misc_feature 62, 63, 64, 65, 66, 67, 68, 69, 70, 71, 72, 73, 74, 75, 76,77, 78, 79, 80, 81, 82, 83, 84, 85, 86, 87, 88, 89, 90,91, 92, 93, 94, 95, 96, 97, 98, 99, 100, 101: n = A,T,C or G
annnnnnnnnnnnnnnnnnnnnnnnnnnnnnnnnnnnnnnnnnnnnnnnnnnnnnnnnnnnnnnnnnnnnnnnnnnnnnnnnnnnnnnnnnnnnnnnnnnnattcatgaaaccctctaagtaatttccctaatgtggataataaaaatgcattgggcagatatcatttattgatctaggactatgcttactaaaatagggtacaggyagacatgccaaggacttaagccctgaataaataaacgcatcttcctggaatgccaaacttattcaatggtccttaatttaatacctttttctttttttaatacctttttattctgtaaacaagaattcctatgctatgaatagaatatatattttcgtgaattttgaagataaaacaagaaacaat

SEQ ID NO: 685463 - DNA, 1371 bp, Homo sapiens
aaggggtttcaccatgttggccaggatggtcttgatctcctgacctcatgatccgcccacctcggcctcctaaagtgctggtattacaggtgtgagccaccgtgcccagccgatcacgttcatttcaaatgacaaatgatgatttgttgaaactaaatagcactttttaggtttaatgaaaaagatatatttcagatctagtttcctatttgttttatccacaaattagctttaatgacaataatgcaaaggatgacttttacataaatgtgtttttcagaaaagctaatacactaaaatctttgtgctctatttcaggataatcagatctcacatttatccaaatcagcaaataagaaaataaagtttctcttgataattctctacaactatcttgtttccttgaatatattattacacttgtggcattattaaaaccttaattaaaattggtatctgatcaattataaaaggaacttggaaaagaaaatgtcttatatatatttatacattatatattatataaaattaagtrtatatatatatatatatatatatatatacttaattgctaatcaattgttgcagaatggtgtgaacaaaggtgggatcctcacaatacattcacaccaaatcataatatatcattaagttctatggcccagatgcttttgaattttgcatacctgtgttgaagcattccatattataatcattagttcactgtttttctgtatttgaacaactgtggaaaacctccatgtgtgtagtgtgctaacacagtatttagccttcacatgttacgaaaaaagtcataaatatacacaggagcaccaaaactatatgaaatttagttcaaccagaatataccaatttgcagatcgtaatccaaatgaaacattaaatttaaaatatcttctgtatacttcaaatccccaagaacacacacacatgcatacacacacacataccacacacacgcaccacacacacacaccacacacacgcagcagtgtgaaaaatactagttttttacaggaatgctggtaacattttttaccccttaacacataggcaagacacttgaagaagtatcccagggttatgctcagttctggatggttatttataactccactcatttctctcccactcaaaaaaaagcatattggaattcaagtcacatgaattcatagagataacccaaaatatgatctaatttacttgtaaagcattttgctaaattaaaaatttaaacaataattaataaattatttgtagtacattttagaatactaggaatatcattgattttactacagttacagttaaaaataaaataaaatttaggggagaaacaaaggggagggc

SEQ ID NO: 685464 - DNA, 1371 bp, Homo sapiens
aaggggtttcaccatgttggccaggatggtcttgatctcctgacctcatgatccgcccacctcggcctcctaaagtgctggtattacaggtgtgagccaccgtgcccagccgatcacgttcatttcaaatgacaaatgatgatttgttgaaactaaatagcactttttaggtttaatgaaaaagatatatttcagatctagtttcctatttgttttatccacaaattagctttaatgacaataatgcaaaggatgacttttacataaatgtgtttttcagaaaagctaatacactaaaatctttgtgctctatttcaggataatcagatctcacatttatccaaatcagcaaataagaaaataaagtttctcttgataattctctacaactatcttgtttccttgaatatattattacacttgtggcattattaaaaccttaattaaaattggtatctgatcaattataaaaggaacttggaaaagaaaatgtcttatatatatttatacattatatattatataaaattaagtatatatatatatatatatatatatatatacttaattgctaatmaattgttgcagaatggtgtgaacaaaggtgggatcctcacaatacattcacaccaaatcataatatatcattaagttctatggcccagatgcttttgaattttgcatacctgtgttgaagcattccatattataatcattagttcactgtttttctgtatttgaacaactgtggaaaacctccatgtgtgtagtgtgctaacacagtatttagccttcacatgttacgaaaaaagtcataaatatacacaggagcaccaaaactatatgaaatttagttcaaccagaatataccaatttgcagatcgtaatccaaatgaaacattaaatttaaaatatcttctgtatacttcaaatccccaagaacacacacacatgcatacacacacacataccacacacacgcaccacacacacacaccacacacacgcagcagtgtgaaaaatactagttttttacaggaatgctggtaacattttttaccccttaacacataggcaagacacttgaagaagtatcccagggttatgctcagttctggatggttatttataactccactcatttctctcccactcaaaaaaaagcatattggaattcaagtcacatgaattcatagagataacccaaaatatgatctaatttacttgtaaagcattttgctaaattaaaaatttaaacaataattaataaattatttgtagtacattttagaatactaggaatatcattgattttactacagttacagttaaaaataaaataaaatttaggggagaaacaaaggggagggc

SEQ ID NO: 685465 - DNA, 909 bp, Homo sapiens
gtatctgaatttctctattcgtatattaatatcaatcacatttttccagtcttgcttgttgaaaagaacaagatatctaatgttttgccttctttttcctttgaaatctatcagccatcaaatcctggtgtttccttctttgattcctatagccactacaagttacccccacctgctgaagagccaccatattattttaaatggtatcgtcttaatgctctccccactccctacttttcctccctaaaaacyaccagcatctgtctaaaacagaacttttgttacatataaggattcaataatcatcaaaggctaaccaattattgcaaagtaatataaaaactcctttggcattcactgcttttcacaatgatcctactgtaattaaatgtaccttcactaagcatatcgccacagtaggtactatgccaagataaagcacaattcctgaactgaacataaatttgcacaggaattcagcttcaaggacatgtgctacaatattatttatgatggtgaaatttggttaaactctttggttaaactatggatgtatcaaaaaccaaagctactgttgtccattaaaaattgttacatagggtggtggctctcccctgtaatcccagcactgtgggagactggggtgagtgaactgctcgagcccaagagttggagaccagccttggcaacatggcgaaaacccacctctacaaacaaaatagaaaaattagctgggtttggtggcatgtgcctgtagtcccagctactcagggcactgaggtgagaaaattgcttgagctcacgaggccggccgaggctgcagtgaactgtgatcatgctaatgcattccagcctgggtgacagtgaaacgtgcctcaaaacaaaacacaaataacaaaagaaaaaccc

SEQ ID NO: 685466 - DNA, 1149 bp, Homo sapiens
agccaaaggccccgaggcccaagcataactggcatggatgaagcagaacgtggtggggataatgggaagccactggataacttcaaacagaggtgtggcaccgtctgacagatgtttaaagggtttattttggctgtgttttgagactagaccatagtgagcaagtgtagatgcagggaaactacttaggaggtcaatgcaatactcttggtgagagatgatgtatctggtagaggtagtgagaattgattggattctggatatattttaaagatagaatcaataggattttcttactgaaatatgggggtatatgttgagagagaggagtcaaacttgacaccaaggttttgggcctaggcaaaagtctaagaaggagcagtttggagaatgggagagaataagagttcagtttgagacattcatttgaaatgtctgttagacatctatttgcaagttgctatgaggagagatcagtgcataattataggccgactatmtaaacttgtgagttgtcattttcctcctccattttttaaatggttgcatatttaatccctttgatgactagaataagctttgctctaatatgggtttgaagtatttctatacatctttatgctttgaagggatttaatgtatcttataaaccttgaatttattttaactgctaaggacacttggtcttgaaggaaaccattttctctagggattgaacaactttattttaatcaaaatgtgaaaataaaaatagtgttgttactgccctttaaaaatggaacagtctggctgttcctcagagttaacgtggttaaaaatggtaacggtttacgatccagcacttctcataggtatatacccaagagaattgaaaatgtgttcccacaaaaaaattgtacactagtgaccatagcaacattattcataatagcccaaaaatggaaacaacccatatgcctatcaactgataaatggataaacaaatgcggtatccatgcagtgggatattatgcagtcataaaaaggaatgaattactgatgcattttatattataaatgaaccttgaaaacatgctaagtaaaaaagccagatacacaaggccacatattatatggttccacttacatgaaatgtctagaatagacatt

SEQ ID NO: 685467 - DNA, 987 bp, Homo sapiens
cacattaatggaaaacagtttccacagttaatgtgagcatgctgtggctttccgtgtggggcgtgtgtgtgtgtgtgtgtgtgtgtgtgtgtgtgtgagtgtttctttctcaaacttctaacaagactttttttgataactggggagtcatcggtttgttttgtttktgttttttcttctccaaatgttggacaaacacgataataaaagagtaaacaaagaaatgcaagattcatgcagaagttattatgcataacttcttggaccacacaacaaaaagaggtgtgagtattcgagttaataggggattaaatgattattgtctattaggagataattacaaagagacgtgacttcaatatactaaaaagaaaagttttccggtttcaccgtataatgctgtgaaagcaacaacttcaagtgtcaatgatgcttccagtcaacctcaggaaatcttttgacagatatttattatccaatgccaggtcaccctagaccacaaaaggaaattctgtgcttagtacatcaagacactatgggctgagaaaggtttgctttcagcacttggagttttctcacgaaaccgcctttaaactcaccacaaaccacaatgtaaaccagtgcgcttcagatatgacttgttaacctaattccaccaaattaattcacccatttttaaaaggatttctaatgatgcaaacaaaagctccaaagccatgagaacacccatttgaattcaaaggttggcagagaaaatattaatgttttgaaaaaaaatacgcagaaggaaagcattgaattctacagtggccaatgtaattttacccccaaaaaagttatttactgagaaataaatgtgtccatttcagaacagagaaggtatgtagcaccccctgacttcatttccctgcgggggaaaacaaacgtgtattctaatttaaagtggttgcttgtctttctaattctaatgtgcagttgctagaaaaa

SEQ ID NO: 685468 - DNA, 968 bp, Homo sapiens
tgttattattattttcttctatgctaaagttaaatgtgatatgtaacaataactttcataaacagtaggaaaattgcacagggattttcttggttcattaacatgactctacacgcttccaaaaaaagtatgaggacatagaaataccccagtggtctataaataaccttgagaattcagtcttttgggacacaagatgttctcaggttgtgtaagttatacttaaacattttctaaaagaactagccacagtgcagttcacacaggtcacgattttcgtacttatcaagattgcttcataaatattatctcattttgaatcaggaacaagttttataatgaatacatctaaataggctttggcagtgcttacatcgtgttggaaagtcaaaacctaaaaaaccagattattcaacatcattgtaagcctctaaacccaaatgtctgacaggatgcaagtgtctgtctctctgtgtgtgtgtgtgtgtgtgtgtgcatctgtgtgtgtgcagtgtagacacaatcttaaattgcctaatgttggaaaagcagacagtgacaacagaggcacaatgatagatagccaacacatttacacaccaggaaactttatttagagagtcactgagatcatacatacggaaatgttcttctctatcttatcccatagaacctccaccatccactctgcagagagtgctgccagtacaggcaaaaaagacacccacacaaacaaaaawggcctgagataaccacagtttgaagtctacaatagagaaatgtcctatctctggataagcagggtctgtggtgactcctatttttcttctcagatttctgaaatctcttccctcaagtgtaatcgacattttgctccttccacccgcctcaccatcaccactattccaaacaaacacccaggaactttgacagtaagagaatgattgcattggtgagaagctgggtga

SEQ ID NO: 685469 - DNA, 591 bp, Homo sapiens
catccatcagttccactgctaattctggtggcagtgagtttgactatcatggcctctggtctcccctctgtaattttccaatttggtcaagatgcttctacactaagcaccagggcgccttccaatatgatcacacaggtaattacagtgcttgtttatttctcttgtacaccagactgaaagctctggagaaactgaggccatggctgatttgttgttgcctctttagaatctaaaacatagcaagtgtccagtaaatgtkgaataaattgtttttacaaaaaaaggtaatgaattttcttgagaactcagagctaagaggaaaaacagaaagcctatctacttctcattctcggaatgtatgctctgaaagttaaatgctttctttgtgcacctagcagcacaggtcataacagaggggctcaataactatccaactaagctttgggggttaaaaacaaaaaagaagtgtaggtgaaatgaagtgcacagaggcagggtgagaggaatgctatgtaacactttgctgaagaacagttgacagctgggatataacgtcagagagaagatcaacccaacatgtggttatca

SEQ ID NO: 685470 - DNA, 619 bp, Homo sapiens
cagaatactcttgcttctaaggctgaataatatttcattgtatgtgttataacatattttacttaccatttatctgtctatagacatctgtgtggctttcaccttttggccgttatgaataatgctgctctaagcatggttgtataaatattcattcatgtgagttcattcaagtctctccttttaattcttttggatatatacgattattttaagacaaaakaaattctaaaacatagtaagctttctctatgtctgtcagccagtaaagaatctggaaaagagatgaattatttgtcactatgtccagcaaatagctccagatatcatttaggaaggaaaattacaaacttaaatgacaatgagcctttataaatgctttaactaaattaatattttggggtcctaggtaggtagaggtatacactatgattaataataaagcatatttattgtctattcaaagttctgtttcattgcttggtgcctacaccttagttctgtgtgttttcagaatctaccttaatagatattttagcttatatctcaactggcaaatcatatcctgttagaagtaagaatgggatagttttatttgtataaccactaaagattgacc

SEQ ID NO: 685471 - DNA, 617 bp, Homo sapiens
ccatgtagcctaccatcttgtatttccaacactctctgagcacagcagaggttctgccaatggraagcccattgtctctaactacccaggcatattcacctcttgccactctaccctctccctgcctttacaaatttgctgcaaagctacagatttaagactgaatttttacataaatgcacagagtagtcataaatctataaatttaagactctaaatttttaccattcaaattccttttagcttaatcatcattttatgatgtttctctgaaatatctctatcaacatctgcttggtactggcttaaatgctagactacaaaatccgctaattgcttacttgtggaatcattcacacatgtgttgctcaccccaggatgtgacttctgtaccaagtcaacatgaacttctcttgctttctttgtcctttctttcctcttattatacttttcttttttttctagagacatgaaggggagacagggacagaactgtaggaggtgggctccaaaacatttatttctgagccttataaaaataataaaaacagcacttattaaggacttcttgaagagatacagtatagtgtattggttaaaaatatgggctctggaga

SEQ ID NO: 685472 - DNA, 672 bp, Homo sapiens
aaggcagaagcaaaagaatcacttgaacccaggaggcggaggtagcagtgagctgagattgtgccactgcacttcagtctggactacagagacagactctgtctcaatcaatcaataaataaaaattaaaccctaataaacatggagatctctgtggtttagctcttatataacatcacattacactatttaaagcaagttttgttctttactccggtttctcatgggatgttatagaacttggttcatatggcctgtaatgtacttcttacgcaattttttctctttctcaattatctatagcacaggttctctccaacctttcrttctccaaaactccctccctacatcagctttctccactccctgtaagtccaagccttccccatttcttccaactcttcatggtgttgactggagtgacctcttccaatgaggtctttcctacgccagactgtcaagcttggtccttctctgtctgatctctggcatctcaaaatccaggactctctctggtcatatagacacacatcttcatttaacttgcgtgagagaaagatgtctgaaatgaaccagttaaattgtgtacttgagaaacgtacccttaaagataatgagccatttcttaaaagcgttcacctaatcttaagaaaggaggtagccatctctaag

SEQ ID NO: 685473 - DNA, 672 bp, Homo sapiens
aaggcagaagcaaaagaatcacttgaacccaggaggcggaggtagcagtgagctgagattgtgccactgcacttcagtctggactacagagacagactctgtctcaatcaatcaataaataaaaattaaaccctaataaacatggagatctctgtggtttagctcttatataacatcacattacactatttaaagcaagttttgttctttactccggtttctcatgggatgttatagaacttggttcatatggcctgtaatgtacttcttacgcaattttttctctttctcaattatctatagcacaggttctctccaacctttcgttctccaaaactccctccctacatcagctttctccmctccctgtaagtccaagccttccccatttcttccaactcttcatggtgttgactggagtgacctcttccaatgaggtctttcctacgccagactgtcaagcttggtccttctctgtctgatctctggcatctcaaaatccaggactctctctggtcatatagacacacatcttcatttaacttgcgtgagagaaagatgtctgaaatgaaccagttaaattgtgtacttgagaaacgtacccttaaagataatgagccatttcttaaaagcgttcacctaatcttaagaaaggaggtagccatctctaag

SEQ ID NO: 685474 - DNA, 2740 bp, Homo sapiens
tatgacaagtatactgcatttaactggccataaagaatggatggaattagatacatgagaattaaaggcagcattttaaaagcttacattaatttgaccagagacactgtgaaaagcaggacacatgtaagcataaaatacattcttaatttatcaaacatttatgtaacacaagccctgagcaacgttctgaaattcatactgtgatgctttctaggaattaaaggttttgtttcagggactctttttagaagactgagattcatttttgtttaggcttaagttattaagtcagcaatttcccatttacttcgaacatgtaactaaatatagaactttactctaatccctcttccagttgccttgaatggatgatcaggtcatttcatttaatttaaacagcttgcatttccttgtctcacatgttttatttgaatgaacattttactgtgggattttcttttgaaatcctacaagtagattatataaagaggaataaaaacaaatagatttcaagtatatgccttttaaaatattaataaattcattagatttgacttttaagccttttatttattatttatttatttatttatttatttatttatttattttgagatggagtctcgctctgtcgcccaggctggagtgcagtggcaagatcttggctcactgcaagctccacctcccaggttccagtgattctcctgcttcagcctgcagagtagctgggactacaggcgtgccaccatgccccactaattttttttgtgtgtgtgtgtttttagtagagacagggtttcaccatattagccaggatggtctcgatctcctgaccttatgatctgctcatcttggcctcccaaagtgctaggattataggcatgagccaccatgcccggctgacttttaagccttttattaacttaggttttaggttccgcagagtattttcctttatttttaaacatttgtatttaaataaaaaggatttcacttgtattatttaatttcagccacagaaccagggacctaagctgtaaggcaatagtggccatggttactggcaaaagagaatcctgcattctgctggaagagggctcctggcctgggagttgagaaatatgaatgcattcttgttttgaccacatgacagctgtgtagccgttaataaatgatgttatattttagtatctcatttttaaaaatttgtcaaagagaaagtttgcactggatgatttttctagtctcctccatttcagaaattctgaaatttaccttaatatttttgccttttcattgaatgtccacttcatgacatattttgggccattaaaaaaaaacccagaaagagtatttgagaggtaagagcaatatatgtgtgaacatagcctatggaaataaattgagaaatactagaaaaacagtgactatatttctcaggcacggtttgatgtgaatgatgagaacattaaattttgattggtgcacataaggataacattttagtacatcacactgaaggtaggtaaatgactacacccgagggtgagaagaccttaggcgttatttctgacttggtcactaaataggcaccaggtcacccaacatctgtaagtcttggtttctgtccctcaagtgaaaggattggaggaaatgattagaacttacttcttttttttattattattatactttaagttctagggtacatgtgcacaacatcattctcagaactttcttctagagctctagcaggagtctaagatacaatcttaattaaaatcaaagtcaagaaaaccaaaaggaaaattctgttctagctgaccatatttagtaaatcaaagattagtcactcatatacattgagcgcaagcttttaatgaacactgtgtgtcaaatccctgggatacaaaaatagattccagaaagttaaatctaaataagaaatatataaaattatttataatgtcataggattcttgctgtcatggaagtgtgagcaaagtgctcgtaaaaatacagataagggaagaggtaactgatgtgacttgagtcttcacttatgaagtgacataataattggtatttgatgtctgaatttgagtttgtcaaaacgaggaatgggatgatagcataaagcctcaaartgtgggcattctgttgccaggaaaactgtttgagaaagtgactagttcagtgtggttgggacacaaatatctgaggaaaagatcatgaaatacttgttgaatatactgttctaaattgtatagatttattctgtgtgtcacgaggatattttaaagatgtttaagtagaagagtattacagggacctatctctctacagtacagaggacagatggaaggatgctgagactagccataggaagggaggtggctagtatagtggttctagtgagaaattaatagggaggtgaattgagatgggctgggccatgctggagtgatgagtaacccccaaaatctcagtggtttcctttcactcagtatacatgaccaatctaagtttatttcttactcaatataataaccaatccaaataggagttgagagactgctcattaaaggcattcagggactcaggctgacagcttccacagtcaccacattaaggttaaatgagcacactaagtcacacgccgtctctaacagctttaaccttgaaatgactgatttcctttcttcttgcattctctttgcaaaaccaagtcacatgg

SEQ ID NO: 685475 - DNA, 2740 bp, Homo sapiens
tatgacaagtatactgcatttaactggccataaagaatggatggaattagatacatgagaattaaaggcagcattttaaaagcttacattaatttgaccagagacactgtgaaaagcaggacacatgtaagcataaaatacattcttaatttatcaaacatttatgtaacacaagccctgagcaacgttctgaaattcatactgtgatgctttctaggaattaaaggttttgtttcagggactctttttagaagactgagattcatttttgtttaggcttaagttattaagtcagcaatttcccatttacttcgaacatgtaactaaatatagaactttactctaatccctcttccagttgccttgaatggatgatcaggtcatttcatttaatttaaacagcttgcatttccttgtctcacatgttttatttgaatgaacattttactgtgggattttcttttgaaatcctacaagtagattatataaagaggaataaaaacaaatagatttcaagtatatgccttttaaaatattaataaattcattagatttgacttttaagccttttatttattatttatttatttatttatttatttatttatttattttgagatggagtctcgctctgtcgcccaggctggagtgcagtggcaagatcttggctcactgcaagctccacctcccaggttccagtgattctcctgcttcagcctgcagagtagctgggactacaggcgtgccaccatgccccactaattttttttgtgtgtgtgtgtttttagtagagacagggtttcaccatattagccaggatggtctcgatctcctgaccttatgatctgctcatcttggcctcccaaagtgctaggattataggcatgagccaccatgcccggctgacttttaagccttttattaacttaggttttaggttccgcagagtattttcctttatttttaaacatttgtatttaaataaaaaggatttcacttgtattatttaatttcagccacagaaccagggacctaagctgtaaggcaatagtggccatggttactggcaaaagagaatcctgcattctgctggaagagggctcctggcctgggagttgagaaatatgaatgcattcttgttttgaccacatgacagctgtgtagccgttaataaatgatgttatattttagtatctcatttttaaaaatttgtcaaagagaaagtttgcactggatgatttttctagtctcctccatttcagaaattctgaaatttaccttaatatttttgccttttcattgaatgtccacttcatgacatattttgggccattaaaaaaaaacccagaaagagtatttgagaggtaagagcaatatatgtgtgaacatagcctatggaaataaattgagaaatactagaaaaacagtgactatatttctcaggcacggtttgatgtgaatgatgagaacattaaattttgattggtgcacataaggataacattttagtacatcacactgaaggtaggtaaatgactacacccgagggtgagaagaccttaggcgttatttctgacttggtcactaaataggcaccaggtcacccaacatctgtaagtcttggtttctgtccctcaagtgaaaggattggaggaaatgattagaacttacttcttttttttattattattatactttaagttctagggtacatgtgcacaacatcattctcagaactttcttctagagctctagcaggagtctaagatacaatcttaattaaaatcaaagtcaagaaaaccaaaaggaaaattctgttctagctgaccatatttagtaaatcaaagattagtcactcatatacattgagcgcaagcttttaatgaacactgtgtgtcaaatccctgggatacaaaaatagattccagaaagttaaatctaaataagaaatatataaaattatttataatgtcataggattcttgctgtcatggaagtgtgagcaaagtgctcgtaaaaatacagataagggaagaggtaactgatgtgacttgagtcttcacttatgaagtgacataataattggtatttgatgtctgaatttgagtttgtcaaaacgaggaatgggatgatagcataaagcctcaaaatrtgggcattctgttgccaggaaaactgtttgagaaagtgactagttcagtgtggttgggacacaaatatctgaggaaaagatcatgaaatacttgttgaatatactgttctaaattgtatagatttattctgtgtgtcacgaggatattttaaagatgtttaagtagaagagtattacagggacctatctctctacagtacagaggacagatggaaggatgctgagactagccataggaagggaggtggctagtatagtggttctagtgagaaattaatagggaggtgaattgagatgggctgggccatgctggagtgatgagtaacccccaaaatctcagtggtttcctttcactcagtatacatgaccaatctaagtttatttcttactcaatataataaccaatccaaataggagttgagagactgctcattaaaggcattcagggactcaggctgacagcttccacagtcaccacattaaggttaaatgagcacactaagtcacacgccgtctctaacagctttaaccttgaaatgactgatttcctttcttcttgcattctctttgcaaaaccaagtcacatgg

SEQ ID NO: 685476 - DNA, 2740 bp, Homo sapiens
tatgacaagtatactgcatttaactggccataaagaatggatggaattagatacatgagaattaaaggcagcattttaaaagcttacattaatttgaccagagacactgtgaaaagcaggacacatgtaagcataaaatacattcttaatttatcaaacatttatgtaacacaagccctgagcaacgttctgaaattcatactgtgatgctttctaggaattaaaggttttgtttcagggactctttttagaagactgagattcatttttgtttaggcttaagttattaagtcagcaatttcccatttacttcgaacatgtaactaaatatagaactttactctaatccctcttccagttgccttgaatggatgatcaggtcatttcatttaatttaaacagcttgcatttccttgtctcacatgttttatttgaatgaacattttactgtgggattttcttttgaaatcctacaagtagattatataaagaggaataaaaacaaatagatttcaagtatatgccttttaaaatattaataaattcattagatttgacttttaagccttttatttattatttatttatttatttatttatttatttatttattttgagatggagtctcgctctgtcgcccaggctggagtgcagtggcaagatcttggctcactgcaagctccacctcccaggttccagtgattctcctgcttcagcctgcagagtagctgggactacaggcgtgccaccatgccccactaattttttttgtgtgtgtgtgtttttagtagagacagggtttcaccatattagccaggatggtctcgatctcctgaccttatgatctgctcatcttggcctcccaaagtgctaggattataggcatgagccaccatgcccggctgacttttaagccttttattaacttaggttttaggttccgcagagtattttcctttatttttaaacatttgtatttaaataaaaaggatttcacttgtattatttaatttcagccacagaaccagggacctaagctgtaaggcaatagtggccatggttactggcaaaagagaatcctgcattctgctggaagagggctcctggcctgggagttgagaaatatgaatgcattcttgttttgaccacatgacagctgtgtagccgttaataaatgatgttatattttagtatctcatttttaaaaatttgtcaaagagaaagtttgcactggatgatttttctagtctcctccatttcagaaattctgaaatttaccttaatatttttgccttttcattgaatgtccacttcatgacatattttgggccattaaaaaaaaacccagaaagagtatttgagaggtaagagcaatatatgtgtgaacatagcctatggaaataaattgagaaatactagaaaaacagtgactatatttctcaggcacggtttgatgtgaatgatgagaacattaaattttgattggtgcacataaggataacattttagtacatcacactgaaggtaggtaaatgactacacccgagggtgagaagaccttaggcgttatttctgacttggtcactaaataggcaccaggtcacccaacatctgtaagtcttggtttctgtccctcaagtgaaaggattggaggaaatgattagaacttacttcttttttttattattattatactttaagttctagggtacatgtgcacaacatcattctcagaactttcttctagagctctagcaggagtctaagatacaatcttaattaaaatcaaagtcaagaaaaccaaaaggaaaattctgttctagctgaccatatttagtaaatcaaagattagtcactcatatacattgagcgcaagcttttaatgaacactgtgtgtcaaatccctgggatacaaaaatagattccagaaagttaaatctaaataagaaatatataaaattatttataatgtcataggattcttgctgtcatggaagtgtgagcaaagtgctcgtaaaaatacagataagggaagaggtaactgatgtgacttgagtcttcacttatgaagtgacataataattggtatttgatgtctgaatttgagtttgtcaaaacgaggaatgggatgatagcataaagcctcaaaatgtgggcattctgttgccaggaaaactgtttgagaaagtgactagttcagtgtggttgggacacaaatatctgaggaaaagatcatgaaatacttgttgaatatactgttctaaattgtatagatttattctgtgtgtcacgaggatattttaaagatgtttaagtagaagagtattacagggacctatctctctacagtacagaggacagatggaaggatgctgagactagccataggaagggaggtggctagtatagtggttctagtgagarattaatagggaggtgaattgagatgggctgggccatgctggagtgatgagtaacccccaaaatctcagtggtttcctttcactcagtatacatgaccaatctaagtttatttcttactcaatataataaccaatccaaataggagttgagagactgctcattaaaggcattcagggactcaggctgacagcttccacagtcaccacattaaggttaaatgagcacactaagtcacacgccgtctctaacagctttaaccttgaaatgactgatttcctttcttcttgcattctctttgcaaaaccaagtcacatgg

SEQ ID NO: 685477 - DNA, 686 bp, Homo sapiens
tcttcccttggcttttaaaacacctgattaacgctctctgagtcagggctcttgaatwacacaggaatgcagaagaaggtggaagaataggaaaactcagatgtcttcctgctaacggagcaggtggtggcctgaacaatacattatttaacaaatgtgagaaagtaattattggggttctacaaggtttattctaggccatcctattttccataagaaggtagcactgcacttggcgtataccgatctcatttactatctcaataataacccttgagacagtttcccttacccactttatgcaagaataactaagggtcagagagttcaaataatttgcacaaggattactcgattgtaagagtttgagctgggactcacatgcaagttcatttgtcttcaaaatcctgggcttccaatctctgttccccttgcctccccacagtcttaaaataaatgtttcccaggcttccctctgctgctatcactgttggcataaagcgaatttcctcgactggtgaacctaaaattttctaacaacaatgatctgcataatttctcatagtttaaaaagttcttatgaaaacaatttccttttcagtcttcccacaatttcataaggtaggtaaaataaagactattattatcatctcattttatatacgaggcagggagggccctaatta

SEQ ID NO: 685478 - DNA, 686 bp, Homo sapiens
tcttcccttggcttttaaaacacctgattaacgctctctgagtcagggctcttgaattacacaggaatgcagaagaaggtggaagaataggaaaactcagatgtcttcctgctaacggagcaggtggtggcctgaacaatacattatttaacaaatgtgagaaagtaattattggggttctacaaggtttattctaggccatcctattttccataagaaggtagcactgcacttggcrtataccgatctcatttactatctcaataataacccttgagacagtttcccttacccactttatgcaagaataactaagggtcagagagttcaaataatttgcacaaggattactcgattgtaagagtttgagctgggactcacatgcaagttcatttgtcttcaaaatcctgggcttccaatctctgttccccttgcctccccacagtcttaaaataaatgtttcccaggcttccctctgctgctatcactgttggcataaagcgaatttcctcgactggtgaacctaaaattttctaacaacaatgatctgcataatttctcatagtttaaaaagttcttatgaaaacaatttccttttcagtcttcccacaatttcataaggtaggtaaaataaagactattattatcatctcattttatatacgaggcagggagggccctaatta

SEQ ID NO: 685479 - DNA, 1437 bp, Homo sapiens
ataagtattaaataaatattttacaaatatgttcctgctaatcttttctgtcaactccagcccaggtaggttgaaaaggactattactcccatcaaaacaaataagaatcttagtttctaatgaaaagttttccaagaaaattccaattggaatccatgactttaggtaacgctttcatattaagccaagcttctgacttcaatttcagctcttggtccattttattgtcaatgtgaaagcactagtcttggccccytccaacttttcactctattcaagccaaaggcatccctgtgggattctctagctatcctaaattgaaaaaaaaaatcacaaagcacaccctctttggggttcttcaaccatcaaagaacactcaacaaattatgttgtcaacagtgaccacataatggacttcaataacttaagagctcaattcaattacctataaaccttaatctgctccttcatgaaaatcccttcacttaaaagtacacaaaacctttatttcttcttatgacatctcttatccctaaaattataaataagaaaactaatttttcatgaattctacaaaataacaaaatgggacacaaaattgagcaaaaaattttctgacgggaatgtcaaaaacacctggcaaacactcttctcacaagctggcataggcctataaatctcccatttgtttgtttaaaatctgtatcatttcatttttcagagccttacttgaagacaagccattacctttttgaactcatccaatcctaagcattttctagaataatcaagtaaaaaaaattctaccacaaaaataaaaaagtctcagaggtgggaagagctttgtcacattgtctgatttagcccttgctaaatcagcccttgtttagttaacaaatattgaaactgatgacttatgggcagtgggccatccttgacctttggggatatatacaaagtaataagacaactctgtcccctaaaaggagtttacagtttactaatgttttcccaaagtacctgagtacttagggagaaggtatgaatgtaaaaatgaagattcctaagcttagcctcaaacttactgattcagaaattctagggattaaacccagaaatctgctctttaaaaagcatcttgggtaattcttgtgcacaacatttgagaaccaccactctggtaggtctgagagatgtgcacaagtatgagttagggaaatgctgaatagaagactcatcttttagggacataaaaaaattgatcagcaccttccctcattaatgccagatacaaactggaaaaaaaagaaaagtcatctcttagccaaaaccagacattcttctaaatcatattcaccactaagttggattgtgagttatcaattttataacagaaacacttagtgcagaaacccaaaatttctagtgacctacca

SEQ ID NO: 685480 - DNA, 1860 bp, Homo sapiens
aaaccaagaaaagaaactttaaatcataaaagcatttctattcctttgcaattattctcacttaccagataaaaagtttaacggcagccttcttggcaccagtcccctgggatatttagtccaggcttcctcataaatttttagccgttctaacatattagctgcaaacaaagaaaaattctttgttatatataatcataaattgtatattttttctggaaaattacgaacttctcaaagtatattaaaattctaatatttaaaagaaaattggaattatttgtaatcttacatctactatttcaacaattattttagactatttcttttcaattttttttatcttaagtacataattatctttatcctgttctgctttaggtaggcttttaaaacctgagaacttctttagttctgaaaaagccttggttatcatgtttccatatattgcttctcctactattctccttagcttctcccctctaactcctctcctctgattttggccatggcctctcttccattcaattaaaatttttattttagtaagtaggtttttcatttcagattcctaattggtacttctcctaactattcatgtttcatggcagcaattacgtctatcttagattcctccatcatctctactcttccttttgcagacagtggtgattaccattccttgctggtgttcctaaatcagtctgagaatctttgttacaaagtaatctgcaagaaggtttctcttgtatatttcaatggctcacaactagccttgaaggaaacaaatcagatcacctctgctgaggatcctgcctatttgtttctgggcctgttcccacaagtggaccccacttatgggagaggatgactgggggaccacgtctgaatccaagtttgagtgacagaaatttaacccctcttcccacaaaggaacagtgatgctcattcagcctggctacatttacgtgaccctggcaagtcacttcgatgcagccacagcttaccacagagcttattcttgcttttaagaatatatctccgtttctgtcagtggaaatttccttttatttaagaggcagtgtctcaccatgttgcccatgctgagctcaaactcctgggctcaagcaatcctcccgccccagcctcccaaagtgctgggatcacaagtgtgagcccctacacctggcttcctttcatgtttttgatgctactatgcatttgtgaatttttttctaaagttgtctctaaaattattttctcaaccattctataaatctataaaagagaggtttcagaacatgctcaatctgtcatattaaatagaagtttgcaaatgtacttttgtattcagatttttttttttgagacacagtctcgctctgttgcccagggtggaatgcagtggcactatgctggctcactgcaacctctgcctcctgggttcaagcaattctcgtgcctcagcctccggagtagctgagactacaaggcacacatcaccatgccaggctaattttttgtattttagtagagacagggtttcaccatgttgtccaggctggtctcgaactcctgagctcaggcaatccatccacctcggcctcccaaagtgctgggattacaggcaygagccactgcgcttggcctgtattcagatttcgaaccaattcttaaccactattattctagttgtgcttttcaatgagtaaataaaatatatattaacaaaagaaacaataaaacttagtaagttttaaacaatactacctggcttgagtgctttttccaagcctttgtaataggcccagttttcaggatttctctcttgcaatcctctataaacatctgcagcatctt

SEQ ID NO: 685481 - DNA, 1368 bp, Homo sapiens
cgcctacaaggtccaaaccgacgccaacgattaagcgcacaaaggaaaggtgtaatatacatcatttcgtttagtcctccctgcagcctcatgtagtagttactattaatcaaccccatttcacaggtgatcaaaggtaagctcagaaaggtgaagttgcctgcccaggtcacaaggtaggaccaggattccaagcctgatcggtctggatacgaacgctctacccacgcggcyttccccctacactctcgggatcaccacacacttccccttggcttttacaccggaggctcgacctgggtcccggaaccagcgaagccactgggcaagcctagaggcctctacagaggctagagacgcctcgccccaccagatgcattaggatgaaacgcgccgaaccgaaggtttagagcgccaggggagaagaggggcggggagagcaggctctttgacccagaggagggaggatctccacacccggccactctggcgctggggcgcaacactgaggccggcgggaagccgagcctgcccgcgaagagactggggattccgaggcggctcctgggagaccggacgcgcgcggcctccgccgctcccagtcccgccagacccgatgccgggctggagaagcgcgggggccgacgcacctcggataggcgggggcaggggcaggggcagctctcctttaccctagagcggcgacagaagctcttcgggggatcagtggccaagggggcggacagatttgcacggcggattcctccgaagcaacccgtgtgaaagaagccaagcggaggctgcagcccgggccgcgatgggggtgacaccgcccgtggtcccgccccttcccgtggcccctcggagccacttccggcggcagcgtccgggctagttcctggcgcgagcggccgcgggccagtttctatctcctcatccagggcttgcgggcgaggcctgttttaagtctccagtaaccgagcggaggcccggcaggcgcgacccgggctgcgtacgtcagagctgcctccgaagtggtaaaatgtgctgcgagaagtggagccgcgtggcggaaatgtttctcttcactgaggagcgggaggattgtaagatactgtgcctttgctccagggcatttgtggagtaagtagaaaagagaatctcttcatgttctagcacagtcattacccagaaatgtaggtattgcaaacgtggttgtaattgatccctgaaagcagccagaacatctgacccttgggcacggtgatgtttaagaaaaacaaaaccctcagacatgacggagtggtcgcccactgccattatttttatgtgaaggactacatctacttggtaggctgctatgaaaaa

SEQ ID NO: 685482 - DNA, 1368 bp, Homo sapiens
cgcctacaaggtccaaaccgacgccaacgattaagcgcacaaaggaaaggtgtaatatacatcatttcgtttagtcctccctgcagcctcatgtagtagttactattaatcaaccccatttcacaggtgatcaaaggtaagctcagaaaggtgaagttgcctgcccaggtcacaaggtaggaccaggattccaagcctgatcggtctggatacgaacgctctacccacgcggccttccccctacactctcgggatcaccacacacttccccttggcttttacaccggaggctcgacctgggtcccggaaccagcgaagccactgggcaagcctagaggcctctacagaggctagagacgcctcgccccaccagatgcattaggatgaaacgcgccgaaccgaaggtttagagcgccaggggagaagaggggcggggagagcaggctctttgacccagaggagggaggatctccacacccggccactctggcgctggggcgcaacactgaggccggcgggaagccgagcctgcccgcgaagagactggggattccgaggcggctcctgggagaccggacgcgcgcggcctccgccgctcccagtcccgccagacccgatgccgggctggagaagcgcgggggccgacgcacctcggataggcgggggcaggggcaggggcagctctcctttaccctagagcggcgacagaagctcttcgggggatcagtggccaagggggcggacagatttgcacggcggattcctccgaagcaacccgtgtgaaagaagccaagcggaggctgcagcccgggccgcgatgggggtgacaccgcccgtggtcccgccccttcccgtggcccctcggagccacttccggcggcagcgtccgggctagttccyggcgcgagcggccgcgggccagtttctatctcctcatccagggcttgcgggcgaggcctgttttaagtctccagtaaccgagcggaggcccggcaggcgcgacccgggctgcgtacgtcagagctgcctccgaagtggtaaaatgtgctgcgagaagtggagccgcgtggcggaaatgtttctcttcactgaggagcgggaggattgtaagatactgtgcctttgctccagggcatttgtggagtaagtagaaaagagaatctcttcatgttctagcacagtcattacccagaaatgtaggtattgcaaacgtggttgtaattgatccctgaaagcagccagaacatctgacccttgggcacggtgatgtttaagaaaaacaaaaccctcagacatgacggagtggtcgcccactgccattatttttatgtgaaggactacatctacttggtaggctgctatgaaaaa

SEQ ID NO: 685483 - DNA, 1368 bp, Homo sapiens
cgcctacaaggtccaaaccgacgccaacgattaagcgcacaaaggaaaggtgtaatatacatcatttcgtttagtcctccctgcagcctcatgtagtagttactattaatcaaccccatttcacaggtgatcaaaggtaagctcagaaaggtgaagttgcctgcccaggtcacaaggtaggaccaggattccaagcctgatcggtctggatacgaacgctctacccacgcggccttccccctacactctcgggatcaccacacacttccccttggcttttacaccggaggctcgacctgggtcccggaaccagcgaagccactgggcaagcctagaggcctctacagaggctagagacgcctcgccccaccagatgcattaggatgaaacgcgccgaaccgaaggtttagagcgccaggggagaagaggggcggggagagcaggctctttgacccagaggagggaggatctccacacccggccactctggcgctggggcgcaacactgaggccggcgggaagccgagcctgcccgcgaagagactggggattccgaggcggctcctgggagaccggacgcgcgcggcctccgccgctcccagtcccgccagacccgatgccgggctggagaagcgcgggggccgacgcacctcggataggcgggggcaggggcaggggcagctctcctttaccctagagcggcgacagaagctcttcgggggatcagtggccaagggggcggacagatttgcacggcggattcctccgaagcaacccgtgtgaaagaagccaagcggaggctgcagcccgggccgcgatgggggtgacaccgcccgtggtcccgccccttcccgtggcccctcggagccacttccggcggcagcgtccgggctagttcctggcgcgagcggccgcgggccagtttctatctcctcatccagggcttgcgggcgaggcctgttttaagtctccagtaaccgagcggaggcccggcaggcgcgacccgggctgcgtacgtcagagctgcctccgaagtggtaaaatgtgctgcgagaagtggagccgcgtggcggaaatgtttctcttcaytgaggagcgggaggattgtaagatactgtgcctttgctccagggcatttgtggagtaagtagaaaagagaatctcttcatgttctagcacagtcattacccagaaatgtaggtattgcaaacgtggttgtaattgatccctgaaagcagccagaacatctgacccttgggcacggtgatgtttaagaaaaacaaaaccctcagacatgacggagtggtcgcccactgccattatttttatgtgaaggactacatctacttggtaggctgctatgaaaaa

SEQ ID NO: 685484 - DNA, 3291 bp, Homo sapiens
cacagtatccccccaaataaatcatagcttcaaacagatgaagcttatattaaaaagaggtgacatctaagagctttgtgtggcaaatgcagaataattatgtacagaaagggtctctgatatttgtagcttcctttttttcctttcctttctttctttctttctttttcttttctttctttctttttttttttcttcagggtcttgctctgacacccaggctagagtgcagtggtgtgacatcagctcactgcaacctccacttcctggactcaagtgatcctcccacctcagccgcccaagtagcttgcactacaggcctgtgccaccacacctggctaatttttctatttttagtagacatgggttttgccatagtgcccaggctggtcttgaacttctgggcttaagggatcctcccacctcggcctcctgagtacaaatactgggattacagacgtgaaccacacagcctggctgatatttgtagctttcacttacttccattttatcaccaaccctatagctagttattagccattcaacattgtttatgttggctaggccaccgttcgattagtacaatgccaggcatgcaaaatgtgtaaattaatgaaaaagctggaaacaatccaattttctgaaaacatgtagtgtcttggaattctctgcttcttgacagaagagctttgccaattactgcctcggacttaaaacctactgctcagaaacttagtctgaagcctccagctatttccaatagagccttctcaggggtccccatttcttattcctgtttccacacttaagtgacacatgtatcatcatacgtggatgtatatgtgtatatctatatatacatacatagtacggcctctttaatttattttaatacattgtcctaaaatttgaattttttcccctcaatctgtgtttagcataaggtatttgattactatagcttatttgattagttctcaatcctttcctgaacccatctctctgggacacctttctcttagggttgaaaactgggtactgccaaagggataagttaaaattgaaaaatactctcttacaacagtttgcactttatcagaaatgtgccttattcagccatatattttagcagtattctaagttttcaggttcagatcacaaaatattcttcaaggaacttcagaagatttcatattagttttctagtccctgtaagattttcttttgtttagcatgggtatctagttggaatggctcataaaggatggtggaggtttaagtttcttcatcctggcaagcttcttacccctttttttgtatgcagatgcccctcaagtgtttttccttattgaaaagcagcctccgaattggcctaagcaaaattactgctttacactgcccagttcattgctccagggcatggtgaatcattttcttaggtaaaatgccctgaactggcaacgaaagtcctcacactcagtgctcctctaagaagtatagcatttgagacctggaggttactacagatgccatccggaccaaccccacctcttaaaaatgagcaaatctgggtttcacagataatacatggtggagctagggccagcactgacatcttataattcccatacaatattcttttactcagagaaaggttatttttgtggctaactgacaccctagagaacttagcctttaatcaatttataaaaccataaaattattttgtttataaaattaatctttaatacattgaaaaatgcattcatctaacagacattcactggacacctttgtgcctggcaccgagccaggcacatgaatgtaaaggtgggcaagggtctgtcctcaactttaaaagctcaggatcctcttggatgtgcctgtgaaaccctgacttgggatgtggccatgtgcatgtgcatgtgagataaagagatgacagatgaggtggctcatctttgaacgatggcacagagactgttgggaagcaccctggttctggctcaggaggcctgaattgaggcgcagcccctcactcaccagctatgtgaccttgagcaagtcttatcattttatccgtaaaatgaggtacagagtagccacactggtatggctttgaggattaaatgacatacatgtaatgccccttggatgatacctatcacacaataaatgttagttactttctcccttgttgaaaaactgggtggaaatcacatccaccctctcggccttgtagatttatcaaaattattgaaattatacattctaaaataatttgtaaaatattagtctcttttaccccaatattattacaaccaccatcttactccttgtttctttccagcccaagcattccaaccacttaaacaaaatccatctgtgtggccccaactagccttaaagcccaccaagaccagaaaaataagaggtaggagtttaaaccaagtcagaagttgtgtttctatgttcctgaccgtatctctattggtccagtcaatttttcatttactaagctccaacacagattacatagtaattgaatttcatcatcagtctacttttgtcaagattttatttttgttttatttctcagggagcttattcaaagattggcctatatttataataaaaatacatttagcattaagtacaatacttttgtactatgttgaaccatgtacatttgccaatgttcaattatttttaacctgtaaaaatgacagttgtggtgcttgccctgagccgaatgagctcagtccctgaggcatgtcatggaagctcttggaatctcaggttctcgtgcccaaccatagaagctggcacgaatgtgttccattcctggagcttacaagaagaacactgaccccattccctacatcataaaaggccctgctctgcgtaggccctcctgtcaggagagaagtctgtggatttgtgttcttctggagctcatgaaccttcccaggccatgctctatgcaccacaaaccccaaagtccctgcccatgtrttcatgggcagaccaggtattttgtagatgagattaacatttaattcagtaaatattaagcaaggcagattaccctgcataacgtgcgtgggtacaatccaatcagctaaaggttttaagagaaaaagactgaggttctgtgaagaagagggaattccgtcagtagactgcctctgaacttgagttgccacatcaactcagccttgggtctccagcgtgctagcttgcctggtagattccagactcactacccccaaaatcacatgagtcaattcc

SEQ ID NO: 685485 - DNA, 743 bp, Homo sapiens
tatagtggcactaaacagtgtagagttgtcttcaccaaagcaatggtagcatgagtgtactttttaattgtaatataccagtgtgggcctataatcatatttcttaaacatttatgaatgtctcttgctgtttattttatagaaatgctaactctaggtattaatgattatctttttttttcttagtaatttatttcttacatttgtttactgtgctttccagaatacagacattgaagtttgggacaagatayttatctaacttctggtaagtccaatgactgttttagagagtgaatttgtaaaataattatacagctatattttcagtcatttaagatttaagataaaaacatgttttcttttgtgcagagttatctcaatatggctgggcatggtggctgatgcctgtaatctcagcactttgggaggctgaggtgggtggaccacttgaggtcaggagtttgggaccagcctggccaacatagtgaaaccctgtctctactaaaaatacaaaaattagccaggcatggtggcacatgcctgtagtcccagctgctcgggatgctgaggcaggaggattgcctgaacctgggaggcagaggtttcagtgaccgagatcgtgccactgtactccagcccgagcaaaagggtgagactccatctcaaaaaagaaaaaaaaaattatctcaatgtgacctggtttaagatctaatttttcaacatgatccaattaagatgtg

SEQ ID NO: 685486 - DNA, 627 bp, Homo sapiens
tctctcaattttcctttggaaaaacatcagtaaaagctgcagccttaaattaatctcctaaagtgatttctccagaggtttcccttaaaaacaaacaaggaaacgtttgataagtatcaatacaatccaaaaaaattttaaaagaaaaaaattactaaaaagaataaggttgtgatasaagtgatattaggtaacccaggagaatccacctactagagatcttttagtaaccagtgaccatccctggccgtaattccaagtaaaggaaaatggtgagaaataattcttacaaagtttgtccttcaaaataagttacgctcattgaacacacatgatctttgcctccagtaactagcaggaactggggagttaacaagcaatgtctaccatacagaggtagcacagtagaggcacgcttgtttttccagaagctatatggagtacaagtgtcttacgtggagcaccccatatccagtcaaagaaatgaagtgtccagctaacttccaagttcagtaacgatccattctttccttgttacttacagtgttagcatctgactacatcccaccttacattattctctacgtgtttaattatgtgtacaagtgtataaaccttcaagaaaaa

SEQ ID NO: 685487 - DNA, 627 bp, Homo sapiens
tctctcaattttcctttggaaaaacatcagtaaaagctgcagccttaaattaatctcctaaagtgatttctccagaggtttcccttaaaaacaaacaaggaaacgtttgataagtatcaatacaatccaaaaaaattttaaaagaaaaaaattactaaaaagaataaggttgtgatacaagtgatattaggtaacccaggagaatccacctactagagatcttttagtaaccagtgaccatccctggccgtaattccaagtaaaggaaaatggtgagaaataattcttacaaagtttgtccttcaaaataagttacgctyattgaacacacatgatctttgcctccagtaactagcaggaactggggagttaacaagcaatgtctaccatacagaggtagcacagtagaggcacgcttgtttttccagaagctatatggagtacaagtgtcttacgtggagcaccccatatccagtcaaagaaatgaagtgtccagctaacttccaagttcagtaacgatccattctttccttgttacttacagtgttagcatctgactacatcccaccttacattattctctacgtgtttaattatgtgtacaagtgtataaaccttcaagaaaaa

SEQ ID NO: 685488 - DNA, 627 bp, Homo sapiens
tctctcaattttcctttggaaaaacatcagtaaaagctgcagccttaaattaatctcctaaagtgatttctccagaggtttcccttaaaaacaaacaaggaaacgtttgataagtatcaatacaatccaaaaaaattttaaaagaaaaaaattactaaaaagaataaggttgtgatacaagtgatattaggtaacccaggagaatccacctactagagatcttttagtaaccagtgaccatccctggccgtaattccaagtaaaggaaaatggtgagaaataattcttacaaagtttgtccttcaaaataagttacgctcattgaacacacatgatctttgcctccagtaactagcaggaactggggagttaacaagcaatgtctaccatacagaggtagcacagtagaggcacgcttgtttttcyagaagctatatggagtacaagtgtcttacgtggagcaccccatatccagtcaaagaaatgaagtgtccagctaacttccaagttcagtaacgatccattctttccttgttacttacagtgttagcatctgactacatcccaccttacattattctctacgtgtttaattatgtgtacaagtgtataaaccttcaagaaaaa

SEQ ID NO: 685489 - DNA, 665 bp, Homo sapiens
cagtggtaaacagaaattgcactgcttcgagtagagttgatctgggctctggctttagagctgccattgctgtgaagaaaactgagcaaggtactcattcctgtttgcctcagtgttcctatctatacaatgagagcatgaccttgaggtctttttcagcaatacaaatctgggataaaatatatccagacttttgaaaaacattagaactggtgagagagagagagagagagagaagatatgaatttaattattagttaaaagttatgatccattgatagctactaagtgtcagatatattacatgctagctcctgtctacccaataatcacaaaaaaggcatcagtccaatcttatagatgagaaattaagaaatgtacttaggccgggtgtggtggytcacacctgtaatcccagtgctttggaaggccaaggcaagtggatcgcttgaggccagaagtttgagatcagcctgggcaacatagcgagaccctgtctctataaaaaattttaaaaaattaaccaggagtggtggcacatgcctgtagtcccagctactcaaggcagaaggatcaattgagctgaggagttcaagttcaattgagctgaggagttcaagatcatagtgagctatgatcataccatgtactccagcctgagcaat

SEQ ID NO: 685490 - DNA, 1238 bp, Homo sapiens
tttttttggtagggggatttcttaactataaatcaggaaagtggccaggtgtggtggatcaaggctgtaatcccaacattttgggaatccaagatgggcagatcactagaggtcaggagtctgagactagcctggccaatatggtgaaacctggttccacaaaaaatacaaaaattagccagtgtggtggcgcacacctgtaatctcagctgaggtataagaactgcttcaacctgggaggcggaggttgcagtgagctgaaaacgtgccactgcactccagcctggatgacaaggtgagactgtcttgatatatgtgtgtatatatgcacatatacatatatatatacacatatgtatatggagagagaaactttctctcatgtatatgtatatgtatatgtatatgtatatgtatatgtatatgtatatgtatatgtggaatgctttatccaggtcctggcaatattagaaaatgcccttctccttggctatagtaaaaaaagtgttttactttctttgatgctggccttgaattttgacagagaagtaaagtaaaatgctttgaaatctcttcttcctttctctctatccatggctatttgtttcaagctctaattgtgtgtgtgccatagatctgactttcgtttagctccattcatgtagatgaattgtagatgaaattcttccaggatctgacaatctgttattaatattcttctgttcctgtggggttcttccctttccatgttttttttctgatgagaggtaaagagatagcaaatcagatagtgatatttaaaagtcatcttaactcatagattccaagtttaatttttaaaaatgatttaagtgttgggaaggtattaattgtattcagtcataaattatattaaatatgaagctaatagtaattatttccatgggatagctaattataaagttggaattcatctyaagggattatctcatttatattttattatttattttttcttaaaatcatttggaattcctttcttgtatctttctgtaatttcatattatttcaacacatatttttcatattatttaaatttttttttctgaatgttttgtaaacgtctgtcaattttaataaaagttgtccattagaaatgtgaatttctgtatcttcttctggtgttctgtcatctcaggagagttcaaggcagctttcctgacatttcaaccccaagaaagatcagtactttaaaaaaa

SEQ ID NO: 685491 - DNA, 658 bp, Homo sapiens
atggcaaaaggctccagctcaattcttctcatgtcagctcccaggttctcattcacagactttgtggtctgcaagtgtccagcttggctgtccatacaaaacaaattagctggaaaaccgtccatttcactttgctttgtagagacaccatctgaaaggaagtgtatcataaatcaatagaggtcgagggaaagtttaactaagccacttcctcaccaaagagaaaaaaaaatgttagattttcttccagcctctactgcataataatgcttttctgtttgattgtttacattcattttaattatacctgtcaaactgtgtgtggagtaagacgatgtaaataactgaaacagaaaaaaagaagtgacataagactggaagttttgtagctctaaaataaaggaagcaatatctcaaatcctaactttacccttttggagaaaaatatttctatattaatcatgtttctggaggtaggaatattatgttttgttgtrgatatttgaaacttttggtagcagatgtccttggagagataccacttaacttaattagggcttattcacaggcctgtgcgtctagattgccaaggccaagtgatgtttatcagtctaaatagtgtcattggaagaaagaaaaaactggaataagcggtgca

SEQ ID NO: 685492 - DNA, 606 bp, Homo sapiens
cacaactaaacaaaggtatatatgtacaagaatgtttactaaaacaatttttaataatgaaaagctggagtattggttaaaacatggcacctatgtaaatggaatacttggcagcaatttttttaaaaaatragacatatctataccactgacacgaaaagatgaccacagtgtattactaagtggagaggaaggttatggaaagagtgtatacatacacagtcttgatattgtgaaagaaaaataaatattggggccctcaaatcgctaagctaaagggaaaagtcaagttgggaactgctcggggcaaacctgcctaccattctattcaaagacacccctctgctcactgagataaatgcatatctgattgcctcctttggagaggctaatcagaaactcaaaagaatgcaaccacttgtcttttatctacctatgacctggaagccccctccctgcttagagttgtcctgcatgtttgtttcgagatgtcccacctttctggaccaaaccaatgttcaacttacatatatattgatggatgtctcatgcatccctaaaatgtataaaaccaaactgtgctctggccaccttgggcacatgtca

SEQ ID NO: 685493 - DNA, 606 bp, Homo sapiens
cacaactaaacaaaggtatatatgtacaagaatgtttactaaaacaatttttaataatgaaaagctggagtattggttaaaacatggcacctatgtaaatggaatacttggcagcaatttttttaaaaaataagacatatctataccactgacacgaaaagatgaccacagtgtattactaagtggagaggaaggttatggaaagagtgtatacatacacagtcttgatattgtgaaagaaaaataaatattggggccctcaaatcgctaagctaaagggaaaagtcamgttgggaactgctcggggcaaacctgcctaccattctattcaaagacacccctctgctcactgagataaatgcatatctgattgcctcctttggagaggctaatcagaaactcaaaagaatgcaaccacttgtcttttatctacctatgacctggaagccccctccctgcttagagttgtcctgcatgtttgtttcgagatgtcccacctttctggaccaaaccaatgttcaacttacatatatattgatggatgtctcatgcatccctaaaatgtataaaaccaaactgtgctctggccaccttgggcacatgtca

SEQ ID NO: 685494 - DNA, 642 bp, Homo sapiens
catatgaaatcataaatctggagtacttctgaatcccattatttattttgatttaatcgccaggtaattcctgacacaggagtgtcccgaaaagcctttagcaattatgtaagaatctccgaggcagttcttatgttcctcaattcaaaagaaccacataactgcaatttaaataacaccccmcacacacacacaaaataaggtcgaagtttatctcaaaataatttcccctctctacactgggataaatatgtataggaataatagggggaaattcagtgcactgagcattaagctgtcaaaacaggaatgtttaaaatatcctgttagtggtttaaaaataatttgtactctaagtccagtgactatttgccagggagaaccaaagttgagaaatttctattaaaaacatgactcagagaaaaaaatgcagaggccggtaatgaaggaaatgattggatctcattcccaattggtcattcctaagatcacatgttctgagcatctttaaaaggaagttatctggactcaagagggtcacagcaccctcctgaaaactgcagcttccttctcaccttgaagaataatcctagaaaactcacaaaatgtgtgatgcttttgtaggtacctggaaacttgtct

SEQ ID NO: 685495 - DNA, 642 bp, Homo sapiens
catatgaaatcataaatctggagtacttctgaatcccattatttattttgatttaatcgccaggtaattcctgacacaggagtgtcccgaaaagcctttagcaattatgtaagaatctccgaggcagttcttatgttcctcaattcaaaagaaccacataactgcaatttaaataacaccccacmcacacacacaaaataaggtcgaagtttatctcaaaataatttcccctctctacactgggataaatatgtataggaataatagggggaaattcagtgcactgagcattaagctgtcaaaacaggaatgtttaaaatatcctgttagtggtttaaaaataatttgtactctaagtccagtgactatttgccagggagaaccaaagttgagaaatttctattaaaaacatgactcagagaaaaaaatgcagaggccggtaatgaaggaaatgattggatctcattcccaattggtcattcctaagatcacatgttctgagcatctttaaaaggaagttatctggactcaagagggtcacagcaccctcctgaaaactgcagcttccttctcaccttgaagaataatcctagaaaactcacaaaatgtgtgatgcttttgtaggtacctggaaacttgtct

SEQ ID NO: 685496 - DNA, 975 bp, Homo sapiens
tgatgttgggatcactggctagccatacacagaagatggaaactggacccctttcttataccatatacaaaaaatcaactcaaggtggtttgaagacttaaacgtaaaacctaaaactataaaaactctgggaagacaacctaggacatattcattattagaaaaacctaatgaatatgtcagttcattactgacatattcatgctgctgttacagtttttccccaagggtattaaagatacgtgaataatcatgggaagaacgtttatttttggacttggggcaataatttttcatgtgataggaaagaaagaagtagaatttaaccaaaatttcatttttatttttttttgagatggagtcttgccctgtcacccaggctggagtgcagtggmgctatcttggctcactgcaacctccaccttccaggttcaagcgattctcctacctcagacttccgagtagctgggattacaggtgcatgccaccacgtccggctaattttttgtatctttagtagagatggggtttcaccatgttggccaggctggtctcaaactcctgacctcatgatccgcctgtctctacctcccaaggtgctgggattacaggcatgagccaccgcacttggcccaaaacttcactttaaacttttttttttcctgcatgagctattttgatatgaaaaacaacctgctgagacaactctttttgttttctacttgtttaccataattctggttcctgtcattccagccctttgtccttacaacagcttcagaactggtctcatttctagtaacttcttatgcaaacctagacataaaagcattcatattcctagaaaataatatctatttaattcatttgctcaaggaacttaatttttttttctgtaggacaaagtctttgtaaaggttggagatcaaactccttcaaaattattccagtaatcaggcccaatcttcccactca

SEQ ID NO: 685497 - DNA, 1230 bp, Homo sapiens
cctgaaaataacatagatccttataagaaagttcaggtaatacagggtaatagaaagaatacaaaatattaattttgaaagtctacccattgctaagtatatacatttatgcaaattccttaacatctaggtcatgttatcacctgagaaataagtttaatactttttaaaacttatttggttaatgcatgtagtcagaaatggctatagaatttgtggtgccttgtataaaaagaaaatgtgggttccttgttttaaaagtattaaaaatggaaacacagtgatgcagagaattaatctaagtgtagggtcctatgtaactagacagatcatatgtccatgaagcaggccctgtttgtggtggattaaatatggtcatcattctttacaaattctcccatatagctttaattttcccttctcttgaaatggaattagctctgtaactggcactgactattataatatggggagaatgatgctgaagcattgtacattcaccattctcaaaactatgggtgaagtttgaaaattctgagaccaccataccatgagaaagccaaggctagycatctagacagagagaaaggccatgtaaatgagcaaggtgagaaacatgtgagtgaagttttagttccccctcaccagacaaggcacccactgattgcagccaagttaatgaatccaacaaaccccaccgcccaaattcttgacctacagaatcatgaggacaaaagatgatatggttttaaaccattaagtcacagggaagtttgtaatagagtaataaatagccaaacaaatagtactgaatatttttataaactttcaataatattaataaagtaacattactttactattattctctctgggttgaagcaaacaatctggatttgttatgagctatttttgacctatagtagtcccctgaaattaaaagtattttgcatgatagtatcagtacagttgtagattacataatatcataggcaaaataatgaccttcaaaggtctgcaaatcgtaatttgcagaacctgtggatatgttactttatatagtaccttagttcctagaactgtcatataaaaaatgaccacaaagttaatatctttaaataactgaaactttttgtctcatagttctggaggccagaaatctgaaatcaaagtattggtagggcaacttctgctgaagtttctaggggagattcttccttgcctcttcca

SEQ ID NO: 685498 - DNA, 1903 bp, Homo sapiens
ttcttcttccatgatttcagtctctctatgtagttgctgttttcagtcttggattatttaatacaagtcaaaattttaggatgatataacttcaatattttcagaaagccaggctctgaagtccaacaactatcactatgaggttcattctgagaggtgaatatcaataactataaggcaaggtggagctatcatagagaaatacaattcaaccttcttgaaagaaagcaatattttacattccaaccaagaaaaataagaaagagtatccaggaagagttgctcagtacactgttcaaaacattcatctatggcacaatggagaaaaaaaacaaacagaaatctgcacttgttgtttcaaaagatttaactgagactcatatatcttagtccgtctcataatcaaactcacggagttgtgctttgatggtatatcttttaatttcacaggaagagacataagtgatgcttcagaaaatctgttgctggaacgtggtcaaggatctagcccctgtatcactcattattcccaagtaagatccaacacaagaaatcttttgtagaatttagtccaaagaatatttcctttcctaaagaatattatatatatatttatatatatgtgtgtgtgtgtatatacacatatatgtatatatgcgtatatatatatatattcttctttttcaaaatggacattctataactaattacattttgttttaaatgccagtaatcacaaaggcaaattaggagcactctctctctttcattctggtagacatctttcctcattttgactttctatactgaatcatgttttccttcatttttgttttattttattttctacttcatatttcactggagagttttcctattataattctcttaaattctttgtggaatgaaacaaggcatacataaaattcacattgatgtagtagcatagcttcattctcctctcctgttgctttctcttaaatacaatttttcaaccctttctcaagttattttaaaattggtaaaattatttaccccaaaaataatcatgttgggcttttaactgtcactgctttaaatatataaaaatctttgccaaggccaggagtggtgrcccacaccttaacccagcactttgggaggtcaaggcaggaggatcacttgggtccaggagtgtgagaccagcctagacaacatagcaagaccccatctataaaaaaataataataaatatccagatatggtagtacacacctgttgtcctgggtactcaggaggctgaggcaggaggatcacttgtgccaggagtttgagaccatcctgggcaacaaagtgaggccgtccctacaaaaaatttaaaaaatggtagcacacacctgtagtcccatctactcaggaggctgagaatggaggactgcctgagcacaggagttcaaggctgcagtgagctataatggcacaactgccctccagcctgagtgacagagtgagaactcatctctaaaaatagaaataatgaattaaaaaattccaagtataattcatttctaataaaatgtagtgatttttgtttaggatttgagaaagtctttgcttcttttcttcatgagtttatttaattgtgcttttctcatagttctcctagaggtctttatactctatttcacatttggtctttttttatttcttctttttctccacagtaccaatttgatcatgttcgtgaacaccaattacctacctacatacatactactttagataactaaagagactacaaatcattttgtcttctaaagtgttaattcttgttcttacagcaatctctttcacagctttgtaattcttccaccatcatggttcaatctctgatgaaggatcagtcaacatcctaaaattgcgc

SEQ ID NO: 685499 - DNA, 2753 bp, Homo sapiens
taaaaatccaagattggagactgattttaacatctattcatctaaaccattaagtaatcaaaaatgaattaaatagaggaaaatacaactgactattcatacacagagaagtgtagactcttcaatggaaaacatgttttttaagtgcccaaggaatagttataaaattgctgagtattttaattaaacaactaatatttaagtattaggctcaagagaataatttagtcaaagtcctaaatatgagaggctaagtttgataaagattgaaaatgcactgaaaagcccaagtaagaaaattattttttcattttagaaattataggacaataatatttcccaactatgaggtgtgtgtatgtgtgtgtgtgaacgtgtttgtgttaatgagcttgttaacaataagttatacaaaattattagttggcagcaacsagatttttaggaatattggccttcctgggcttccccaagaaaaccttggatgcttttggtaggaaaagttaggactcactaaatctggcacagaaaaggtgaatcaacagtggtcgtgattctagttttgaccgagctgcatataacagtgtaggcatctgatgtaggatctatgtattaggttacaaaatttcccttacaactgccattgctcagcacaaattatagagaggttaaacaaggaataaatggcaaaatgatgaataagaatatgacctgatttgcatgctggcaaatgagaattcagcttttacttcaacatcagcatgaaacattttatcttataacaaggtcacagcatttgaataggagttaatttgagctgttttggaaattatcatgttttccattaagacagccttgaactcattcagtagcatggcccggtgcgttcctgcttgacattagtcagagaatttaaaaggaacaagaacattactgcacaatcagaaatcaggtgcacatagaaattaaggtcaggaccttaaagggaatattgcccattgatattaggcctgccttaaaaaaattcagacatggtatgtttactactcatcattattatccataacagtaatggtagaatttgtattttcccataggcaccttcattacacttatatacttatttgatatttcaacatattattttctttgggtccttttaagtagttgttaaacaatgctgaaagttgccttacagtatgctgttaactaatcatattttctcaaagtcatttggcataatatttggttaaaagaagtatgtctagtataattacatgtgttcataacaaaagagcatcctggctaacactctactaaaaatacaaaaaataagccaggcctgatggcaggcgcctgtagtcccagctactccggaggttgaggcaagagaatggcatgaacctgggagatggagcttgcagtgaggcagagcttgcagtgaggcggagcttgcagtgaggcggagcttgcagtgaggcggagcttgcagtgaggcagagcttgcagtgagccgagatctcgccactgcactccagcctgggtgacagagcaagactccgtctcaaaaaaaaaaaaaaaaaaaaaaaaaggaaccatcagattctgagcatctgtattacactagacacctttttttcttatttccaatttcattatttatgataacatttcaaagaggcagaaattagtgaatttccaataaattatagtaatatagatattaaatacacaggacaatttttataaatttatctctaaatgaaataattatgcccatttttaccattcaaagattataccatgcatgtgtacacatatgtgaggaaaaatattttgatagtacaaagtttttgaatattagagaagaattagtagaaagataattttgttgaggcataaagcatatttagtgtaactactttgactgctgtaataaaatcacccagattttgtgacagtagctgagattaaaaataaacagtagagagaatttcacttgttaataatgctattaaaagatgaagcttatacactttataattgcacagagtatttgtgtaagttcatataaaagtggaataaaattaaacagccaaaaagagagtattctttgctagaggtcacttttggggtaatttttagaatgtggtaaaagaaaaaatatcttgcaaatcattagaaatatgttgattttgtgttactcttgatgaaatactatgtgagggtatttgtctaggcctgattctgagaataatataagaatcgagccaggcaccatggctcatggttgtaatcccagcactttggaagttgagactggtggatcacctgaggtcaggagttccagaccagcctggccaatatagtgaaacccactgtctactaaaaatataaaaattagctggatgtgatggacagcacctgtaatcccagctacttgggaggctgaggcaggagaatcaattgaaccttggaggcggaggttgcagttagctgagattgtgccattgcactgcagcctgggtgacaagagcgaaactccatctcacacacacacacacacaaaatgtaaagccatgaggatgaataatagtgttctcccaccacccttaactctagtgctttgaaaagaagactcgaatcacaattatttagtaacattctccctttcaggtgacatcatcatcattattatcatcatctacatttacatctgtcttattaaatgatttatttctgaaatatttaca

SEQ ID NO: 685500 - DNA, 2753 bp, Homo sapiens
taaaaatccaagattggagactgattttaacatctattcatctaaaccattaagtaatcaaaaatgaattaaatagaggaaaatacaactgactattcatacacagagaagtgtagactcttcaatggaaaacatgttttttaagtgcccaaggaatagttataaaattgctgagtattttaattaaacaactaatatttaagtattaggctcaagagaataatttagtcaaagtcctaaatatgagaggctaagtttgataaagattgaaaatgcactgaaaagcccaagtaagaaaattattttttcattttagaaattataggacaataatatttcccaactatgaggtgtgtgtatgtgtgtgtgtgaacgtgtttgtgttaatgagcttgttaacaataagttatacaaaattattagttggcagcaacgagatttttaggaatattggccttcctgggcttccccaagaaaacsttggatgcttttggtaggaaaagttaggactcactaaatctggcacagaaaaggtgaatcaacagtggtcgtgattctagttttgaccgagctgcatataacagtgtaggcatctgatgtaggatctatgtattaggttacaaaatttcccttacaactgccattgctcagcacaaattatagagaggttaaacaaggaataaatggcaaaatgatgaataagaatatgacctgatttgcatgctggcaaatgagaattcagcttttacttcaacatcagcatgaaacattttatcttataacaaggtcacagcatttgaataggagttaatttgagctgttttggaaattatcatgttttccattaagacagccttgaactcattcagtagcatggcccggtgcgttcctgcttgacattagtcagagaatttaaaaggaacaagaacattactgcacaatcagaaatcaggtgcacatagaaattaaggtcaggaccttaaagggaatattgcccattgatattaggcctgccttaaaaaaattcagacatggtatgtttactactcatcattattatccataacagtaatggtagaatttgtattttcccataggcaccttcattacacttatatacttatttgatatttcaacatattattttctttgggtccttttaagtagttgttaaacaatgctgaaagttgccttacagtatgctgttaactaatcatattttctcaaagtcatttggcataatatttggttaaaagaagtatgtctagtataattacatgtgttcataacaaaagagcatcctggctaacactctactaaaaatacaaaaaataagccaggcctgatggcaggcgcctgtagtcccagctactccggaggttgaggcaagagaatggcatgaacctgggagatggagcttgcagtgaggcagagcttgcagtgaggcggagcttgcagtgaggcggagcttgcagtgaggcggagcttgcagtgaggcagagcttgcagtgagccgagatctcgccactgcactccagcctgggtgacagagcaagactccgtctcaaaaaaaaaaaaaaaaaaaaaaaaaggaaccatcagattctgagcatctgtattacactagacacctttttttcttatttccaatttcattatttatgataacatttcaaagaggcagaaattagtgaatttccaataaattatagtaatatagatattaaatacacaggacaatttttataaatttatctctaaatgaaataattatgcccatttttaccattcaaagattataccatgcatgtgtacacatatgtgaggaaaaatattttgatagtacaaagtttttgaatattagagaagaattagtagaaagataattttgttgaggcataaagcatatttagtgtaactactttgactgctgtaataaaatcacccagattttgtgacagtagctgagattaaaaataaacagtagagagaatttcacttgttaataatgctattaaaagatgaagcttatacactttataattgcacagagtatttgtgtaagttcatataaaagtggaataaaattaaacagccaaaaagagagtattctttgctagaggtcacttttggggtaatttttagaatgtggtaaaagaaaaaatatcttgcaaatcattagaaatatgttgattttgtgttactcttgatgaaatactatgtgagggtatttgtctaggcctgattctgagaataatataagaatcgagccaggcaccatggctcatggttgtaatcccagcactttggaagttgagactggtggatcacctgaggtcaggagttccagaccagcctggccaatatagtgaaacccactgtctactaaaaatataaaaattagctggatgtgatggacagcacctgtaatcccagctacttgggaggctgaggcaggagaatcaattgaaccttggaggcggaggttgcagttagctgagattgtgccattgcactgcagcctgggtgacaagagcgaaactccatctcacacacacacacacacaaaatgtaaagccatgaggatgaataatagtgttctcccaccacccttaactctagtgctttgaaaagaagactcgaatcacaattatttagtaacattctccctttcaggtgacatcatcatcattattatcatcatctacatttacatctgtcttattaaatgatttatttctgaaatatttaca

SEQ ID NO: 685501 - DNA, 2753 bp, Homo sapiens
taaaaatccaagattggagactgattttaacatctattcatctaaaccattaagtaatcaaaaatgaattaaatagaggaaaatacaactgactattcatacacagagaagtgtagactcttcaatggaaaacatgttttttaagtgcccaaggaatagttataaaattgctgagtattttaattaaacaactaatatttaagtattaggctcaagagaataatttagtcaaagtcctaaatatgagaggctaagtttgataaagattgaaaatgcactgaaaagcccaagtaagaaaattattttttcattttagaaattataggacaataatatttcccaactatgaggtgtgtgtatgtgtgtgtgtgaacgtgtttgtgttaatgagcttgttaacaataagttatacaaaattattagttggcagcaacgagatttttaggaatattggccttcctgggcttccccaagaaaaccttggatgcttttggtaggaaaagttaggactcactaaatctggcacagaaaaggtgaatcaacagtggtcgtgattctagttttgaccgagctgcatataacagtgtaggcatctgatgtasgatctatgtattaggttacaaaatttcccttacaactgccattgctcagcacaaattatagagaggttaaacaaggaataaatggcaaaatgatgaataagaatatgacctgatttgcatgctggcaaatgagaattcagcttttacttcaacatcagcatgaaacattttatcttataacaaggtcacagcatttgaataggagttaatttgagctgttttggaaattatcatgttttccattaagacagccttgaactcattcagtagcatggcccggtgcgttcctgcttgacattagtcagagaatttaaaaggaacaagaacattactgcacaatcagaaatcaggtgcacatagaaattaaggtcaggaccttaaagggaatattgcccattgatattaggcctgccttaaaaaaattcagacatggtatgtttactactcatcattattatccataacagtaatggtagaatttgtattttcccataggcaccttcattacacttatatacttatttgatatttcaacatattattttctttgggtccttttaagtagttgttaaacaatgctgaaagttgccttacagtatgctgttaactaatcatattttctcaaagtcatttggcataatatttggttaaaagaagtatgtctagtataattacatgtgttcataacaaaagagcatcctggctaacactctactaaaaatacaaaaaataagccaggcctgatggcaggcgcctgtagtcccagctactccggaggttgaggcaagagaatggcatgaacctgggagatggagcttgcagtgaggcagagcttgcagtgaggcggagcttgcagtgaggcggagcttgcagtgaggcggagcttgcagtgaggcagagcttgcagtgagccgagatctcgccactgcactccagcctgggtgacagagcaagactccgtctcaaaaaaaaaaaaaaaaaaaaaaaaaggaaccatcagattctgagcatctgtattacactagacacctttttttcttatttccaatttcattatttatgataacatttcaaagaggcagaaattagtgaatttccaataaattatagtaatatagatattaaatacacaggacaatttttataaatttatctctaaatgaaataattatgcccatttttaccattcaaagattataccatgcatgtgtacacatatgtgaggaaaaatattttgatagtacaaagtttttgaatattagagaagaattagtagaaagataattttgttgaggcataaagcatatttagtgtaactactttgactgctgtaataaaatcacccagattttgtgacagtagctgagattaaaaataaacagtagagagaatttcacttgttaataatgctattaaaagatgaagcttatacactttataattgcacagagtatttgtgtaagttcatataaaagtggaataaaattaaacagccaaaaagagagtattctttgctagaggtcacttttggggtaatttttagaatgtggtaaaagaaaaaatatcttgcaaatcattagaaatatgttgattttgtgttactcttgatgaaatactatgtgagggtatttgtctaggcctgattctgagaataatataagaatcgagccaggcaccatggctcatggttgtaatcccagcactttggaagttgagactggtggatcacctgaggtcaggagttccagaccagcctggccaatatagtgaaacccactgtctactaaaaatataaaaattagctggatgtgatggacagcacctgtaatcccagctacttgggaggctgaggcaggagaatcaattgaaccttggaggcggaggttgcagttagctgagattgtgccattgcactgcagcctgggtgacaagagcgaaactccatctcacacacacacacacacaaaatgtaaagccatgaggatgaataatagtgttctcccaccacccttaactctagtgctttgaaaagaagactcgaatcacaattatttagtaacattctccctttcaggtgacatcatcatcattattatcatcatctacatttacatctgtcttattaaatgatttatttctgaaatatttaca

SEQ ID NO: 685502 - DNA, 981 bp, Homo sapiens
tacattttccaagacaggaggatacagatgggaggaccataaagctgcttcawcattattggttacattctagttctgtagttggttggtgggttcgtaggaatttcttttattattatacttcaaaactaacctgtaagttacatgtattttttagtatatcaaatattacataataagatattctaaagtatctggccgggcatggtggctcacgcctgtaatcccagcactttgggaggccgaggtgggcaggtcacaaggtcaagacatcgagaccatcctggctaacatggtgaaatcccatctctactaaaaatacaaaaaattagccgggcgtggtggtgggcgcctgtagtcccagctactcaggaggctgaggcaggagaatggcatgaacccaggaggcagagcttgcagggagccaagattgtgccatggcactccagcctgggcgacagagcaagactccgtctcaaaaaaaaaaaaaaaagaatattctaaagtatctgcacgcaaaagaaaaagtatttaaggaattatacttgttaaatgtgttcatttctgctagtgaaataaaggtgatttttacatgtatttctatattttcccaaatatttgcaatctaggtgagtaattttgtaatttaaaatactatatttatgtgtgtattttctaaaaacagaaaatgagcattttataaatagaaagaaaacttcagtgtacaaacctctttcttagactcaccttttgagaatgccattattcatattttttatttccagctccaccttccccgtagttactctgtaaagtgtggcatggatgtctgcgtgaatgcccagactctgacttgtacctggataccctctaggtagaagaagctctgatccagatccatgatccagaactcaggaagctgcttaacccaaccactgcagacctaaggttcgcagactacctagtgaggcacgtgactga

SEQ ID NO: 685503 - DNA, 612 bp, Homo sapiens
tcaagaattcagcgatgataaattgaagggctgaatgtgagaactccattaattccacttcttccaagaaagttaacctcaggaaatrctgtttgaagagaagaaagtagtaccaaacaaaaaccttaaacagtacttgaatcttttttgcgctgagactataaagaattcattctaacatcttgtttcataagggccacatcattcgttggagcatgatagtgtgatttgtgtacaattgttacctctcagctgctgaagttcacacttcaaggatctaggagctctgtgaggggtcgtccagcaagatgctgatttgtctttcagttggtatggtttctgtgatcggggtaaactcccgtctcccactattcaaaagcagcccaactcatgctttggaatccactgaaataaaaatagttacatgaagtttaactttgctttaatatcacttgttcctcattgaatatacactttgatcggactttctattaacatttctagctaagagtttgactcttagtggtcactttactgactttccaacataaaacaagtatctcagaagatacaactttcatcatagaaatggtcaaaagaccatagctatat

SEQ ID NO: 685504 - DNA, 598 bp, Homo sapiens
aaggccctcagccatagttgtctatgtgaccagccaactctgaaggcttaacatttaatctgatttatactacaaaataaaaaactattttaaatagtttgggaaaaaataagccgcatctaaaaaatacataattactgtctaacacattcatgaacaaggatgtaaaaatcctatcaaaatgacagcaaactgaatccagcgacatgcaaaaattgtgtttagcccagaaaagcaagtttatttaacggtagaaaattaattaatgttaattcattacagtaacagattaaagagggggaaatacatagaatcatgtaaacagatgtacgaaagcatttcatgaaacttaacatttatyaatttctttttaaaagtgctcaaagcatgatgaggacatgttaaaaggaaagagaagtcagcttgaatagttggacaagtgtggaacaattggagcatcaacataaataacaaaaataatggattacactgcactgactaaaatagatgtcattttcttttggacacaagacaaactggtaaaagatttgaataggaatttacaacagtggaaacatgaagggcgtacaaacaaacc

SEQ ID NO: 685505 - DNA, 629 bp, Homo sapiens
cctaataaaacactgcacctcccttttacaaccctaaaagacctctgttactttatattttcttttacatctaaaggcaaaccaaagaactggcagtcactctaagttctgctcacrtcatttattcaaattatataagaactcaaccttaatagattccacccacaatttagagcttctatacagcttttttcggtcttctagccttaatcatgacagcctaagtttgccagacatctaaggaaagcacctaacatggaaggtagagaccaaaagatgtttaaaaaaacaagctaggctgggcacggtggctcagacctgtaatcccagcactttgtgaggctgaggcgagtggatcaccaggtcaagagattgagacaatcctggccaacatggtgaaaccccatctcaactaaaaaatacaaaaattggctgggcgtggtggcgcgtgcctgtagtcccagctacttgggaggctgaggcaagagaaaattgcttgaacccagggggcgaaggttgcagtgagccgagatcatgcgattgcactccagcctggtaacagagtgagactccggctcaaaacaaacaaacaaacaaacaaaaaaacacaagctagaagatgccaagat

SEQ ID NO: 685506 - DNA, 605 bp, Homo sapiens
tcacagattaaaataaaagcacatatgagctaatatyacagggtctaacagggtgaatatgttttggaattagcaacaatcccttaataacaatgtattatctctgaaattccctttcagaacagtgaccttggtttgaaatttaaaaaaatatatcaggcaaatctgttaagacataataaatagggagtggctaagacactctgaaaacagatatcaaggaccttaccttcttatgtttacgtttaatcatttaacaaggaagcaaactttacatgattagtgaggttctggtgtaagagatgttttcatattccctgatgaaacctcacaaggcttcccactaaaacacagcagggatgagagtgcacctcaccacttcacagcccagaatggtagcttacctcgtttcagaatttgggaacagtttccaccatctgtcctaccaaactctcaaactcaaccaagaaacacaattggtggctcagacctagaaatggagtaaatctgttggcctgaataaaaggtcaaaaatattctgtacatttctgcagaaatctcctcttcatctattgcaggccttgcttttccaggcaaacagaata

SEQ ID NO: 685507 - DNA, 2087 bp, Homo sapiens
cttaaaggacttaaacctttttccccatcatgcatgctgaatacaatgcttagattctttgaacccttacaggatctagctgactttctgtccgaccactcctggacggtgatctgctcctgaggccccccratggagtactggtcttcaaaggtggagttttgaggaatgtcaagaggatcccagggctgtgtcagggtcatctttgagcactgcttggtggcttggtcaatctgaaacatcactccatccttatacagcaaaatatattcaaataatctgaaacacagatggaaagaagtagtttgggacttcatgttaccatcctcgtgccttttaacagcacaaacacctttgatagatattacttttaaaatagaaagaaattactagctaggcaatcacttaacgtttataaacactaggcacatgaaacaacctgcatatgaaataattagaattcacaggtcagaccgagcatgatggctcatccctgtaatcccagcactttgggaggccgaggatggagtacgttttgagcccaggagtttgagaccggcctgggcaacatagtgagacccctgtctctagaaaaaaaattttaaaaattagccagacatggcagtgcacagctgtagtcccagctacttgggaggttgaagtaagaggatcacttgagcctgggagttcaaagcttcagtgagccatgatcatgccaccgcactacatacagcctgggtgagatcccgtccaccatcaaaaaaaaaaaaaaaaaattgaggtcaaaagtgtatattcactgggcaaattttgaccaaggacctagtatatgccagaccctgtgcttagcatacaaacatggggaagatatggctccggctgaagagctggtttgtgaacttttgtttacccacagagacacaggaggacttgactcttgtgtggtgcattttctctcacagcactcagtcaaggaattatgggggtatactgaacataggacaagaacacactgaggactggatggaccgagtgcctgtgcttcactgcctccactgccgagcagtcatgagtaaggggctttgatgcgcatagctgatccggcacgggcgcagcccacataccctgcagtggctgagatgagagcaaagacaaaagctgaggcgaccccagagcaaatgactcccttagctgagtttctctccatgctctcagcctcctcccgtgaccacctgctcacccttcctggggagtgacagggagatattcagaggctgagcccaggagtcaccagccatgcagtattggcatcagtcctgtatcttccttaaagctgagacatcttggtgttgggggaagcctgctgtgtttctatgcatttcactgtcaatctaaaactcaggccacagctgctggtcaagaaaatgtgtcttgcagccatgacctcagaaagtgaaatctgcaacacttgagggctgaagagcctagagaagtgacttgtcatcagcaaataaaaatagccaacaaattatctgtggcttatgagacccaatgcactagaggagacttcagggaagacatttgctctccagcccaagcccgagcttaaaaactattttcttcggaaaaaaatgttagaaatggttactgtctttatagtcaaaacacagtcgtgcgtcacttcatgataggcttatgttctgagaaatgtgtcattaggctatttcatcactgcacgaacatcatagagtgcagttacacaaatctggatggtacagcctactacacaacagggctacacagtatggcctactgctcccagggtacaaacctgtactgcatgtgactgcactaaatactggaggcaactgtaacacaatggtaagcatttatgtatctaaacatagaaaaggtgcagtaaaaatatgggataaaatataaaaaatggtacgcatgtatagggtacttgccatgaatggagcctgcaggactcgaagttgctctgggtaggtgagtgagtgagtgagtggtgacagaatgtgaaggcctaggacatttctatacacttctgtaggctttataaacat

SEQ ID NO: 685508 - DNA, 1267 bp, Homo sapiens
gactgttattatcatttacaaagctgtattgaagttgatggggcttctgtcaagaaatgttwatattttttattcatatcttttaattctattttcctatgaacttgcaaaagtccccttgtacaatagattgcatagatttaaggtgtggaacttgagaaactttttaggtgaacaatctgagtatctccagcacagatcaaagataaggcacctcagaagcctccattgtgccccctcagtcactaacctttcaaagagcagtgtaattttaattcacctcctttcataatagttggtggagtgttcatatattaagcatcatctgattttatttttccatgaactgactgttcatttctctgcacatcagaatttttttctcttctctattttctatagatcattaattaattagcgttttgtacttgatataaatttcccctgccatttgttggttttatttaaatgttttctacaatgcaaaggctttttcatttttaaaagcaaattccttttattgtttctgggttttgtcatatttaaaaaaagcttcctactctcagattataaaggaatgcatcatgttttctatcataactgtgtggttttattttgtttgttagatctttagtttggtttgcagtttatttttatgtacggtgtgagatgtggattcagtttcatcttttctcagttgttccaacaacactgattaataagtccatcttttccccagtgatttgagatgccacccttatcacatacctaatttccagatgtatgtggatctatttcaagactctattttattccactgaattgcctatttacacatcaatgtcacactttttaattacagagacttactagtgtgtttcaacatttggtcaaatttactagtcctcctcttgtgtccttcttttccaacgttttcctatgtttgggctttttaatttttccatatgaaatttagcatcaacttagctaaaataaatcctgcttttttgcatttattggaattcagttaaatctaggagaactgatatctttatgatgttgaatcatcctatcactccaaaaaaggggtgtttaaattttttcctatacaaggtttgcacatttcctttaaatttgtttctaagtagttgatcttttgttgtcactgttgctgttttaaatgacactttctcttacactatcattctagcaaggttattgtttgtatatatgaagactattgatttttcatgttaattttacatat

SEQ ID NO: 685509 - DNA, 2203 bp, Homo sapiens
aattgattgcaacctgtctcagatacttttggttcacatctttaacaaatctctccctatcccttcccagtcactagtctcctacatttttaagtggcagaagttcaaagctagtaggaatttatcttaaaggtaacctaacaatattcccaaatttaggatgtttccaagtcatctacggggcttgttaaaacacatatttctggagcccaatcctacagtttctgatttagtaagtctgaggtggggcccaggaattggattttctcagaagtttacagttaatgcgaatacagttggcataaccctttctttctacacacatggaagccgggrccaacagagatggcatgagtggtgcagtcagttccacaaagtgatgtccagtagaatggtatgtgatgacgtacatgctcttctgccctttccaacacagtagccacatgtggatttgaacacttaaaatgtggctagtgcaactgagacttcacatttttaatgtaatttaatcttaatgaatttaaattcaaatgatcacatgtatctagtagctaccatattggacagttcatttctagaagtgaggtctcctgactcccaagccagtacactttctaatacacagcactgcctttattatattatatccccagacaaaaaagagttggtggggtagggaggtggcaggagtggggcagttggggtcggggcagcctgagagaaaggcccttaggtaaagaaaagattaaagcattcttgtgaagctggtgacagagccttcaacccagaataaaaatcaatagaaaatgactggatattcacttccagaggactgatgcaggggctcttggagggcctgacataaagaggtcttcatgtcaacaaaacacaatcagaccatccagttttgctcggtagccactatttctaccgaagatttttttcagagccactatcattggcatctccatgatatggacaccaacagggacaccaggagcttattttagttgttcagacttactaatttgcttttctgtaataaagatttaaagcttatggaggccactgtatttaaacacatagaggattttttctttttaactttcatacctggtctgctattcgactatagaagttgacaacttgttcttcagtgagcactgtcttatgctctgcttctataataaatccagctttggtaatcttcaattagagagtaaggtcaaatccaggtgtcgtgggatcacatgtaaaacaagttaagtttgttttttgggcttaacaaaccaccagctttcaatacattttctataagaacctcagcaaaatctataggacacttggtttgaagtggctcaaaaatatacaaactttaagatttgactgctctgctggatttcagacttgcttggggcctgtagccccttcattttggccaatttctcccacttggaatggctgtatttacccaatacctgcacccctattgtatctaggaagtaactaacttgcttttgatctaactggctcataggcagaagggacttgccttgtctcagatgagatgctgaactgtgaacttttgagttaatgctgaaatgagttaagactttgggggactattgagaaaccatgattcgtttttgaaatgtgagaacatgacatttggtaggggccaggagcagaatgatatggtttggctctgtccctatcgaaatctcaccttgaattttaaactcccacaattcccatgtgttgtgggaggaatccagtgggaggtgattgaattatgggggctagtctttcctgcactgttctcatgatagtgaatgagtctcatgagatctgatggctttaaaaatggaagatttcttgcacaagttctctttgcctgctgccatccacgtaagatgtgacttgctcctccttgccttctgccatgattgtgatgcctccccagccatgtggaactgtaagtccaataaacctctctcttttgtaaattgcccagtctcagatacatctttatcagcagcatgaagacagactaatatacaatctagtataagaactataattttttaaaatttacataggatgctggtagagtaggatcatttacagaaggatgcatgaatagatcgagccttgtaaagacataaagtactcaaagcctctagaggtacctagcaccagtagt

SEQ ID NO: 685510 - DNA, 1533 bp, Homo sapiens
ccatgttgcccaggctggactcgaactccttgcctcaagtagtccacctgtctcagccccycaaagtgctgggattacaggagtgagccactgcacccagcatttgccaagacctttgatgaccggctttttccaggtgatcagtccttgtctggtctgcctctgccccactcttcttctcacctagttggaatctctagctacttttcagtagaggagagtgtgtaccctaatctcagcttggttcagatctgcatttaactcatggaacctggctgctccccaggtcctgaagaaaaaaagggtctctctgtgggtatgataaaggatgggcctgtccccaggaccctgtgagagggaagcccaatgtcccaccaggttggcagggctggggaagggcaagtgttatggtagccccaagaaaaaaaagaggcagcagagggagcaggccagcgctcacatggaactcatgccactgcctgagtgacgggagggaggagtgcatgccagtgacatcagggggcagagaggcgcagttccagggcggctttccccctcacttcctgccatgttactctgatcgcctccaggtgagcctgcccactttgtgcccaggggcctgtagaaaaccacagctccccatggttacagccccaggagtggggcagagcagggaggagtcctggacagaggagaggcaggggcaggagggagtgggcctcaaactccaggagggggcccttctcatgggtcctgctttctggcttctccttccttacccctgggctgatcactcagggaagaactgagacaaagtttctcaccctcaggcccagggggtttaattactgggcccttagggaggtgtgagccccctgaaaggatgcaaggttttgttttgttttgttttttgagacagagttttgctcctgttgcccaggctggagtgcagtggcgtgatctcaccacactacaacctgcgcctcccgggttcaagtgattctcctgcctcagcctccggaggagctgggattacaggtggctcccaccacgcctggctaattttttgtatttttagtagagacagggtttcgccatgttgggcaggctggtcttgaactcctgacctcaggtgatccgactggctccgcctcccaaagttctgggattacatgagccactgtgcttggccatgatgaaaggttttgtgtggagagcatgtacatgcctttctgggaaaacagtccacagctcttattctcagcaggcttcatggtcaaaaaaggttagaactcttgctacagagctgtggaagcagctaggtgaggggcctgccaagggcactctgggcactacctgggcactctcgagcccatcatcccctcggcaggttgcactgcttggtatttgcagagctgagggggtggggcatgtggggactgtgaaatcaccctgagatgacccacagtcctcagctgggaagtgagcggtgcatctcctgcagcatcctccgtccctagagccatggggcca

SEQ ID NO: 685511 - DNA, 1533 bp, Homo sapiens
ccatgttgcccaggctggactcgaactccttgcctcaagtagtccacctgtctcagccccccaaagtgctgggattacaggagtgagccactgcacccagcatttgccaagacctttgatgaccggctttttccaggtgatcagtccttgtctggtctgcctctgccccactcttcttctcacctagttggaatctctagctacttttcagtagaggagagtgtgtaccctaatctcagcttggttcagatctgcatttaactcatggaacctggctgctccccagrtcctgaagaaaaaaagggtctctctgtgggtatgataaaggatgggcctgtccccaggaccctgtgagagggaagcccaatgtcccaccaggttggcagggctggggaagggcaagtgttatggtagccccaagaaaaaaaagaggcagcagagggagcaggccagcgctcacatggaactcatgccactgcctgagtgacgggagggaggagtgcatgccagtgacatcagggggcagagaggcgcagttccagggcggctttccccctcacttcctgccatgttactctgatcgcctccaggtgagcctgcccactttgtgcccaggggcctgtagaaaaccacagctccccatggttacagccccaggagtggggcagagcagggaggagtcctggacagaggagaggcaggggcaggagggagtgggcctcaaactccaggagggggcccttctcatgggtcctgctttctggcttctccttccttacccctgggctgatcactcagggaagaactgagacaaagtttctcaccctcaggcccagggggtttaattactgggcccttagggaggtgtgagccccctgaaaggatgcaaggttttgttttgttttgttttttgagacagagttttgctcctgttgcccaggctggagtgcagtggcgtgatctcaccacactacaacctgcgcctcccgggttcaagtgattctcctgcctcagcctccggaggagctgggattacaggtggctcccaccacgcctggctaattttttgtatttttagtagagacagggtttcgccatgttgggcaggctggtcttgaactcctgacctcaggtgatccgactggctccgcctcccaaagttctgggattacatgagccactgtgcttggccatgatgaaaggttttgtgtggagagcatgtacatgcctttctgggaaaacagtccacagctcttattctcagcaggcttcatggtcaaaaaaggttagaactcttgctacagagctgtggaagcagctaggtgaggggcctgccaagggcactctgggcactacctgggcactctcgagcccatcatcccctcggcaggttgcactgcttggtatttgcagagctgagggggtggggcatgtggggactgtgaaatcaccctgagatgacccacagtcctcagctgggaagtgagcggtgcatctcctgcagcatcctccgtccctagagccatggggcca

SEQ ID NO: 685512 - DNA, 1789 bp, Homo sapiens
ggattctcctgcctcagcctcccgagtagctgagactacaggcatgtgccaccacacccagctaatttttgtatttttagcagagacagggtttcaccatgttggccaggctgatctcgaactcctggcctcaagtgatccacccacctcagcctcccaaagtgttgggattacaggcatgagccactgcacccaggctgccatttcttatgcaactgagtgtaactattatagtggattgtcctttagggtcctttttctaggaactgctttttcctttgtccatggaatgagaacagaagttggcatgttagcacagagtgactctcaatccctggatccagttaatttgttcagggattggcatctacatcaagctcagccaataaggctctttccaaagatttttggacttggaaccagagagaccttgaattcagtctctcaagctgtgagacataaatctcaggagctgtcagcagccaagtttcttgctatgtcacaaaaatcagtctgagtgggaaagagtattgtygatatgcaaagaggagcaaacatgagtgacaagggagagccctgagcactcacggttctatttctactatggcccagctgcatctttggatattccgttgagttggctaagaagagttgaccctttcttagatgctaagaaccaatcagttccatgttttctttaagctgatttgaattgtgtttctgtcactagcaacccaaaagtcctcagtgatacaaagataaattttaaactcttagggatatattgtggaggctccagcactggttcttcctaagacattgttgggaaaccatggtggactttatggtatctctttaacatccagcatactcttccaccattggagaatagctatgctgtgtgggcagttttctgtagctccagggaagggcctggattgttgaaggcaatgataattatcctatctcctttgcagtgattgtcagaaatggccatgtgactcaatttgaggaagtctgccaaggaattctgggaaaagtttattcactcttaagagagacccacaggaggatatgttcttttcttattcagggctatgttgtatatgttgagaggctggaaactactgtagctatctctttaccagtctgaggataaaacaaagacatggagaaggtcaaagaaatggagttagaaccattctgtctggtcttccagtttagtgggtcaatgcattttcttataatttagctaatttggattgggtgtttttgttctgtttcgttttgctgctgaaagcatgctgaccaacacaaaactctcagccaatggatcacaggaataatctctgttcatatcaagtctttcatatccagaatctgtttcctctgttccatttgtcctatgtcattctcattctactgggattaaccccagtcgatgtttgcctggggtggttgtggggggaggggcgggtgttaggccatttttgtgttcctataaagaaatgcaggagactgggtaatttttaaagaaaagaggttttattttggttcatggttctgcaggctgtacatgaagcatagtgccagcatctgcttctggtgagggcctcaggaagcttacagtcacggtagaaggcaaaaagggagccagcacatcacatggtgagagaagagagcaaggtgggaggtgccacactcttttaaacagccacatcttgtgtgaaccaccagagcaagaactcactcaccacaaaggggttggcactaagccattaataaggga

SEQ ID NO: 685513 - DNA, 627 bp, Homo sapiens
atacagaacacatgacttaaaaatctgcattgtctttccttgtcctgatatgtattattttatcattacttaacaggacttttgtattttaaagtattttatacacaatgtgtataggctggatttggccatactcaggggccaaattttaaagagatttgggggttgcaatccagcccagttaataaagatcctctgtaagcagctgatcccagtgtttgcccatcttttgctactcattgtctggaagctgtgataccaaccacattttctgatcatgtctaaktctgctgaatgcagagaggctcaggctctatctagtaaaataagggagtcagagaaatatgaacatgtgaaagtcattgagcccagactaaaattacaacaatcaacttacaagtatttatattataccatattatatgtcaacaatattcaggaatagtatatttggtgtgtgtatagaatacagtgttcctccaaaactgtgctaaaatattttaaataaaatcatacagcaaactaaaaacagtaaaaagaagatccctttcttcttaagaatatcttattccttctcactggggatttcttggaagttgttctagtcaagtgttttccttgagctga

SEQ ID NO: 685514 - DNA, 1313 bp, Homo sapiens
ttgaaactgaataagcattgagttccagtcctagcttgctacttagctatgtaacccagagcaagtcactggccattgcttaactttaacttcaatttccttatctataaagaaggctaataaatctttgctttttctaaatgaaatttaagggaaataactgttttggactgagctatagggtgtattaggactaataaaccagaccaaaccagaatggagtcacttattctaggtgccatgtacttcacaaactgtactttgaaaccagtttccccctaaaaccaggagatttacagcaaccaatcagaagggacccagtttacctgagcaggcgtgataggggggtcccctctgttttaaccccataggtaacttttaaatgaccaatctgccctttgttctgtttctgctttcttcaaccatttcctgcctacaaagccaacctcttctgctcagctcatcagagtgcctttcctaaatcttaaatgagaggcatcccattcatggactgctaatgaaagtcaattagatctttaaagtaaatctgacaaaatactgtttttaatagtttgtggtaaagaataaatgatatcgggcacacaactaacacaatgcttagtatatgataaacatttttttgttttttgagatgcagtctcgctctgtcacccaggctggagtgcagtggcgcgatcttggctcactgcaggctctgctccctgggttcacgccattctcctgcctcagcctcccgactagctgggactacaggcgcccgccaccatgcccggctaattttttgtatttttagtagaaatggagtttcaccatgttagccaggatggtctcgatctcctgaccttgtgatctgcccgcctcagcctcccaaagtgctgggattacaggcgtgagccactgcgccrgcctatgataaacatttaataaacggcagctattatgattaacatctttgacttatcagaaagatatctaatccagaagcagtttcttttctgaaaaaaagagtagtaccaagggagcctcggtggacaagcagaagccctatgccaagcctctggacaaaatggtctaggtgactactcagggttggtgaagagggcctgtaccccatcaaggggctacagtacttcagacaggtttcatcccacctgggttgccagaattgttactgagcaaaacgggctctctcctcaatgagttagaagctgtaaaccaaaaagtatctgagacaagagacaagtctcaatttagaaagtttattttgcaaggttaaggatgcacccatgaca

SEQ ID NO: 685515 - DNA, 729 bp, Homo sapiens
cagagaaagaggagagtgaggagtaaaaagcgttaatctgttttcaagtagggtaagttgtgttgatgtgccctaggttcaagtcaatgcaagaacaggtgacccctgagaactcacacacagggtacaaggcccctgctatatagatacagggkacagagttttgttttttattgtgtttttttgggtctggttcctcccagacttcatttttcttcatcctagaattccagaatcttgccagggactttctgcccttaaggaaagtctcctgcaaaaagagggagggggccctccagggctctcatcaaagctgagggttgagcctccctctcagttagctgcttccacgccagaaagggaaaggtagcagagtctggaaggcacagcatgtccagatcctacccagatgagagcatctgatgaacagataatataaaaagaagtgctgtcctcaaactgatccttagattcaatacaatctcaatcaaaactccaaaagatatttttgcagaacctggcaagctgattataatttatatggaaatgtaaagggtcaagagtagccaagactctcctaagaagaaattcttctttaccaggtatcaaaacttattacaaaaattataataagatagtgtaatactggtgcaagcatagaaaaatagacaaatgtcacagaatacaggaacaagacacacatatgtggacactttaataccaaagtag

SEQ ID NO: 685516 - DNA, 645 bp, Homo sapiens
tgaatcatcccatcaaccagcttatcctcgctgtacaggctaccctctcattagtcactgaacagccatcttagttatcggattgactgcagcagtatcaagatgcttgtgtttgagtaattcttattttacttaataatgaccccaaagcccaagagkagtgatgttggcatactgttataaatattctattttactactagttatttttgttaatctcttatgactgatttctaaatgtttaaaaaaatttgtttaaaaagtttaaaatttttaaaattaaaaagtcgaaacattttaaattaaaaattaaaaaaatttttttgttaatctcttgtgcctagcttataaactaaactttatcatatgtatgtacaggaaaaaaattagaaaaatatacatcttcatagaattacaataatgaactgcatggtgaccctcatggatagtttttaaaaatagttcataacaagcagagattatgtttagggcacactttacggacttagaatctttgctgttgcttacaaagagtgaagaaaatgactctacttaatagaaatttatgctctcagtacataaatatatatatgagcatccaagagaggtctgggttcctatattaagtagtggcttttatttctc

SEQ ID NO: 685517 - DNA, 618 bp, Homo sapiens
caagatattgtccacaaggacaaatgtctattgggaaaataataaaatttctaatttaactcgagggagaaaattagaaatgcctttctgaacatataatacatggaagagcctttggtagttacatgtattttatgataaattataaattctattttacgtcttctacttaagacttaaagggagaaaaatccttgagacatagagctatgacatattttcaagttcataacaactctccatttggaattggcctgttcttcctttttgtgtcttgcctcaggagagaaaataataaaaataccactccctgaaatccccattaactctactatgtaagtgaactatatatcgttccttttttcagattctaaagagattttctttattctttattagtggcattcaaaattgctaatgtttattctgttttttttttgttgttgttgttttgagatggagtctcactccgtcgccaggctggagtgcagtggcacgattggctcactgcaacctctgcctcccaggttcaagcgattctcctgcctcagcctcctgagtacctgggactacaggcstgtgccaccacacctagctaatttttgtattcttagtaga

SEQ ID NO: 685518 - DNA, 506 bp, Homo sapiens
ttcacctyttcccactctctttctctgacttcacctcttcccactctctttctcacatacctctgatctagcaacaaaaattctggaaaaaaaaccaagagtagtagaaaggtggcaatgttttactttgtaataatatcagttcaataatgaatatcacctgtatgaagacactttatttgaatacctggttcagcagtacttaccataaaatgtcaattaagatagggattaagtcctttaagaatatctgtaatgaggccaggcacgatggctcatgtatgtaatcctggcactttgggaggccaaggcaggatgatcacctgaggtcagaagttcaagaccagcctggccaacatggcacaacaatgtcctactaaaaatacaaaaattagctgggcgggcgcctgtaatcccagctactcgggaggctgaggcaggagagtcacttgaaccccggagggcacgaggttgcacgtgagccgagatcatgccactgcactcca

SEQ ID NO: 685519 - DNA, 318 bp, Homo sapiens
tcaggaggctgaggcacaagaatcacttgaacccgggaggcggaggttgcagtgagctgagattgcactactgcactccagtctgcgcaacagaacaagactccgtctaaaaaaaaaaagamaaagaaaaaagacattgcagagagtcctcactccaagaggagagatccttcagttgcaaaaatattttataaaaagaaccccacaaagtattatcataaataataagtggaccctgacaattgcagtcaagactggtaaagcacaaggcctcttcttgtgtttctttctttcaaggtaagggatgcttttggcttg

SEQ ID NO: 685520 - DNA, 639 bp, Homo sapiens
accagggctccttggaaaaaatggctgattccaaggctagcacaaggaaaatcaagaaaagcctggagcattataaatttataaagacatgtcaaagagacatccagcttaggaacattcaaaacggctaggcccagaactgatatttgtgtataacatatggtttttctcatatagatagactattccagcatcatttagtgaaaagtgacctgcaagacaatcttgctgaaattgctttgaatctgaacatcagctggggagaactgcattacatgaaacttcatacacataaatgtgttttatttttctatttatgtcttagaattattaaaataaattttcatacaaatactrtatgtattttgttagattcattcagatcctatgcatttttcttcctaatacataaggcatatttttaaaaaatatgttttctgtttgttgccaaagaataaaaatgcaattgatttttgaatattaaacatatctagccatggtattgaattcttctaattcctaataagttgtcaattattttattctttctaggtaaatattgatactataataaattttccttctttctgtttctttccttttcctattatttacttttcttgcattactaggctagtt

SEQ ID NO: 685521 - DNA, 2212 bp, Homo sapiens
tgaagttggaaaacatcattctcagtaaactaacacaggaacagaaaaccaaacactgcatgtcctcactcataagtgtcagttgaacaatgagaacacatggacacagggaagggaacatcacacactggggtctgtcagtgggtagagggctaggggagggatagcattaggagaaatacctaatgtagatgacgggttgatgggtgcagcaaaccaccatggcacgtgtatacctatataacaaacctgcacgttctgcacatgtatcccagaacttaaagtataataagaaaaaaagagacaaaaacagatattccagcaataaaataccaattacaagatattccaaatttgaatatgaactccttctcatcatgaattttctgaaattaaaattaaaagattaagttcaatgattaatgtacaaagatattaaaccccaaaggagttaaagtccaaaatcatattctcttcaccttgtaattaaaagtttaaagaaaattaatgcccaaaatatatcccaatttcttattcaacctctttgttatatttctcaatgttcctaggctatgcgcaaaatgttggagttgagatgtccaaatataacttcttttttcctcatgagcatcttgaacaaattataaaattaaacaaagagaacagagaagagactaaaacaacacccttattactaacaaatgtggcttgtgcctacaggcaaraaagcctgctaacaatgaactctagaactggtcttccccactgtggcataaacagctactgttcacccatgtgtgtgtttggcccctcttccgggcacaactacactatatctttctcagcctcccttctggttaactctgttcatgtgattgaattttggccaatggaatgtggaaaaaattctgtgcaccctcctaacatggtcaataagaatttcccaaatgtgtttcatgctttcacaccctcccctcatttgcaagctgaataaagaggactctcagggcttaaaagagggcaaagccaccagatggaagaacactaggtctcagcatttgtgcatggaatagagcctgtttctttaccatcaatcctcattgaacactgacataagtgagaaacaaacatttatttttgttacgctacggaatgtttggaagttgtttgtttcactggctagcctatcctgcctgaaacaccccgaaaatccctggaagccctgatgcaggacaggttttcctgtggcaggaagtgaactgctcaggtgatccagagatgcagaagaaacttctgaccctatggacagctccccccatgaaaaagagagtaaggctgagctaagcatgctcagtagaatctttccacattcaatccaagcagcttaagcccctctttcttccctggtaggagtgagggagcttctttccagaggctaaaataatcacaccgccacatggaaggaaacagctccccatcgaaatgtgttttctttttgtgcagctctttcttgatgtctagaaatctttccctttgttccccatccagattctatatactgtttctcaagacacaccccctcttagcatccttagcaggtatgagacagaggggcactacatttctgtcttctgactagcccatgaatgccagtcatacggtcccctttgggcctttgggcaagcttcggtgagagttaaggagaaacagcccttcctgacctctctccccacctgctccagattccagagtccatgaagggtcattctcagcagacataataaggatcctggatgcattcttctttttaacaatgaggtcatttcctcacaaatcaccaggctcttcctaagggaagtttgcacccacagcaatgcccagagtcctcctgccttacagacccaccttccttctctgcctttatttgaaaaggagagagaaaagctccaatcttcatcataacaaaactaatgctgggatgaatccacttcaatgtgcttgccatgctcgtagtccctactgagggacaataccctgcatagtcctggatacttgggccaacgtttggtcccacatggcctccagctcccaaccaaaacagatgaggcagaggtggaagcccatggattggtcagcacactatggctgagagataagccagttaacgggaattgaaacccaaagttcatgatgtagaattcaaatgagataa

SEQ ID NO: 685522 - DNA, 1220 bp, Homo sapiens
ttttttttttctgaaatgatgtaagaaaggtaaaccctcttgaatcttcaaacatayggaattttttgttctattcttatactagattagtagcttggctgggaataaaattgtctgttcaaagtcatttttccaagagatgtccagtcaagatggcattgtaactctaagtttagatgtgcctccaacccaaagttccaagtacctagcaatgggaggtaaaataaaaaaagagtaaaatcttaaaaaaatctaaacatgacattcatgttaaggattagaaatgaaacagaaacaaagtaataggcaaggatgaagcatctataggctccaaccataggctccacagcaatggactgaagccagaatcactgcttgaaatgggactgggctatgactcatcatctcatgacaggtacaaaaaaaatgaactcactagatatatagaaatgcagcttatatgagacgtgtcaagatacacacagagctttgcaaataggacctgagccaagctactctgttgttttgtaacaggatctgagacataccctgtatcaccacaaaacaaaagtcttaaatcaccatttaagatatagttccagactgggtggagatactaaaaactactaaaaaaggaggaaaaaaaagagagaaagagaaaaatatcttttcattaaagacaatcctacacaccctaattgattccaaatctgtgaagaaaatgagctctaggaaaaatagtcagtgcaagtgaaatgaaaatgctggtgcaatctgaagaagactttgtgtcacatgcctctcacataccacttcagattttcatggccttgcatcgttcccatcccattctttgctatgatggcaagctgtacattggatcaaaccagatttaagtgggtgcaagttagcaaggtttaccgcaggtttaccccgcctcttttactgctgcccagggagtgcccactcaacactagactgagactacaggtttgtttctctgaacgtagcaaattgtattagttcattctcatgctgctatgaagaaatccccaagactgagtaatttataaagaaagaggtttaattgactcacagttccacatggctggggaacttacaaggcctcaggaaacttacaatcatggtggaagacacctctttagagggtgacaggagagaaaatgagagtcaagcaaagggagaagccccttataaaa

SEQ ID NO: 685523 - DNA, 1004 bp, Homo sapiens
aaacagagtcgagataaaagcatcatcagtgatgggtctatttcatttgttcattcaatgaatgtttttgtgtagttactatgagtctagcattgtgctaagttcagaggacacagtggtggccaagacagacttagcagaacttactctctagaaagcagtcttcagtttgatgtatcatagctctgagagtgcaggatcacttttcaataggtacatgggctggggtggttttaagaatatcagtttctagattttcaacatccatatgtacttcatgaaaattgtgccgtctgagaatctgactgtggtccagacatcatgctggctctctttctgcaactcctatttcatgaccatctytctcctaccatatgaaaaaaaggtataactccctcccatctcaaattgtactatatgcctatgtagcaagaccatggagagaactgtgggatataacatgtgaggacatgagtggtcattcacatctctgctttttccagcaaacatttaggaactgcctcttatgtgccaggcactgtcctatgaactaggaaagtacaaaacaatcagctgtgctcactttcctcaaagaaaaggcaaactattacaaaagacaaatatgttaaagttattaaaataaaatgtgatgaaaactagagtagaaacattatttgaaacaattcataatggcatggaaataactgttaattgcttgttatatctcccttaaattttatcagaaattgtaatattaatttatacctacttgtgtattacagttttaagaaagtaataaagacatttggacaatggaatcttcatcgccttccaccatttcatttacacaactctaagtgcaaggttcctttcaatcaagaaacgtctgtaataaatgtctccaccttccactcagttttacctctcagggtgacacagaaaaaaacttcactcagtggattataaatatcagagtcttctataggttttcctgttatgaatta

SEQ ID NO: 685524 - DNA, 630 bp, Homo sapiens
gaaggctcagggagattctattatagatttacagagactcctaaacttaaaaagtgtaatttttcaatttaaaatttgagcagatgaattaaggagagaaattcactatagagactaggattagcagcctggtgggtcaagtgcaagacacatttcaaaacatagaaaaatacaaagagaataaaatcttgaggaagaacacaagagatttggaggacagcatcaagagttctaaaatctggatamtagggattccaaaaggagaaaaaggaatggatataagggaagataacaattaaaaaacaaatgggaaaaataacagtggattgaaaaaaaaagacttgtgtattgcagattgaaagtgcccaggcaggattgattttcataaccaagggttggaggtgagagataaagagacaaaacaggctgatggatacaggctcttcattctgctgacagtcttaaccctaaaaacttacactgtgtttttgtcatgtggtggtgaaactttgatgttgcctgataacaccacccttgggttgcactttaatttttcatgtgacatgtcagccctattccattggctactgcatcaactatcattatctagtggatgaaaaagtcgttaca

SEQ ID NO: 685525 - DNA, 630 bp, Homo sapiens
gaaggctcagggagattctattatagatttacagagactcctaaacttaaaaagtgtaatttttcaatttaaaatttgagcagatgaattaaggagagaaattcactatagagactaggattagcagcctggtgggtcaagtgcaagacacatttcaaaacatagaaaaatacaaagagaataaaatcttgaggaagaacacaagagatttggaggacagcatcaagagttctaaaatctggatactagggattccaaaaggagaaaaaggaatggatataagggaagataacaattamaaaacaaatgggaaaaataacagtggattgaaaaaaaaagacttgtgtattgcagattgaaagtgcccaggcaggattgattttcataaccaagggttggaggtgagagataaagagacaaaacaggctgatggatacaggctcttcattctgctgacagtcttaaccctaaaaacttacactgtgtttttgtcatgtggtggtgaaactttgatgttgcctgataacaccacccttgggttgcactttaatttttcatgtgacatgtcagccctattccattggctactgcatcaactatcattatctagtggatgaaaaagtcgttaca

SEQ ID NO: 685526 - DNA, 645 bp, Homo sapiens
atgccagaaagccttcctatcctgagtatgaattaaaagccccttctctcagtgctctgtacttatttatgttaaaatacttatcactcaacattgtaatgacccatgaacttgtctctccctctccactcccttttccccaaaagttacaaaaatctaaaaggaagaaagaacatctcttcttccttttatccctctgctctkcatcaggctaggtactcagttcgataagagcctgacatgtgagggggatgaatggtggaaagtctccaatcaaggacctttgctaccttgaactgcagcatcaagaactacaccttaacccatccacagagactctgagctttccacaaatttgattttcagaaacatgaaacaacaaagttagaaagcaccttaagagaagctcttttccctccggtttgtaaatgaattctaaataccttcactttacatcaacagggcaatctcacttggttcttgtttatatcttacactttctgatcagcttcatttgaagaaatggcccatgattttttaaaaataaaattgttaagccaccatccatctgctcaaaccctcattttacagaatggatccccaaggcccagagagaaggaaggaacaagttcagtgttgcatctt

SEQ ID NO: 685527 - DNA, 650 bp, Homo sapiens
tttctactttcttttaagttcctaaaatgcctaaaaattacaggtatttaaatacactactatcacactatgaattaaaagtattagctttacttccaatagccactagtaaaaaaaaattacaattaacactaaagaaagttgaagtttaaaaaaattaaaaatattatgttgatcttcataagctaatattcaccccaatattataaaaataaacctctataaaaagccttttgagaattttttataagacacacgttgctctttcaagactgtaaaaagttacactgatttccaaagtattcagcttataaaatctcttatacaaataaacattattgattgggcttgataattcaatacttaatttttataataaggactcaacactaattttttaataaaaataacaaatgcaaaaaaaaaaaaaaaaacaaaacaaaccaacccatgatttacctgcataggtttggtaagyggatccattctaactaagtaaacttccaaggtgcgttcttttttcatgggcaatggaagtgtcaagtaacaaaaaggatcaaatgttactgaaatcttagcacactcaggacaaactaaagttgatttgaaaaggccatgaaatatatctactatgatagaatcatttcgtt

SEQ ID NO: 685528 - DNA, 599 bp, Homo sapiens
ttctgtttttcactccacataatctcttctgcagatcacagtgtttcctccaaagtaaattcaagaatccaataaagcaacttggtctttagtcacttaatttgtggtttactgcctctgccatccattctaattctttcttaagaatctttgcatctttagaaacattgctttctcagcatatccttttattattatttccttaatatttgtttcctacaaaaatttttaaaaatcttttcactccattttttctttttttgagacagggtcttgctctgttgcccaggctggagtacagtagcctgatcttggctcactgcaacctccacctcccaagctcaggtgatcctcctgcttcagcctcccaagtagctgggactacaggcaccctccaccatgccgggctaatttttgtacttttagtagggacagggtttcacwgtattggccaggctagtctcaagctcttgacctcaagagatccacctgccttggcctccctaagtgctgggattacaggcgtgggccattgtgcccggcctcactccatgttttttatctttattttttccattccaaaaaacttcaccagagac

SEQ ID NO: 685529 - DNA, 618 bp, Homo sapiens
ctgcccaggggtctgaggtgtcagtccacccctctgctccccactcaggtaggggcaggtccggagctgcagcatgacaggraatttcaggcccggaggtcttcccacttgtcacctctgtttcttcttctctgcccaggtggtgcacattctgaaaggctcagatttctttcattcaacctcctttcttcctattttttcttattgtctggctctttcctgcagaaggaaggagaagaactgggtgtaaaccttgactctgagctgagggctcagatgctggctgaacttctcatttgcaccaggtgtaggagggaagtgggcagcccagcacagaagcagctctctggcaaacagcttcctctgtaggcctcatgccctccaactgcagtgccctctgaccttgtcacactgcaggtaggggacagaactaaggagcatctgcacaagcacctggctgtagtgaactgaatagtgttcccccaaaagatatgtccaagtccagacccctagtacctgtgcatgtgaccttacttggaaatagggtctttgcaaatataattaagatagtacttgtcttagtccattcaagctgctaaaagaaaaaaatatcacaaa

SEQ ID NO: 685530 - DNA, 597 bp, Homo sapiens
ccaatgcattttggcttctttacacaagagccgggctgagtcatgagcctcagagcctatgccctctcttctcacagagcagcctctttctttgttccaaggtagatgcactatgatgatgctatagtctatgaaattcatccagcatctccgtgtcactgcgctgccttggagtctatgaatcccaactctggccttgtctctatctcaggtgtggaagaaattaggaaacagaaaagaggactgcaacggcaactgccacaggagmctaccgtcaagtcctttcccaaattcacagccatctaccaacgagtcaaagccaaagccatctttattagactttatgttgaataactgctttggaaacaccaggttcccaaggcgggtcttagggactgatgtgcgtatctactcctgagcttgctgggggagctgcagaaggaatggaggagaaagcacctccaggttcttcagagccccaggcttgcacgctgtgagctgaaggtcataggctctaccatgcaacacacaggatgcagagccgtaggggcgggagaggagcccatgctgaggagtacctgggtccatcaagcaggg

SEQ ID NO: 685531 - DNA, 597 bp, Homo sapiens
ccaatgcattttggcttctttacacaagagccgggctgagtcatgagcctcagagcctatgccctctcttctcacagagcagcctctttctttgttccaaggtagatgcactatgatgatgctatagtctatgaaattcatccagcatctccgtgtcactgcgctgccttggagtctatgaatcccaactctggccttgtctctatctcaggtgtggaagaaattaggaaacagaaaagaggactgcaacggcaactgccacaggagcctaccgtcaagtccyttcccaaattcacagccatctaccaacgagtcaaagccaaagccatctttattagactttatgttgaataactgctttggaaacaccaggttcccaaggcgggtcttagggactgatgtgcgtatctactcctgagcttgctgggggagctgcagaaggaatggaggagaaagcacctccaggttcttcagagccccaggcttgcacgctgtgagctgaaggtcataggctctaccatgcaacacacaggatgcagagccgtaggggcgggagaggagcccatgctgaggagtacctgggtccatcaagcaggg

SEQ ID NO: 685532 - DNA, 597 bp, Homo sapiens
ccaatgcattttggcttctttacacaagagccgggctgagtcatgagcctcagagcctatgccctctcttctcacagagcagcctctttctttgttccaaggtagatgcactatgatgatgctatagtctatgaaattcatccagcatctccgtgtcactgcgctgccttggagtctatgaatcccaactctggccttgtctctatctcaggtgtggaagaaattaggaaacagaaaagaggactgcaacggcaactgccacaggagcctaccgtcaagtcctttcccaaattcacagccatctaccaacgagtcaaagccaaagccatctttattagactttatgttgaataactgctttggaaacaccaggttcccaaggcgggtcttagggactgatgtgcgtatctactcctgagcttgctgggggagctgcagaaggaatggaggagaaagcacctccaggttcttcagagccccaggcttgcacgctgtgagctgaaggtcataggctctaccatgcaacacrcaggatgcagagccgtaggggcgggagaggagcccatgctgaggagtacctgggtccatcaagcaggg

SEQ ID NO: 685533 - DNA, 639 bp, Homo sapiens
ttacagaaaatacgttgatcagtgattagccacacactgttatgtagggtgtgggttatgtccagcgtggccttattaggttaatttataggcacttgtagyagcagcagtttccagagatgaattcatagctcaagagggaattgggacatgattacagtcttgttttgacatctctctgggcctgatcattaaaaggacttgcattcctcagagttctttgcttagcttctctgtcattcaccatcccagccacagcccccttctgtcttctaacctttcattactcagcacttatgccatactggacagtgcaacaggtgctgcaaatgagaggggaacaaggtggacatggtcactcttgtgctgtgtgtggtctagagataaacatacacaagatgtacaaaaacaaagcaattacacatgtgatgaaagctattaaggaataagtcgagtgctgagatggagagcaactggggcagggatctctgctttagacagagtggtcaggggaggtccctcagagtagttgagacttcatctgggaccagaaagatggaaaacaaccagtcatagaaaatgtgtgttgcctgtgtgtgtagcaggtgtggtgggatggacagtctacaacagggaaga

SEQ ID NO: 685534 - DNA, 630 bp, Homo sapiens
gtgcactatcatgaacagataacacattaactaacattttaggaaggacacactgggagtgagtgttcagtggctggagcaaaggaagtcatggaaatatgtcagtagaaatgttccagttttggaaacatggcatcatgcatgagatgagatttccaagactaggaatcagatttagttttcttaggcatgctgggactaagcatcctttcataacaccagtgtttgtggtattgggaatcccagtgacctcacactgcaatccttcattaccatcatgtgcaaagcagcttcgaagatgtctctgctctgaactgcattgtcttcacagaaaagtgtggggaagatcccacttctgaggcygcaggacacacagaatgacctttcctctgccattccctgtacggtgccattggttgctttaaacacatttttattagaattgaaactttaaacatagccttgccagtagcttcaaaaagacaccagctaatctacaagcatatatggcccaccattttctcaaatagcaatgagagtaaaataaatagggtaatatggtttatcattgcctcaagcaatgtgcagaattgttaatagtagtaactcctctcccagaaggaaaagaaa

SEQ ID NO: 685535 - DNA, 683 bp, Homo sapiens
gtggctcacacctgtaatcccagcactttgggaggccgaggcgggcagatcgtgaggtcaggagatggagaccatcctggctaacacagtgaaaccccgtctctactaaaaatacaaaaaattagctgggtgaggtggcgggcrcctgtagtcccagctactcgggaggctgaggcaggagaatggcatgaacccgggaggcagaggttgcagtgagccgagatcacgccactgcactccagcctgggtgacagagcgagactctgtctcaaaaaaaaaaatctcccagcaagatatgttacctccttatcagctgcattatatggtttatgattttatgttataaatgaatcgcttctctagaaagaggtataaatatctacttatgtctcaaactttaaaataattatatttgcttattagaatgatacatatttaatgatgcattttattcacctggtatagtaataacggggcaggaattaaaatagtctgaaaaaagctcagcgtttagagttgcactcattaaaataacttgaagacctggcctctgcgatacaatgtccttcaaaactagcagcaagaagtcactagagaaaataaaagaaacacctgaggatcaaacaaattcaacacatgaaaattagtaacttttactatattttgagcaagaaatgtgtaag

SEQ ID NO: 685536 - DNA, 2258 bp, Homo sapiens
  misc_feature 1248, 1249, 1250, 1251, 1252, 1253, 1254, 1255, 1256, 1257,1258, 1259, 1260, 1261, 1262, 1263, 1264, 1265, 1266, 1267,1268, 1269, 1270, 1271, 1272, 1273, 1274, 1275, 1276, 1277,1278, 1279, 1280, 1281, 1282, 1283, 1284, 1285, 1286: n = A,T,C or G
  misc_feature 1287, 1288, 1289, 1290, 1291, 1292, 1293, 1294, 1295, 1296,1297, 1298, 1299, 1300, 1301, 1302, 1303, 1304, 1305, 1306,1307, 1308, 1309, 1310, 1311, 1312, 1313, 1314, 1315, 1316,1317, 1318, 1319, 1320, 1321, 1322, 1323, 1324, 1325: n = A,T,C or G
  misc_feature 1326, 1327, 1328, 1329, 1330, 1331, 1332, 1333, 1334, 1335,1336, 1337, 1338, 1339, 1340, 1341, 1342, 1343, 1344, 1345,1346, 1347: n = A,T,C or G
gctgaggcaggagaatcgcttgaacctgggaggcggaggttgccgtgagccgagattgcgccactgtactccaggctgggcgacagagcaagaaaaaaaaaaaaggaattgaacagagaaggcatataaccagaagaactattagaagaaataatacattactattrttagtaaataagaaatatgaagtaattagaaactaaagaaagacttttagataaaaagaatgaaccaaaagaaaaagaaataattcctagaacaagacaataataaatattaaattactatacagaaaacattggaaatctctaaggggcaaataatctttttgtagaaactccagaaaacaatgggaaaaaaaattaatggtaaataatgtcattttgccactgttggaaatgaacatctgaaagaagaaatttttttaacaaaatcattgaacaacttggaagaggaagccaaataaaacattctctcagattaatggtatttaaatgattgatttataaagataagtttaaacttttagggaaacctatatccagtataattttgaatatgaagagtagctttggattctataacatttgtacttccacaaacttgaagaaatgagaacatagcactggatttggttcctggctaaaataggagaaagatttttataaaacctaaggatctgtagaatatgaacgttaaaaattcaaaagatgttcacatctgaataaagattaattacacagtggagaagggtgcttcaaatatttacaaataccagtttacaagaaagggtatacaaattacaaggaaaagtaggggaatatttgctaactctgactgaaaaaagcaaaaactaataaaatctaggaacaaaaatcagtaaaaatattggcaagattaaaggttgaatatagaaaggtgacagttgtgttagtttgaaattttaataaattttctaatcacagagatgacatgatcattctaaggcatacagtaaataccaaaaaatgtaaaagaagaatctctgtcccttataaaattgctagttacatgttataattttagtctcttttcttctgggagtatattgggagttagaagagggatatggtagaaagagagatgtatttccacaaacactattgggattatatagttttgttgtgctgtttttgatttaacagaatgatagcatgagttaatgaattatctttttttttttttgaaacaaagtctttgtcatccagnnnnnnnnnnnnnnnnnnnnnnnnnnnnnnnnnnnnnnnnnnnnnnnnnnnnnnnnnnnnnnnnnnnnnnnnnnnnnnnnnnnnnnnnnnnnnnnnnnnnttgttggaaaaagggtgggggcatcagttggagcctcctcagcaaaagtagctcggcaggaccatattttttcgcaggtctggaaggggccggggttcttttttttgagacagagtctctgtcacccaggcaatggaggtgcagtggcgcaatctcggctctgcaacttccgcctcctgggttcaagcaattgtcctgcctcagcctcccgtgtagctgggactacaggcatgtgccaccacacgggggggggggtttgtatttttagtagagacggggtttcacagtgttggccaagctggtattgaattcctgactcagatgatctgcccgtgttggcctcccatagtgctgggactacaggcgtgagccactgcacccggcccgctgtgtggttgtctaaagagacttgtgagccatataaaattatttaaatgccttatttttacttggcaagtagtgagtgttggctaatacagtatcacttcactggactgtatatcttgtttctttttcgtgtgtgtgtgacagtcttgctctgtcgcccaggctggagtgcagtggtgggatctcagctcactggaacctctgccctccaggttgaagcaattctcctatctcagcctcctgagtaactgggactacaggtgtgcaccaccatgtcccccagctaatttttgtaattttttttttttttttgagatgaagtctcactctggagtgcgatggtgtgatctcagctcactgcaacctccgcctcccgggttcaagtgattctcctgcctcagcctcccgagtagctgggattacaggtgcacgccaccatgcccggctaatttttttgtttttttagtagagacagggtttcactatgttgaccaggctggtctggaactcctgacctcaggtga

SEQ ID NO: 685537 - DNA, 1076 bp, Homo sapiens
ctcagtatttcaaggagaaattattcaagttgaataaattrgagcctaaaccacagtctttccgaagcctatggaatgttattcatgaagcaggtattagacacaggggattctcaggtgctacttcagaagccagggtgcacctgcccctggtggtatgtgctgaacaccgtgtgatgatcctcaggcctgtctgggaagcccaggtcttcccagacagggatgctttgataaatccactgctaggtaggtaattcttctgtaacattaataattcggttttacttttggatcctaaagtgggactacttagaaaatctgcaaaaatcatgcgaagaaaatcatgtaaaatcatgatctttacttaggcacttacaggtgaaatgacgaggtatctggaattgcattaaaatagatcaaggtgaaaaagactgacaaaaacattaactgttaaaacttggggctatatatcaaagacattagtttctctatgagtatatttcaaactttcctcaataaattttttaaaaattcaatttaaaattcaagccacaaataaatgctttttaaaaatttcttagattatacaaatagtgccataacatcaagaataatcccaaatcattccatatacttcaaaagatacaaaaccaggctgggtgcggtggctcacgtctgtaatcccaacactttgggaggccgaggtgggcggatcacctgaggttgtgagtttgaaaccagtctgaccaacatggagaaaccccgtctctaccaaaaatacaaaattagctgggtgtggtggtgcatgcctgtaatcccagctactggggaggctgaggcaggagaatcacttgaactcgggaagtggaggttgcagtgagccgagattgtgccattgcactccagcctgggtgacaagagcaaaactccatctcaaaaaaaaaaaaaaaaaaaaaaaaaaaaaaaaaaaaaaaaagacacaaaagcaggaactcttttccaggagcaatcccatttagttaagaaaaagaagaaaaaaatattccctagattcagccagttccttatctctactg

SEQ ID NO: 685538 - DNA, 600 bp, Homo sapiens
ccaccattttggccaggcccagtggctcacacctgtaatcccagcactttgggaggcygaggtgggcagatcacctgagatcaggagttcaagaccagcctgaccaacatggagaaaccccgtctctactaaaaatacaaaattagttgggtgtggtggtgcatgcctataatcccagctactggggaggctgaggcgggagaattgcttgaaccaggtggtggaggttgcggtgagccaagatcgcaccattgcaccccagcctgggcaacgagaatgaaactccatctcaaaacaaacaaaaaagaacaccacttttcattttactgaattacctttcctgttcaagagcatactccaacattttgatcctcctcacaagatccttcttcaaattttcttggcccttcctttctccctgtagaaaggtaatctgggcctgagtaggggaaagacagacaaaattcagtttagaccaaaaaaaaaccagttttttttaactcagtaaagaacctttggaagttagaacaattagatgcaaaaatatttcctttacacatttctcacaaagcatgtagaaatataaaaatgcactgactg

SEQ ID NO: 685539 - DNA, 600 bp, Homo sapiens
ccaccattttggccaggcccagtggctcacacctgtaatcccagcactttgggaggctgaggtgggcagatcacctgagrtcaggagttcaagaccagcctgaccaacatggagaaaccccgtctctactaaaaatacaaaattagttgggtgtggtggtgcatgcctataatcccagctactggggaggctgaggcgggagaattgcttgaaccaggtggtggaggttgcggtgagccaagatcgcaccattgcaccccagcctgggcaacgagaatgaaactccatctcaaaacaaacaaaaaagaacaccacttttcattttactgaattacctttcctgttcaagagcatactccaacattttgatcctcctcacaagatccttcttcaaattttcttggcccttcctttctccctgtagaaaggtaatctgggcctgagtaggggaaagacagacaaaattcagtttagaccaaaaaaaaaccagttttttttaactcagtaaagaacctttggaagttagaacaattagatgcaaaaatatttcctttacacatttctcacaaagcatgtagaaatataaaaatgcactgactg

SEQ ID NO: 685540 - DNA, 600 bp, Homo sapiens
ccaccattttggccaggcccagtggctcacacctgtaatcccagcactttgggaggctgaggtgggcagatcacctgagatcaggagttcragaccagcctgaccaacatggagaaaccccgtctctactaaaaatacaaaattagttgggtgtggtggtgcatgcctataatcccagctactggggaggctgaggcgggagaattgcttgaaccaggtggtggaggttgcggtgagccaagatcgcaccattgcaccccagcctgggcaacgagaatgaaactccatctcaaaacaaacaaaaaagaacaccacttttcattttactgaattacctttcctgttcaagagcatactccaacattttgatcctcctcacaagatccttcttcaaattttcttggcccttcctttctccctgtagaaaggtaatctgggcctgagtaggggaaagacagacaaaattcagtttagaccaaaaaaaaaccagttttttttaactcagtaaagaacctttggaagttagaacaattagatgcaaaaatatttcctttacacatttctcacaaagcatgtagaaatataaaaatgcactgactg

SEQ ID NO: 685541 - DNA, 600 bp, Homo sapiens
ccaccattttggccaggcccagtggctcacacctgtaatcccagcactttgggaggctgaggtgggcagatcacctgagatcaggagttcaagaccagcctgaccaacatggagaaaccccgtctctactaaaaatacaaaattagttgggtgtggtggtgcatgcctataatcccagctactgrggaggctgaggcgggagaattgcttgaaccaggtggtggaggttgcggtgagccaagatcgcaccattgcaccccagcctgggcaacgagaatgaaactccatctcaaaacaaacaaaaaagaacaccacttttcattttactgaattacctttcctgttcaagagcatactccaacattttgatcctcctcacaagatccttcttcaaattttcttggcccttcctttctccctgtagaaaggtaatctgggcctgagtaggggaaagacagacaaaattcagtttagaccaaaaaaaaaccagttttttttaactcagtaaagaacctttggaagttagaacaattagatgcaaaaatatttcctttacacatttctcacaaagcatgtagaaatataaaaatgcactgactg

SEQ ID NO: 685542 - DNA, 2979 bp, Homo sapiens
taatattttcaaatacattgttgatcaccaaaaggagcataaggggtatattgatttgtagcagatgtattaatagcccagcccctattccttacctgtagctgctgggaagaaaaccactcttaacactctacaaggtctcatctccagaatttgcagctgtttctagctgaggactttctctagcagcatgggagcttgatactgggcaagtgggaagaaaaggtgaggataactaagaagaatctccctggattcagtgatgtaattctgaggcatgttccacatagcttcccatagaattaagccccgatatctaacacaggaacttgcctcttaacacgtgtggtactggcttttctatctttcctgttttattttgttctctcttccttgtctcactttcgctgtgtcctcactcctgctttaagaatacccaaacaaaaacactcatttttttttaagagtctcagaatacagttgatagtgtaacttgtaatctatgataatcagcttggatgctgtactgacaggaagatggtgaactcacaatgtctaattaagataaaattaaaaagtatattgattcatgtcaaaagatttaaaaaacctaagtggcagtgtcacaatttcttctttttagtttacatggtttcttaaacgcctacaattattttaaaggaagccttgaatctaggaaaaattgagacatatggaataaattactaacccatttctccttgaaatccattagatgcttgatgatttctcacatatatttctgaattgaaaagctagctgtgaattatttttatatgcatatccttaggtaatattttgtttttaacagtgaattgaaggtttaaagattaaattattctatccagagaataaaaagcaattatttcacaaggagaacatgtgtacgttgacacgacattttaaagtctagaatttaaaaaaggacccatatacttttgtgtcaaatagaatatgtttgtatcagtctgtctacagttttacacctgtcaaaatgtacttgaactacaacaacaaccttgaacaattttgaaattgatgattcctctgaaactgattaaaagaattatggtagagtgaaattctgattgacataatttgggagagaaattattccttggacatcaacctctgccaagatagtttataatgacattgaggctttttgatttacacaatttgttatataaaaaatactaagacgatggcagataatacacagactttaattaaaattgtactacaattaaatgtctaaataaattagaagggtacatggtacatctaattgtatgtttatatattttatttgtgcatttttttcctagggtttcttttgctttagtttgtaaaacgttcttatgtttatrataatgtagcatatactaaataaagaaaaatcaggaaatagaaaatgaagaagaaaacattagctattgtcaaccaaacaaaaattgtgcaatctctaagcacatgaactatgtaatatttgtacagcatagtacaatgtttatgcttcacagggtgaggtagagactgcaaaaccttgaacttgggacaaacaagaaagtaaggaaattttcacaacatattaatattatagaaaatgttgaacttaacagttaagatacaagtagtgaaaaatgatagtatttaaggagatctagaaaatttaatctatacctgtaatgtgtgagaagtattagaataatgcttgtatttctggattgtcatcgatttctattgagactggaaacataatagaaatgagcaaaaaagaatttaaattgtggatacttgagttttatacctaggagttccagaaatacattttgttactatcaaagcagttggcacaagagggtacaaaattccctaattgtgtctatgtggagaagacatagacagagaatagcaaaacagaaatagcaaaaaaagcacaaataaattttacctgtattttgaagtaaaagccaattacagagggaaaacatgaaatttgtgttttatcaaaatttttctctttctcataatatagttgaatatattactggaaaaaatttgaagcactggtatgttcacacataaaagtaaaatataaggtcaaaaccatgggaatgcagggagcagacaaaatataactaaacacggaaactgatttttccctacggacatgtagcaaaatgaatgagtgcagattcctattgtcatacattacataggacagtaaaaaaatacatagattttcccaagatagggcatcacacaggagctcctccctacagctaagaccaacatttctatcctcagtataaggaagatcagaggtaaattagtcccatttcacattccctggaaatggcaaataaaaatgatttgagattggacggatttaaagaaactcaatcattaatgattaacagcaactaatttaaaaattgtttaaatgtgcagtccaaacatatgtccgaacacctttaggccaagaattaacataatgtggtcccagaatggtggtgcctttagtagaatcacaaaaaaattcaacttctctttggcaaattttctacttattaatctgcaaaagtgcacaaaaataattttcagagaaaaataaatatttgtcattcaaagacatctaagcatgcaaggaaatgatattccaccatttgaaaggaaagcagaaaaagactacaaacagatccacaaaggttcattagtagaaatatcactgttagattacaaagcacatttgcttacaaaaaattttttaaaaaatgaatatattgttaggagactaaaaaattcatgtagcaaatttgaaaagaagtttgtataaaaatgtagttattttaaattaaaaactcaaaaatgaattcatcagattagacatggccaaggtgagagttcataaatatttcagaatgcattacagaaaat

SEQ ID NO: 685543 - DNA, 639 bp, Homo sapiens
aatgaaaatattttatgttttcccatcactttagattttatcattgtgtaaattattgggtttttagcattttctaatgtgaagttttaatcatttttaagtatacatattttttttctgtaccatttaaataaaatatttttataactttcttgtgagttttgttcatgcaaactttggaatgacttctggtttttagctattagcactttgaattaaccatagaaataacaagggctaactctgttcttcaaagactttataaagacagtatttgcactttcaaatgcaaatatatctacattaaatctaaacagcataagcattgtgacagaatgtacctcatgttgattgttttctctgtaaggtgacttctagtaatgatttgacttaatcaccacttgtgtctggttcagatcataccctgccatttactagctgcaagaccttcagtagtacaggtttagtatccctaatttcaaaatctgaaactttytgattgctgatatggcactcaaaggaaatgctcattggagcatttcgggttttggaatacaatgcaaatattccaaaatccaaaacacttctggtcccaagcatttcagagaaggggtagtcaacctgtaatcttttttcagc

SEQ ID NO: 685544 - DNA, 639 bp, Homo sapiens
aatgaaaatattttatgttttcccatcactttagattttatcattgtgtaaattattgggtttttagcattttctaatgtgaagttttaatcatttttaagtatacatattttttttctgtaccatttaaataaaatatttttataactttcttgtgagttttgttcatgcaaactttggaatgacttctggtttttagctattagcactttgaattaaccatagaaataacaagggctaactctgttcttcaaagactttataaagacagtatttgcactttcaaatgcaaatatatctacattaaatctaaacagcataagcattgtgacagaatgtacctcatgttgattgttttctctgtaaggtgacttctagtaatgatttgacttaatcaccacttgtgtctggttcagatcataccctgccatttactagctgcaagaccttcagtagtacaggtttagtatccctaatttcaaaatctgaaactttctgattgctgatatggcactcaaaggaaatgctcattggagcatttcgggttttggaatacaatgcaartattccaaaatccaaaacacttctggtcccaagcatttcagagaaggggtagtcaacctgtaatcttttttcagc

SEQ ID NO: 685545 - DNA, 639 bp, Homo sapiens
aatgaaaatattttatgttttcccatcactttagattttatcattgtgtaaattattgggtttttagcattttctaatgtgaagttttaatcatttttaagtatacatattttttttctgtaccatttaaataaaatatttttataactttcttgtgagttttgttcatgcaaactttggaatgacttctggtttttagctattagcactttgaattaaccatagaaataacaagggctaactctgttcttcaaagactttataaagacagtatttgcactttcaaatgcaaatatatctacattaaatctaaacagcataagcattgtgacagaatgtacctcatgttgattgttttctctgtaaggtgacttctagtaatgatttgacttaatcaccacttgtgtctggttcagatcataccctgccatttactagctgcaagaccttcagtagtacaggtttagtatccctaatttcaaaatctgaaactttctgattgctgatatggcactcaaaggaaatgctcattggagcatttcgggttttggaatacaatgcaaatattccaaaatccaaaacacttctggtcccaagcatttcagagaaggggtagtcarcctgtaatcttttttcagc

SEQ ID NO: 685546 - DNA, 1573 bp, Homo sapiens
aggctgatggaaattacaatgacacaagtgaaatgtactctctctcctaaagctacaggcaagatacatttcagaatcaaacacttacaaaatggctttctggtttttctttccttttcaacaaattgagttaaaaaaaccctgttaaaccactatgcctccagaacccagaccaaattacagctcttaataaaataaggcgtgggtaggaaagaggatgaaagtctgtttctccccatgtagtttatgaaacgtagagtgtataacatttgagtgttttcatggagctccaaaaagcctagtcatgatctgcttgtttaagattccatctgaaagcactctccccactctgctctcagctcctgacccaccccagtcttagggaggtgtgtggtgatgatgccctgcagcaaaggaatggagttggtctaaagggatctggggcattattttaattggagtgcttataaaatatttgtaaaaacctctctcttttgatgagtatgtcttacgccagaggtgtttctgcatccctatgatatgagggtaatccatttagctggcaaaatttctacaattttattaaccaaaaaatccctcctatctgggtgaggcttcttatatttctaatttacaccttcccgaaccctcggattcagggctgcaaggggaggcgctgcagccctggtatccgatggggcagtggtgaagccaccacgaagcagctcatgcgaaagtactttgagaaccgaagcgtgcagtactaagtacagttattcttagtttctgtgttcagtgtcccctccataaatataagacaaaactatctttcctccaatagttgattatgtattactgcaggcctgtttagaacagtccaaaatgccatgtgaactgttcattctcacgcagagaaaaaccagytttctttcttcagctgtgcctctatttttaaaatagaatgtcttaccaatgtcttccttaaaatgttagttccttcttacaccatccccaagtctttaaatgatacaaattaagagagtcagtctgaagaacaggacattctgatatttccagaatgtcacttatctcaactctaggagcaacacttttcctctcattttgctgaaagtgtggagacaaaaactccctgtaaggggctgtagcgccacttgttctgacattagttagaaaaggaaagtcagccttagaccctattcagaaaaagcttccaccctttctgttataacacgcaatactctgtgatatggatcctggggaacaaagccacatagcaatgtggttctcagatttggctgcccatcagaatcacccgagcagcttataaaagaacgtggattatcagttccaaaccctgacctctcctgaatcagaagccaggagggtagagtacttagaaatctggaattaccaactcccccagctcccttttcccacagggaacttgacagggaatctttgtacagcacatgaagctagtgattacattgaatgatcatgaagaaggccaccataacttgtcacacaaggtgagttccatgttcaacacaag

SEQ ID NO: 685547 - DNA, 625 bp, Homo sapiens
ctcttctccattcaaatttactatccctcaacattctctaccttgtcctaaacacttgccccaatttcctgcttgtttttatagcccttgtgtatttatttatttatttatttatcttttttcctctcatgaacattagatccatggaatcagagactttggcaaatagtatattttgttgaattatttgtttaaaaattagtaagtgaggccgggcacggtggctcacgcctgtaatcccagcactttgggaggccaaggtgggcgaatcattagggcaggagagcgagaacatcctggctaacacggtgaaaccccgtctctactaaaaatacaaaaaaatagctgggcgtggtggcaggyacctgtagtcccagctacctgggaggctgaggcaggagaatggcgtgaacccgggaggcagagcttttagtgaggcgagatcgcgccactgcactccagtctgggtgacagagcgagactccatctcaaaaacaaacaacaaacaaacaaacaaacaaacaacaacaaaattagtaagtgaatgtacaaaagaagtatttattgaaagaattgttgtattatggcataaatgggtcttcataaaatagtttcttacagatca

SEQ ID NO: 685548 - DNA, 625 bp, Homo sapiens
ctcttctccattcaaatttactatccctcaacattctctaccttgtcctaaacacttgccccaatttcctgcttgtttttatagcccttgtgtatttatttatttatttatttatcttttttcctctcatgaacattagatccatggaatcagagactttggcaaatagtatattttgttgaattatttgtttaaaaattagtaagtgaggccgggcacggtggctcacgcctgtaatcccagcactttgggaggccaaggtgggcgaatcattagggcaggagagcgagaacatcctggctaacacggtgaaaccccgtctctactaaaaatacaaaaaaatagctgggcgtggtggcaggcrcctgtagtcccagctacctgggaggctgaggcaggagaatggcgtgaacccgggaggcagagcttttagtgaggcgagatcgcgccactgcactccagtctgggtgacagagcgagactccatctcaaaaacaaacaacaaacaaacaaacaaacaaacaacaacaaaattagtaagtgaatgtacaaaagaagtatttattgaaagaattgttgtattatggcataaatgggtcttcataaaatagtttcttacagatca

SEQ ID NO: 685549 - DNA, 628 bp, Homo sapiens
atctgaatagtcacatatctgttaaagagtcatatatcctgttaaagaaattgaatctataattaagaacacttcactcccactccatccccacgacgggataaaaaaccccgggtgcagatgatttctctcaaacatttaaggaagaaatgccagttctatacatatttcttcaaaaaatagaagaggaaagagcaatgttcaacttgtttttttagttagctttattgagatttaattgatataaagagttttgccacatatatacacaattaccgtaatcaacataaaggacatatccatcactccaaaaagtttcttcatgcaacttggtaatccatctctctcccatgctccatttccttacaaacgcttatctgctttgtgtcattgtcgatcactctgcattttttacaattttacacaaattgaatcaaaagtattaactcatctttgtttggctttattcagcrtaattatcttgggatttatccatgttgttgcatgcaccattagttctttttgattgctgaatggaatttccttaaatggatataccagaatgtgtttactcattcacctgctgatgaacatttagattgttttacatttttgcctgatacaaaca

SEQ ID NO: 685550 - DNA, 991 bp, Homo sapiens
aaaggtgcagggaaatattaaagcctttataatctagtttgggtgactaaccacaaaaatttttggtgcctacacctatgtataatatattgacataaatggaaagtgtgggagttttgggtcttaagtgataggtctctcattcacatgttaaacttatttttaaatataaagataaagaaaatttagaaatgacggaataaaaatctgtaacactgcttcattaccaagtatttactattttgatrtacaattgattttccccctcatctcagggtttagagttcttaagaaccactgtgtaggagactatagctgaagcacatagaccatatttagaaattaggacaggattaccaagatcttaactctttttaaaatttagttagaaaatatttaggaataactctcatgaaaaggttcaagtctttcttgaagagaactacaaaataagtagaggaacataaaagaatcttgattaagtggatgttcttgggtgtgaaatattaatattgtaaagaagtaaattctcctcagattactacacaaatagaatgcaattcccattggaatcccaactttgcaacgtggctctaaagttaattttaataattaaattttagagaagagctaaacctttttttctgaggaaaatgaagaaagaagatgagtaaagacaaacacaattaaaattaaaatcacctggtattggcagaggaagagaaagacagttcaatgagattagaaaccccataaaaagttatatttaagaatttcatatatgatgaaagtaatattctaaattggtgagaaaagaatgagtttgatacaaactaattttgtaacaattgatccatcgttaaaaaaatttagattcttacctattccatacacaatccaaattccagatgggttaatattttagctattaaaaattgaaataacaaaattaatagaagaaaataaatggttacataatcttagaaaggca

SEQ ID NO: 685551 - DNA, 991 bp, Homo sapiens
aaaggtgcagggaaatattaaagcctttataatctagtttgggtgactaaccacaaaaatttttggtgcctacacctatgtataatatattgacataaatggaaagtgtgggagttttgggtcttaagtgataggtctctcattcacatgttaaacttatttttaaatataaagataaagaaaatttagaaatgacggaataaaaatctgtaacactgcttcattaccaagtatttactattttgatgtacaattgattttccccctcatctcagggtttagagttcttaagaaccactgtgtaggagactatagctgaagcacatagaccatatttagaaattaggacaggattaccaagatcttaactctttttaaaatttagttagaaaatatttaggaataactctcatgaaaaggttcaagtctttcttgaagagaactacaaaataagtagaggaacataaaagaatcttgattaagtggatgttcttgggtgtgaaatattaatattgtaaagaagtaaattctcctcagattactacacaaatagaatgcaattcccattggaatcccaactttgcaacgtggctctaaagttaattttaataattaaattttagagaagagctaaacctttttttctgaggaaaatgaagaaagaagatgagtaaagacaaacacaattaaaattaaaatcacctggtattggcagaggaagagaaagacagttcaatgagattagaaaccccataaaaagttatatttaagaatttcatatatgatgaaagtaatattctaaattggtgagaaaagaatgagtttgatacaaactaattttgtaacaattgatccatcgttaaaaaaatttagattcttacctattccatacacmatccaaattccagatgggttaatattttagctattaaaaattgaaataacaaaattaatagaagaaaataaatggttacataatcttagaaaggca

SEQ ID NO: 685552 - DNA, 613 bp, Homo sapiens
tttttccacatgagatcactgatgaccttgggaaatcaattgcaaatatttctgtgataagtagaagacggtgaagaagtgaagaaatctgatgtaatttactcaagcttttattaaaataatatttattactcttttaagaagtctaagtgtatgtggaacagaagtagcatggtaatgtgaagatacaagataaaaggacagttctctggtaaattttttgtaactggaatggaaattattttagttttaaaaattaaaattttgttttttaaaattttaaacaataaaagtaaatttttatgggcaatattttcattttgaaaaaaaagataaaagtggaatgttatactttaaggcaagccctatttcctctggyttttgcctgttggcttccaacaggaaaccgtgtatatcaattttttgtatacctttcctggcttttctttatgcaaatataaggaaatatgaatatataccatccactatgcttactatttactttagaagaattgtttatgcctgatatttttaagtttacattttctggtgatttccacaataatcatacttgtatctattcgtttcccacaatgagcattcaaaaattaat

SEQ ID NO: 685553 - DNA, 616 bp, Homo sapiens
gtatgaggctgagaatatctggtgaaggcaagaggccagtgctcactcccatttggtaagctcctttttcttccatagaagacttagtttctttactcttgggtgtatatgtatagcatattctattttcagctgaagtcatctgatattgcttattacttacacatctcagattgtctttgtaatttatagtcataactcttactgtggtctatatgatacatccctataatctactgatgcacctagaaacatgcacataccataaaatgaacttgtaaatgacagaaaagtgttcaagattcactttgtaaagagggtggtaaaagtgtctcatagaagtcctctggtgaagggtgatttctgatatatggcagtaaaagcctggtcccaagcacgaggaatttgtcaatgaaataacatcatcaataatgacagaaaagctgtctgctttactgacatagagtcctcacccaaacacagggctatggttcatgaatgtgagactttgtgaggctcaataaaaaaatataaagcaaagtgggtggtttggtggacatagaagttcagctggtgattttccctttctcaagaacgtataccaattgrcattgtg

SEQ ID NO: 685554 - DNA, 1719 bp, Homo sapiens
tgtgcccctgttgtttttggaattgagttcagcccctccccttttgcaacattctatccctattgcagtggtcttgagtaaaatctgtcttgtcacttttaacaagtgcctggtgaacaatttttctttaccacctttaacctcacaaaaattgttaaaaatcccagcatggacaatgggaaaatagagaagtgctggaagctgatagtaaggtcatcaccattgctaataacagtgaatttagagtattcctaagcacttaactcccatgggaaaatttatcttaaatttgtcctggagccagctataaatttgaatcctatttctgcaattactggtcatgtgatcttgggcatgtcacattgcctctctgagcttccatttcctcatctacaaaactttggagtatgaaaaagatttgaaaatgcatccctatgcattttccttgtgccatcctatgcacaagacgtgccttatggagaaaatacatgtgttagagaagcttccccagacaggagttacagtgctgttggctgtgagtccatccctagcatgcaattgtctctcataaatagaaaatattctagaggctgggagcggtggctcatgcctgtaatcccagcactttgagaggccgaggctggtggatcaccagaggtcaggagtttgagaccagcctggccaatgtggtgaaaccccgcctctactaaaaatacaaaaattagctgggcatagtggtgggtgcttataatcccagctactcaggagactgaggcaggagaatcacttgaacccgggaggcagaggttgcagtgagccgagatcgtgccattgcacttcagcctgggcgacaagagcaaaactccgtttcaaaaaaataaacacataaaataaagtaaaataaaaattctagaaagacatgtgccagaattttgggttgtgggattttaggcttatctttttctttgtgttgttcactgtcctgttttgaaaatacaattgattcttattcacatattccacctatgcaaattctcctacttgctaaaattcatttgtaacccccaatgtcaataaatatcaatactcatggtgcttttgagaccactcagggacgtacatatgtgtagcgtagtggagaatgtgcttgtccgatgcgtatgttcccagctgaggctgaacaaagggacacactaccttcttgcgtcagctctcataatgtaaacatgtccttctctctgtctattcagtgccacatccttcacatttttatgtttttcttcttggtgattttgctgtttaaaatgacccccaaatgtggtgcagaagtgctgtctagccatcctatgcacaagacgtgccttatggagaaaatatatgtgttagagaagcttccccagacaggagttacagtgctgttggctgtgagtccaatgttaatgaatcaatatatattaaataaagtgtctcttaaaaacacatgaaaagtttatgtaytgatttgttgacaaaaatgttgggatcacgcttcaggaaattgtatttcccctagaagaaatggttcagtattcactaattcagagtttatggccatggcaactgttgtagatagaacacagctaccagcaataatgagaattgcctgtatattacttatgcaaggagggaggagagcattagttttaaaaagcagatggtgcgtaaaggtgcagttccatc

SEQ ID NO: 685555 - DNA, 1443 bp, Homo sapiens
gtcacatttttcattagtgtattttgatagatgcaaaatttattaaggctttgtggtgaaactgacaagtaaattaattaaaaattttaatatgtgattaaagaagaatacacattgggaattataccagaattatcccacaacttctagttaaaacatttcagaaatggcttgagacaataagggtaaacacatctttctttccagtgtataaactaataccagtattgcctgtgcaaaaagtttattttctaacagtacttctaatgtcaattaataactgtttacttccttaatttgtatgtaaacaacaagtaatcttactatgtaaattccaaatcacatttaaaactaagctgaatattttcatttatggcaatgagcttttgaaaaggaataaaaacaccaccttgtttgttggaaattaagtatctttaaaaagtcagttttctatgggactagagtttacctcttaaccattctgttctttatgagacatttatccaagaaggttacagtaatagattatcatgaagaagcaatatgtttactatagaatcttggaagtccccatgtgtgtcagagtgagagtgtgcatgcgtgtgtataattggagcagtatcagcaaaacatgagttaatttctggtgtcagtctctgtggaaagaagcctgtttaatctctcatgtctcgcgttagaactcagagaaaggacctttgggaatgtgaggagaatgcagaggacattcaagttcttaatgtagagactatgaagctgtttaggaggcagttctttaggggtggatgtgaacagaaattagcaaaatcatagtgcctctgaaggtatgccaactctgtagtgtagaattagctatttcaaaatagtaggcacagtgaggccrgagcctaaggtccctaggaggaaatgaggtatgtgacgatcagaaacttatattttgtgaagctagttaaagttgtttgtttttttgtagtatcaagctcttgaaagttcttgcctttactaactgccctaagagaagccgtcagaatgctttttgtaataaagcattaaagtatgtttggtgacagcagtaattgaagtgagagaatcccagagggaaggcagaacacccagtataaagtcaggagtgtttttttgggtgtcttctctctgcagggaaatagtgtaaggtgttaaagccttggcgattctattttattggaaaaggtactgttcccacttagctgtgtttcttggccagggatacaagtagcttcagggacttgttcgtatctccttgctatgttgcttcatattcttaatgatttgttttttgctgttaagagataattgggtggaaaacgagaagacctatcttacaattacatcattttccccactacccaccccacttctccctgggtgaaatatgcttaagatatt

SEQ ID NO: 685556 - DNA, 1443 bp, Homo sapiens
gtcacatttttcattagtgtattttgatagatgcaaaatttattaaggctttgtggtgaaactgacaagtaaattaattaaaaattttaatatgtgattaaagaagaatacacattgggaattataccagaattatcccacaacttctagttaaaacatttcagaaatggcttgagacaataagggtaaacacatctttctttccagtgtataaactaataccagtattgcctgtgcaaaaagtttattttctaacagtacttctaatgtcaattaataactgtttacttccttaatttgtatgtaaacaacaagtaatcttactatgtaaattccaaatcacatttaaaactaagctgaatattttcatttatggcaatgagcttttgaaaaggaataaaaacaccaccttgtttgttggaaattaagtatctttaaaaagtcagttttctatgggactagagtttacctcttaaccattctgttctttatgagacatttatccaagaaggttacagtaatagattatcatgaagaagcaatatgtttactatagaatcttggaagtccccatgtgtgtcagagtgagagtgtgcatgcgtgtgtataattggagcagtatcagcaaaacatgagttaatttctggtgtcagtctctgtggaaagaagcctgtttaatctctcatgtctcgcgttagaactcagagaaaggacctttgggaatgtgaggagaatgcagaggacattcaagttcttaatgtagagactatgaagctgtttaggaggcagttctttaggggtggatgtgaacagaaattagcaaaatcatagtgcctctgaaggtatgccaactctgtagtgtagaattagctatttcaaaatagtaggcacagtgaggccggagcctaaggtccctaggaggaaatgaggtatgtgacgatcagaaacttatattttgtgaagctagttaaagttgtttgtttttttgtagtatcaagctcttgaaagttcttgcctttactaactgccctaagagaagccgtcagaatgctttttgtaataaagcattaaagtatgtttggtgacagcagtaattgaagtgagagaatcccagagggaaggcagaacacccagtataaagtcaggagtgtttttttgggtgtcttctctctgcagggaaatagtgtaaggtgttaaagccttggcrattctattttattggaaaaggtactgttcccacttagctgtgtttcttggccagggatacaagtagcttcagggacttgttcgtatctccttgctatgttgcttcatattcttaatgatttgttttttgctgttaagagataattgggtggaaaacgagaagacctatcttacaattacatcattttccccactacccaccccacttctccctgggtgaaatatgcttaagatatt

SEQ ID NO: 685557 - DNA, 1443 bp, Homo sapiens
gtcacatttttcattagtgtattttgatagatgcaaaatttattaaggctttgtggtgaaactgacaagtaaattaattaaaaattttaatatgtgattaaagaagaatacacattgggaattataccagaattatcccacaacttctagttaaaacatttcagaaatggcttgagacaataagggtaaacacatctttctttccagtgtataaactaataccagtattgcctgtgcaaaaagtttattttctaacagtacttctaatgtcaattaataactgtttacttccttaatttgtatgtaaacaacaagtaatcttactatgtaaattccaaatcacatttaaaactaagctgaatattttcatttatggcaatgagcttttgaaaaggaataaaaacaccaccttgtttgttggaaattaagtatctttaaaaagtcagttttctatgggactagagtttacctcttaaccattctgttctttatgagacatttatccaagaaggttacagtaatagattatcatgaagaagcaatatgtttactatagaatcttggaagtccccatgtgtgtcagagtgagagtgtgcatgcgtgtgtataattggagcagtatcagcaaaacatgagttaatttctggtgtcagtctctgtggaaagaagcctgtttaatctctcatgtctcgcgttagaactcagagaaaggacctttgggaatgtgaggagaatgcagaggacattcaagttcttaatgtagagactatgaagctgtttaggaggcagttctttaggggtggatgtgaacagaaattagcaaaatcatagtgcctctgaaggtatgccaactctgtagtgtagaattagctatttcaaaatagtaggcacagtgaggccggagcctaaggtccctaggaggaaatgaggtatgtgacgatcagaaacttatattttgtgaagctagttaaagttgtttgtttttttgtagtatcaagctcttgaaagttcttgcctttactaactgccctaagagaagccgtcagaatgctttttgtaataaagcattaaagtatgtttggtgacagcagtaattgaagtgagagaatcccagagggaaggcagaacacccagtataaagtcaggagtgtttttttgggtgtcttctctctgcagggaaatagtgtaaggtgttaaagccttggcgattctattttattggaaaaggtactgttcccacttagctgtgtttcttggccagggatacaagtagcttcagggacttgttcrtatctccttgctatgttgcttcatattcttaatgatttgttttttgctgttaagagataattgggtggaaaacgagaagacctatcttacaattacatcattttccccactacccaccccacttctccctgggtgaaatatgcttaagatatt

SEQ ID NO: 685558 - DNA, 1357 bp, Homo sapiens
tttttttgagatggagtctcgttctgtcacccaggctgcagtgcagtggcgcgatctcggctcactgcaagatctgcctcccgggttcacgccattctcctgcctcagcctcccgagtagctgggactacaggcacccgccaccatgcctggctaattttttttgtatttttagtagagacggggtttcaccgcattagccaggatggtctcaatctcctgacctcgtgatccgcccgccttggcctcccaaagtgctgggattacaggcgtgagccaccgcgcccagcctatattgtctattcttaacaatcttcttgctaccaaagcattgggccaagagaacaccaatagttgcctataaaaaatagactcagatttctttcatgagcacacacatatcaaagaagacatggctgcagaggaaggaagacatggctctgctgtgtgacctctgtggaataaggataatagccaaaccagtcttggctgcatggttatgggcataccagagctaaattctggaaaacacttagcaggaagtgcccccacaatattagctacttctattactatcttttaattttactccagcctcataatgttccctgattcttatttgcttatagtgaattcctaagagattttaaacttgatactttctatatctaatgggctttttgaaaaattacatttttatgttcttgttttcttaagaaggatggaaacaaatatatagagactttattatttcyaaaaagtgcttctttactgtaataatctaaatctccaacagatagatgagagaagaaaaattcttgccaaaaatgatcagtccaaaccataattatgttaattatatccaactgtcagcaaagagatcaaaggttaagtctgttctctgcttcacagaatgacaatgataataaacagttattcttagtagctaaagtatattttgcaattgtaactgacaccatttgactttcatttttttataagcgaaatgatttgcaatgaattttcatgcttgaaacaataagtgcttttagcttagtaaaattcacttttgcccagcatgacccaccttcctattcacagtctgctctagtacttgaaaacactgcttgagcaatgtaacaatgaacttggaaaaatagcttatcttttggaaagccctggaattgcatatactcttcagttttccgcattttaagcaccttaaagaagtttaccacttttctagtggtttcattactctttttcagaattgagcatttacattgtaccaggtagctttctgaatgccatatgtagcattttattcttacttgtttttccccaccaatcccgttgtg

SEQ ID NO: 685559 - DNA, 648 bp, Homo sapiens
tggaaagcctgataattctatgctccagctagttattatttggataataaaattaattagagtatgatgctgaagaaagagcacaagaaatggaaccagagcatctgggtgcaagtttggctcatagtatttactagttgtgtgaccttgagcgagtcacttaacttcactgagcttaacttctcttatctatgaaattacaatgatgataataccaccagtatatttacctcttggagttgttctgtagattcaataagaaacacacatgagagcgctttgtaaactgcaaagtcttatacttgtgctagctaatattttatatttcaattaatgtttccaagactctattttcaaattctcaaasccactattaagatcattacgaaatatgtttatttgtttgcttaatcttttgctttcatgcaccaaacaaccaaagtaaaactgagtgtgtgtttgtctttagttaacctggtcagcaggagtgtcagaatcattcttggaagcaaagaaaatctgctcccatagaatggctatttttcggcattgaagatcaatatttgggagctctagttaactaacagaactcccaacaagcatttcagcggggatgaatttactttgttacccatagttcgaagagaa

SEQ ID NO: 685560 - DNA, 648 bp, Homo sapiens
tggaaagcctgataattctatgctccagctagttattatttggataataaaattaattagagtatgatgctgaagaaagagcacaagaaatggaaccagagcatctgggtgcaagtttggctcatagtatttactagttgtgtgaccttgagcgagtcacttaacttcactgagcttaacttctcttatctatgaaattacaatgatgataataccaccagtatatttacctcttggagttgttctgtagattcaataagaaacacacatgagagcgctttgtaaactgcaaagtcttatacttgtgctagctaatattttatatttcaattaatgtttccaagactctattttcaaattctcaaagccactattaagatcattacgaaatatgtttatttgtttgcttaatcttttgctttcatgcaccaaacaaccaaagtaaaactgagtgtgtgtttgtctttagttaacctggtcagcaggagtgtcagaatcattcttggaagcaaagaaaatctgctcccatagaatggctatttttcrgcattgaagatcaatatttgggagctctagttaactaacagaactcccaacaagcatttcagcggggatgaatttactttgttacccatagttcgaagagaa

SEQ ID NO: 685561 - DNA, 1224 bp, Homo sapiens
tacgatctccttaagaattgttttctgctgctgatttgatctgtatctctcaagactgtgttttcacttacttaaattgagtggttatcccagacagatggcccttaccaatcacagaaaccaagttattataaacaaaatctaattgcaaagacaatttttgctcttttattgcgttttttaatatctttgtgttatccatctttcaaaacgctggtggaaaatcacatggttcaactatttcaactatctcattgtctgtgtccaagagatttaaggtaggaaaraaaacattttgtgatttccatttggagaaaactgttctgttttcattatgtactagtacggaaaacatagcttcagaatatttagttataaatttcctatttaataagctcattttgctatcaattttttttctagttacttagcataatatttttcacatttagatctaactgtgttattcccctgctgaaatccttccttggatggccttgagaatgacagtcaaactcctgagcacggtctcaaggtcttttcagccaggcctcatctgtcccccagctctgggtgcacacagcactatcaccactcagaccagaccactcatgcatccccacatattctcacatctctctacgtttacacgtgtcacttcctccacctatgttacacacacacgtgcacacagtctcacacacccatactcattcacacccacacactcatgcccacacgcacactcacacccactcacacgcacacacacatgcactcacacccacacgcgtgcacacacacccacactcacacccacaggcacacagtcatgcccacatacacactcacacccacatgcacacacttatgcccacatgcacacacctacacgcacacactcatgcccccccacacacacccacgcacacccatgtgcacacacgcccacacactcacacccacacaagctcacgcacacacgtgcacacacaccccacatgctcgcacacacacccccacatgctcacacacacacgcccacactcacacacacactcatgcccacagtcacacactcacacccacactctcacacacacacactgttacccttgccccgtttatggcctattccttctcagctcactctaagggtggcctctttctggaagccttgtctttttttggattgtcagtgtaacatacagagaaatagatgta

SEQ ID NO: 685562 - DNA, 1224 bp, Homo sapiens
tacgatctccttaagaattgttttctgctgctgatttgatctgtatctctcaagactgtgttttcacttacttaaattgagtggttatcccagacagatggcccttaccaatcacagaaaccaagttattataaacaaaatctaattgcaaagacaatttttgctcttttattgcgttttttaatatctttgtgttatccatctttcaaaacgctggtggaaaatcacatggttcaactatttcaactatctcattgtctgtgtccaagagatttaaggtaggaaaaaaaacattttgtgatttccatttggagaaaactgttctgttttcattatgtactagtacggaaaacatagcttcagaatatttagttataaatttcctatttaataagctcattttgctatcaattttttttctagttacttagcataatatttttcacatttagatctaactgtgttattcccctgctgaaatccttccttggatggccttgagaatgacagtcaaactcctgagcacggtctcaaggtcttttcagccaggcctcatctgtcccccagctctgggtgcacacagcactatcaccactcagaccagaccactcatgcatccccacatattctcacatctctctacgtttacacgtgtcacttcctccacctatgttacacacacacgtgcacacagtctcacacacccatactcattcacacccacacactcatgcccacacgcacactcacacccactcacacgcacacacacatgcactcacacccacacgcgtgcacacacacccacactcacacccacaggcacacagtcatgcccacatacacactcacacccacatgcacacacttatgcccacatgcacacacctacacgcacacactcatgcccccccacacacacccacgcacacccatgygcacacacgcccacacactcacacccacacaagctcacgcacacacgtgcacacacaccccacatgctcgcacacacacccccacatgctcacacacacacgcccacactcacacacacactcatgcccacagtcacacactcacacccacactctcacacacacacactgttacccttgccccgtttatggcctattccttctcagctcactctaagggtggcctctttctggaagccttgtctttttttggattgtcagtgtaacatacagagaaatagatgta

SEQ ID NO: 685563 - DNA, 1224 bp, Homo sapiens
tacgatctccttaagaattgttttctgctgctgatttgatctgtatctctcaagactgtgttttcacttacttaaattgagtggttatcccagacagatggcccttaccaatcacagaaaccaagttattataaacaaaatctaattgcaaagacaatttttgctcttttattgcgttttttaatatctttgtgttatccatctttcaaaacgctggtggaaaatcacatggttcaactatttcaactatctcattgtctgtgtccaagagatttaaggtaggaaaaaaaacattttgtgatttccatttggagaaaactgttctgttttcattatgtactagtacggaaaacatagcttcagaatatttagttataaatttcctatttaataagctcattttgctatcaattttttttctagttacttagcataatatttttcacatttagatctaactgtgttattcccctgctgaaatccttccttggatggccttgagaatgacagtcaaactcctgagcacggtctcaaggtcttttcagccaggcctcatctgtcccccagctctgggtgcacacagcactatcaccactcagaccagaccactcatgcatccccacatattctcacatctctctacgtttacacgtgtcacttcctccacctatgttacacacacacgtgcacacagtctcacacacccatactcattcacacccacacactcatgcccacacgcacactcacacccactcacacgcacacacacatgcactcacacccacacgcgtgcacacacacccacactcacacccacaggcacacagtcatgcccacatacacactcacacccacatgcacacacttatgcccacatgcacacacctacacgcacacactcatgcccccccacacacacccacgcacacccatgtgcacacacgcccacacactcacacccacacaagctcacgcacacacgtgcacacacaccccacatgctcgcacacacacccccacatgctcacacacacaygcccacactcacacacacactcatgcccacagtcacacactcacacccacactctcacacacacacactgttacccttgccccgtttatggcctattccttctcagctcactctaagggtggcctctttctggaagccttgtctttttttggattgtcagtgtaacatacagagaaatagatgta

SEQ ID NO: 685564 - DNA, 602 bp, Homo sapiens
atttkgggaggacaagactatttctgaagttatgtatttctcatcaggaatcatgtatttctggttatcttttttaaaattgtgtcagtagccatctaaatatcagtgtcattcattaattcatgagaagttgctaaattactatattcaattttattgtttgttttcatatattcttctcatctcgtatttggttactccctaaaattgttggtaaaaaatgacataataaatgcttgaatgttttcttttatttataagttttcaaaatattgagttttgcattctccaattgtgaccaatgtgtggtgtgtgtgtgtgctgtgtgtgtgtgtgttgcagtctgaagaaagggtgcttgtaagaaagctaaatatcacttggaaaaagctgattggctttaccttggcaaattcaacccagaccaggtttgggttttccagaatgcaggatcgagaacctgatctgacagcacagagatcagagctgtactcagtggatataatcacctcatagaattgagatatgaaaatcagaaaggtggttccttccactccaatgagaagtacaacccccaggtcaacaggggacttgtgatcact

SEQ ID NO: 685565 - DNA, 1538 bp, Homo sapiens
ttttctcttttttttccatcttaccttccttgtaattgattggggttagcatcctcctttttactgcctttattttgaacaactgataccatatttctatttcatagtgattcactttaaattgctgttatttaaatttaacttttattattattattatttttcgagatggaatctccctcttgttgcctaggctggagtgccatggcatgatcttggctcactgcaacctccacctcccaggttcaagcaattctcctgcctcagcctcctaagtagctgggattacaggtgcccaccaccacgcccagctaatttgtgtgtgtgtgtgtgtgtgtgtgtgtgtgtgtgtgtgtgtgtgtaattttagttaagaaggggtttcaccatgttggccaggctggtctcaaactcctgacctcaggtgatccgtctgcctcagtcttccaaagtgctgggattacaggagtgagccactgcacccaggctaaatttaacttttaaaagcaaatatcaccattatgcttgttgaaaataattggggatcttagactccttcaattcagactaccaacttctgtggtacatgctgcatatttcagcattataattctacccattgcatattcatcatattagtcattttcttattgttacttctgcctccccatgtcaatttttcctcttgaatctttcatttaggatccatgttttttcccaaatacttcatcactattttccagttttatagtattagaaataatttcccttagtctttttcgaaagtgactttatttcatgaactgttgttgagtcatggtttcattgcacaaaattatactatttttttctactgtcagcaatttgaaaatgttagaatagtttgtaccatacataaatttaagcatactcaatattatgtggcacattacactacctcactgtatttctgtgtgtttttgagaatgttgtaatttaaaagaagttcactccacagccacctaattcctctgacttgagttatattcaagtgtctcaaaatgtgacacagacattatcttgctacttgccatgcccttaccattgacattgaagagtggtacaaatgcagtcactcatccatctccttgctctaattcatcctaggtcaactgaaaaagtgtttgatgacaacttgcagcatagagacagagaagacacacgggcatatgctttggactacaaaatccctaaagtgtccttccaaatgttaaatgaggattctataaaagaagcaacaatgttgattatttaattatagtattgaaagaagtgctatagtgagtcaacttggctcacaatacaagrcacttgaagactagagcatgctcttgggttcttaataaactgtgatctgtttgtacctccaggtgaacatggttgttttgaccttattgaagtttacacctttacctgttagtgtcctttatcttctaacatctattgttgcctttgaaaaatctgttgggaattttctaagtctgatcattcgtaaggta

SEQ ID NO: 685566 - DNA, 1538 bp, Homo sapiens
ttttctcttttttttccatcttaccttccttgtaattgattggggttagcatcctcctttttactgcctttattttgaacaactgataccatatttctatttcatagtgattcactttaaattgctgttatttaaatttaacttttattattattattatttttcgagatggaatctccctcttgttgcctaggctggagtgccatggcatgatcttggctcactgcaacctccacctcccaggttcaagcaattctcctgcctcagcctcctaagtagctgggattacaggtgcccaccaccacgcccagctaatttgtgtgtgtgtgtgtgtgtgtgtgtgtgtgtgtgtgtgtgtgtgtaattttagttaagaaggggtttcaccatgttggccaggctggtctcaaactcctgacctcaggtgatccgtctgcctcagtcttccaaagtgctgggattacaggagtgagccactgcacccaggctaaatttaacttttaaaagcaaatatcaccattatgcttgttgaaaataattggggatcttagactccttcaattcagactaccaacttctgtggtacatgctgcatatttcagcattataattctacccattgcatattcatcatattagtcattttcttattgttacttctgcctccccatgtcaatttttcctcttgaatctttcatttaggatccatgttttttcccaaatacttcatcactattttccagttttatagtattagaaataatttcccttagtctttttcgaaagtgactttatttcatgaactgttgttgagtcatggtttcattgcacaaaattatactatttttttctactgtcagcaatttgaaaatgttagaatagtttgtaccatacataaatttaagcatactcaatattatgtggcacattacactacctcactgtatttctgtgtgtttttgagaatgttgtaatttaaaagaagttcactccacagccacctaattcctctgacttgagttatattcaagtgtctcaaaatgtgacacagacattatcttgctacttgccatgcccttaccattgacattgaagagtggtacaaatgcagtcactcatccatctccttgctctaattcatcctaggtcaactgaaaaagtgtttgatgacaacttgcagcatagagacagagaagacacacgggcatatgctttggactacaaaatccctaaagtgtccttccaaatgttaaatgaggattctataaaagaagcaacaatgttgattatttaattatagtattgaaagaagtgctatagtgagtcaacttggctcacaatacaagacacttgaagactagagcatgctcttgggttcttaataaactgtgatctgtttgtacctccaggtgaacatggttgttttgaccttattgaagtttacacctttacctgttagtgtcctttatcttctaacatctattgttgcctttgaaaaatctgttgggaattttctaagtctgatcattcrtaaggta

SEQ ID NO: 685567 - DNA, 621 bp, Homo sapiens
catactgggcttgcaatgaactcaaaattctcatctgaagtttgactttatttcaccatgcattgtgaaagggtgacttctccaatcatccaaaggaaacatggtctccttagcaaggctgtactaaaccagcctaaagccattaaacctgaaatccagtgctgttaacaagatggaacaagtgagctccatgccaactggttttcagccccaggtagactctatttaaacaggctgtgaactctttccaccacctgcgttctttaatacttcttagtgaatttaaaacaagtgatcccaagccacagtgatggcttaggagctgccaataccaaacgtattgaaatgcagtgttcccttagctgcctactctttgcccgtattatgctgcaactgtactgaaccacctacagatgcccacacatgctatgctttctgttgtctttgtgctttggaacctaagaggcccctccctgaattttctccctcatggctccaacaacacactcacctctctttctggttcaggacataggtccgatccttmcttctcccttagtccttggactattctgcaagatctcaggtctgcactcacaacacacactatgtttgcttcca

SEQ ID NO: 685568 - DNA, 2217 bp, Homo sapiens
gtccaaattgatcaattactatttcctgtccatgaccctgtattttcatccctctgtttttaattaaactagaccctgtcacccctttaatcttcacatatctaaatcatatttatttgtcaaggcccagtccaaatgcaaccatcttcattcagtcctaattcttaattattcccagtagaaatgaaatataatttctgagctttattgagaattcagctattccttccattggccatttaacttatcttacctagttatattatttaatatatacctttctcccacaatattaatagtagtagtagcaatggcagtagaacatttatcttatgccaaacacttctaaacatttcacttggatagcttatttatttctcacagcaaccatgtaagttaaaaaccattattataccattttacagatgaagaaactaaaataataacaattaagttgtgtctcacaaaggttacatttctagaagatgaaattactagccctcaaacttgagtagtctgactctagaactcattctcacccctgttccactattctccctactgtgatagactaagatcactgaaaacagttctgagtttggtacaactttgtagcctacataatgtccaacatcatattttgggtctaattagtgctcagggaagatgtgagtaaaaaaaatgagttaataagttatgtttagacattaccagggataacaacatttgagacaaaatgaaacaaaacacaacagccctttctactaaaaacatattttgttcctttttagtgtcattatcagctatgaattcagtcttttttaaaaagtttttactgaagtatgtaacctagtagctacatttaataatcgttagtaatagttatggctttctttgctattattattattgctgtcagtaccacagtgaattagaaagaaatatgtagattcccaatgcacaacagagaatgctaagtcttcattcagctggctgaatgatatggtgaagattattttcatagccagtactaaaatcagtggctttgcatttccaggctggtgatcagaacaacagagcccacagctacaacctaatctcaagaatcatacctgcttctttaacagaaaacagaaatgaaatccattcattactggtctgtgacatatttggtagcattcagaaactcaatttctatgatcatctttattcatttatctaaaacagaagttgtgatgaaaaaaaattgaagacgatttatgtgcttaactggcaccagaaaattcaagatgttatgcaacttcaatttttaaatagcattttcttccacctcagaatcacaagcacaggaaaaataaccaacctttgttttgaactcccttgcttttgtcatttcatggcaaattctaaaatgcttacagataacaactttgattcattctgactaggtagatgaagccagtctaatagcaaatgctggtattccaacttcaaaagatatgtagagctaagtcatttcctatttatgatctatcatcctttctgaagtataaaaaatgttgcatagactatacggacagaagaggaaaaattaaatttaacaactttctgcaacaggcatgcctttctctagagacaacyccaattatcttaactgtaataagaagttaattgttagtagccttccctctgccaactttcttcaacttcagtccccaaacatgcagactgccttcaaagtaaataaagattcattgcaggaacagggatgcaagtggctcaagctggaagcaatgacccaaggggcttatattaaatttgatctctgactttaattgtgactctaaacagatgataaattaccctttatttgaactcaacagctgtgtactctccccatcttagtcccactcccctctcctctaacccttcctaatataattctctttcaatatctcctacctctgttaatatgaccgttatctattagtcactgtgtcccttccggacccctacaaagtctctattcaactgtgctggttcctctcctaatgccttcccagatgctaaggagttaggtcttttccatgctatttgttctaccacttccctttctactaacaatcccaatcattgtaccatgcaaactggaggggacctattcctttaactaaaaaggaacatgttgcaagcaatgggaacatcatattcatcagt

SEQ ID NO: 685569 - DNA, 1978 bp, Homo sapiens
tgggatcttgggagctggaaatgctccaagtagggaggaaagggggctagggttggctgtgggggatctgcctacgtgcagagttcctctttaggggtgcgggcttggttctgacgtcactggaccatcccagcccagattgtttgtttcctgggccacattgctgctctggataaagatggccactgcctcagggatttacgggggtgtaaatcaactgtaacaccagatgtggaatcttcccatagaggatcttcaaggggtctatgagccctctgcattcaaatgaaatgtctggatctttttctaattgtttgggaatagggtccatggatttcatcagataattttaatggtaaaaggaagattcattgatttttttctttcatttgctttgttatgaaatatgaagaagcacatataaagtgtatgtgtctaatgtagagaataatgaaacagccagatggaagagatgcctacagtgaggtaagggagaagaggcgtggagcttccatgccctctctgggcacactgccctccagggacctccgtgtgttcagcaatccagaaactctccaaaccctgtcgttcagggatttttatggaggcttcatcacataggtgtggtcacttgtgtaccaaccatacagatggagaagaaataggaacctgtcaatgtctcggaaacctcctcccataggtccttcaggattatacctccctcctctccccggagataactattatcctaatttttgtaaaattatcattcccctggcttgctttatagttttcccacctgtgaatctattccaaaacaacatattgtttaatcatgcccggttttgaacttctagtggatttatactataaatatataggggatcttttgaggtttattcctgcccacgtgtggacctatggttttttctgtttctctgcactctggtcttccgttacgtgactcaaggcagatcacaggtttctggacatttgggctgttcctaggttttgactattaagaacaatgttccgtggacatgcaagagattgtttaaagaaaataattgggagcggaactgtcagatcgtggggtatgtgcatactcagttttaccagacaagcacacataattaagctttaatacaccaaacccagatcattatcctcctaaggtttaaaaagaaagatgtctatttgtaatcaaaccatttttcagagtgtttctacctgtttacactcccaccagcatgagagtaccagttcctccacatcttcaccagtgttggtattggtaggtagattcacttttgtcaatcctgcaggtgtgtctatgggcaatgtttttgctaaatttgcatttatttgatgattaataagatctgacacttttaatacatttattggccattagggtgtcctttatataaagtacagttcaagtctattacccatttttctattgggttgtattgtttttaatttattgattcataaagtgttttttgctgggtttcattttaatatattctagaaatcaatccttggcagttatatgaattgcaaatatcttctcacaccgggccttttcttttgacttgtattcattgcattttcaaagggtccacaagaggaaaggttgaaaaccattttcaatacaggtcttataaacaggaagcccatgagccagaaacctcagatttttgttaagctcactggtggtgttacaacacgttgaaccagtaatcaggaatgtcatgttacaagtcaagatcattagcttcttttgaagtattagatgatctgggcctgcagttcctacatagcagtagcaggctccwtccaagtgggggctccagctggagacaaggcaggtcttctggttcatcccagttcctattgcttcccaggcaccaagggtccaatgtcacttgccatccttgggctgccctggtggtttccttccacactcctggtt

SEQ ID NO: 685570 - DNA, 631 bp, Homo sapiens
tcagcataccatgcagagctcttattgtccctgcatctcatcataccatgcaggactctatcgatgcctatgattgttatcataacagataggaaaacccacattgcttttcctactcacacaccactcactacagagcacttcacttctgctcaccaaaatgtgtgtgggtttctcctcactaacgaccagttctccaggggaaaatagatgggtgtcctctaattcatttctgacattatctgcctggagatggcatcatatcccacaagttaayggctgagttccacaagactgcccctgacttcggatatgaatcgtgagctccaggctgtggcctgtgcttctggccaaccagccataaagtgggggttcctatgactctctcttcaggtttaatgactttgctagagcagctcacagaactcagggcaattatttgtgtttacacatttattacaaagcatgttacaaaagatacagaaaagcagccagatggaagagatgcctagagcaaggtaagagagaaggggcgtggagcttccatgctctctctaggggcaccaccctccagggacctccttgtgttcagcaatccagaaactctccaaaccctgtagttcagggattt

SEQ ID NO: 685571 - DNA, 631 bp, Homo sapiens
tcagcataccatgcagagctcttattgtccctgcatctcatcataccatgcaggactctatcgatgcctatgattgttatcataacagataggaaaacccacattgcttttcctactcacacaccactcactacagagcacttcacttctgctcaccaaaatgtgtgtgggtttctcctcactaacgaccagttctccaggggaaaatagatgggtgtcctctaattcatttctgacattatctgcctggagatggcatcatatcccacaagttaatggctgagttccacaagactgccccygacttcggatatgaatcgtgagctccaggctgtggcctgtgcttctggccaaccagccataaagtgggggttcctatgactctctcttcaggtttaatgactttgctagagcagctcacagaactcagggcaattatttgtgtttacacatttattacaaagcatgttacaaaagatacagaaaagcagccagatggaagagatgcctagagcaaggtaagagagaaggggcgtggagcttccatgctctctctaggggcaccaccctccagggacctccttgtgttcagcaatccagaaactctccaaaccctgtagttcagggattt

SEQ ID NO: 685572 - DNA, 1039 bp, Homo sapiens
ggtgcaccccaaagtggttaagagcctgaaccctggcgctagctgctgggttcgagtctcacctctgatacaggctgcttgactttaggcaagtgacttcatctctctgcctcagtttcttcctctgtaaagtggagatcataataggatctaccacgtagacttagctatgaggattaagtgccaaaacacttgcttcttctgggacttcacactgtcctccaggcgatgaaaactcacagatgttacccccagtggattstcagtgtaggtgggagtgataaagtgaactgggcagaggagggtcagtgcaaagcaaaggcccagaatggaagtgagtaaatggccagggaagatagcagtaccatgggagagttttaaatctaaattccaggtttacaaaatgccaagtagagcaaaaatatggtaggtctagagcaggggtgtccaatcttttggtttccctgggctacattggaagaagaataattgtcttgggccacacataaaatatactaactctcacgacagctgatgcactaaaaaagaaaagaaatcacaaaaaacatctgataatattttaagaaaattacaaattcttgatgggccgcattcaaagttgtcctgggccgcatgcgacccatgggccgtgggttggacaagcttggtctagagcctaacccagcatcaggttagatggtggaggattggacaggaaggaatgatgaggaaggtactccaggaggcgagacctgctggggcagaagcatggaggctggaaaccctggggggaatccaaggaggagcacctctgtggttgaggctgacagcgggtccacggaggggcgttaggtagtgcccagcacagaggtggttttgtgggccaggcaccatgttagcagcttgccaggatcatttcacggactcctcatgctaactccatgaggcctatcacgatctgcattttgtagagcaaaacagcctccaagaggctaattccttgcccaagatccctcagtaagtggtgggtacaggcatc

SEQ ID NO: 685573 - DNA, 1039 bp, Homo sapiens
ggtgcaccccaaagtggttaagagcctgaaccctggcgctagctgctgggttcgagtctcacctctgatacaggctgcttgactttaggcaagtgacttcatctctctgcctcagtttcttcctctgtaaagtggagatcataataggatctaccacgtagacttagctatgaggattaagtgccaaaacacttgcttcttctgggacttcacactgtcctccaggcgatgaaaactcacagatgttacccccagtggattctcagtgtaggtgggagtgataaagtgaactgggcagaggagggtcagtgcaaagcaaaggcccagaatggaagtgagtaaatggccagggaagatagcagtaccatgggagagttttaaatctaaattccaggtttamaaaatgccaagtagagcaaaaatatggtaggtctagagcaggggtgtccaatcttttggtttccctgggctacattggaagaagaataattgtcttgggccacacataaaatatactaactctcacgacagctgatgcactaaaaaagaaaagaaatcacaaaaaacatctgataatattttaagaaaattacaaattcttgatgggccgcattcaaagttgtcctgggccgcatgcgacccatgggccgtgggttggacaagcttggtctagagcctaacccagcatcaggttagatggtggaggattggacaggaaggaatgatgaggaaggtactccaggaggcgagacctgctggggcagaagcatggaggctggaaaccctggggggaatccaaggaggagcacctctgtggttgaggctgacagcgggtccacggaggggcgttaggtagtgcccagcacagaggtggttttgtgggccaggcaccatgttagcagcttgccaggatcatttcacggactcctcatgctaactccatgaggcctatcacgatctgcattttgtagagcaaaacagcctccaagaggctaattccttgcccaagatccctcagtaagtggtgggtacaggcatc

SEQ ID NO: 685574 - DNA, 1039 bp, Homo sapiens
ggtgcaccccaaagtggttaagagcctgaaccctggcgctagctgctgggttcgagtctcacctctgatacaggctgcttgactttaggcaagtgacttcatctctctgcctcagtttcttcctctgtaaagtggagatcataataggatctaccacgtagacttagctatgaggattaagtgccaaaacacttgcttcttctgggacttcacactgtcctccaggcgatgaaaactcacagatgttacccccagtggattctcagtgtaggtgggagtgataaagtgaactgggcagaggagggtcagtgcaaagcaaaggcccagaatggaagtgagtaaatggccagggaagatagcagtaccatgggagagttttaaatctaaattccaggtttacaaaatgccaagtagagcaaaaatatggtaggtctagagcaggggtgtccaatcttttggtttccctgggctacattggaagaagaataattgtcttgggccacacataaaatatactaactctcacgacagctgatgcactaaaaaagaaaagaaatcacaaaaaacatctgataatattttaagaaaattacaaattcttgatgggccgcattcaaagttgtcctgggccgcatgcgacccatgggccgtgggttggacaagcttggtctagagcctaacccagcmtcaggttagatggtggaggattggacaggaaggaatgatgaggaaggtactccaggaggcgagacctgctggggcagaagcatggaggctggaaaccctggggggaatccaaggaggagcacctctgtggttgaggctgacagcgggtccacggaggggcgttaggtagtgcccagcacagaggtggttttgtgggccaggcaccatgttagcagcttgccaggatcatttcacggactcctcatgctaactccatgaggcctatcacgatctgcattttgtagagcaaaacagcctccaagaggctaattccttgcccaagatccctcagtaagtggtgggtacaggcatc

SEQ ID NO: 685575 - DNA, 1039 bp, Homo sapiens
ggtgcaccccaaagtggttaagagcctgaaccctggcgctagctgctgggttcgagtctcacctctgatacaggctgcttgactttaggcaagtgacttcatctctctgcctcagtttcttcctctgtaaagtggagatcataataggatctaccacgtagacttagctatgaggattaagtgccaaaacacttgcttcttctgggacttcacactgtcctccaggcgatgaaaactcacagatgttacccccagtggattctcagtgtaggtgggagtgataaagtgaactgggcagaggagggtcagtgcaaagcaaaggcccagaatggaagtgagtaaatggccagggaagatagcagtaccatgggagagttttaaatctaaattccaggtttacaaaatgccaagtagagcaaaaatatggtaggtctagagcaggggtgtccaatcttttggtttccctgggctacattggaagaagaataattgtcttgggccacacataaaatatactaactctcacgacagctgatgcactaaaaaagaaaagaaatcacaaaaaacatctgataatattttaagaaaattacaaattcttgatgggccgcattcaaagttgtcctgggccgcatgcgacccatgggccgtgggttggacaagcttggtctagagcctaacccagcatyaggttagatggtggaggattggacaggaaggaatgatgaggaaggtactccaggaggcgagacctgctggggcagaagcatggaggctggaaaccctggggggaatccaaggaggagcacctctgtggttgaggctgacagcgggtccacggaggggcgttaggtagtgcccagcacagaggtggttttgtgggccaggcaccatgttagcagcttgccaggatcatttcacggactcctcatgctaactccatgaggcctatcacgatctgcattttgtagagcaaaacagcctccaagaggctaattccttgcccaagatccctcagtaagtggtgggtacaggcatc

SEQ ID NO: 685576 - DNA, 1039 bp, Homo sapiens
ggtgcaccccaaagtggttaagagcctgaaccctggcgctagctgctgggttcgagtctcacctctgatacaggctgcttgactttaggcaagtgacttcatctctctgcctcagtttcttcctctgtaaagtggagatcataataggatctaccacgtagacttagctatgaggattaagtgccaaaacacttgcttcttctgggacttcacactgtcctccaggcgatgaaaactcacagatgttacccccagtggattctcagtgtaggtgggagtgataaagtgaactgggcagaggagggtcagtgcaaagcaaaggcccagaatggaagtgagtaaatggccagggaagatagcagtaccatgggagagttttaaatctaaattccaggtttacaaaatgccaagtagagcaaaaatatggtaggtctagagcaggggtgtccaatcttttggtttccctgggctacattggaagaagaataattgtcttgggccacacataaaatatactaactctcacgacagctgatgcactaaaaaagaaaagaaatcacaaaaaacatctgataatattttaagaaaattacaaattcttgatgggccgcattcaaagttgtcctgggccgcatgcgacccatgggccgtgggttggacaagcttggtctagagcctaacccagcatcaggttagatggtggaggattggacaggaaggaatgatgaggaaggtactccaggaggcgagacctgctggggcagaagcatggaggctggaaaccctrgggggaatccaaggaggagcacctctgtggttgaggctgacagcgggtccacggaggggcgttaggtagtgcccagcacagaggtggttttgtgggccaggcaccatgttagcagcttgccaggatcatttcacggactcctcatgctaactccatgaggcctatcacgatctgcattttgtagagcaaaacagcctccaagaggctaattccttgcccaagatccctcagtaagtggtgggtacaggcatc

SEQ ID NO: 685577 - DNA, 2123 bp, Homo sapiens
tatcggtgctaagacctgacttccctgcatctcagttgcctcctctgtaagatggcatcacaaacactccccatgccatcgggctgctgtcactggttcttgtgtgtggaaatgtcaatcccagggcctgaggtgtgcaaagtcaatagtggttctctccccacttccaccccccagtttttctcaaagcctgttgaatgtatgatgtgtcctaaatggaagtgcttccacggggcactgagaggatgggtgatctcttctcactgcagtcaactggctgaaacgctcaccttttcatcttagcatgtgagatgtgacactctgatccccggaattgtaaattcagactctcagagagctcaggatggcaaaatccaacctcttcgtttttaagatggggaaattggtttgcacaaggtcatgcagcaggtttgtggcagagctggaacccacacctgctgattcccaacctggtgctctgtctgtcatcctgggtgacaaggagccatggaggccgcagggaggaaggaccatgggatgctgtcttgatccctctggcctgtgactgtgagggaggctcactctgctctgtgagccccatcacatgggtgtcgtgtgtgatggtgagtggtgcctcccttatagaaacgaaaccccaagagccaggaagagcccatcatcatccagattcatagggaaagccagctcctatcagaggcatcgaggggtgaggaggcctgccaaacttggagttgagtcccattcctgcctcttgccaactgtgtgccctgggcaggggatttcttgagttgagcctgtttccttacgaactgaggagagtagaattacaaacccataggttaatgtgaagattcaacaagttaatataatactaatacttaatgagcatttactatgtgtcaggttgggttctaaactctttatatgtatttgcttatttaatcttcataacaacatagtttgctgctaagggaatggaggttcaggatggttaaacaaaccccagggacaaaactggagaggacagtgtagattttgagcccaggtagcctggctctggcactctactcttaaccactgtgctctttgacctcaatttcggcagaatccagtgcttagcacatagaagctccaaaaatgtccacccctcccttgctgtctgtaaccagccttcctcatccaccccttctggacctcaagagtgggttctagaagcagggttctgttatttctcagacaccaaaagttgacccaactcgattgctctatcttgagttattttacttctctgttttgttgttggttttggtttttattgccttttctttgatcaaaagcaagactgaattgcctacaaaggcaaatctgattctgtgctcctgagcaccaagtgagcctcagcgatcggctcagcttagctcctaatgccaaccagtgaaggagcatggtttcttggtttctaactgctcacattcatggctaaacccccagccctagacgagcttccttgaccaatctgggggaaaaatacaccttcttgwttgtgggtttctggcgacacttgttcaatttcctggttactatagagaccttgtcaacacatccaaatactcttcttagcaaagaaattttcttctccccagtctctgcatagccccaaagaacacagggtctcaggaagaagcaggaaaggcttagcctatgggccttctgagcccagcccaggctctggttccctttcagctgcttgcagactttgagcctacagaggataaaatgagggaatgaacaaggagcgctgtttgagtgggactgagcttcagggcaaataaagggaagtgaatcagaacaatggaaaatctggccagggtatttaaacattcaaatttctttctttttccagtgacctaaggacaggcaatctgcactgggaatctggatcccttactcgtaatattatggctggaagggcaaggtcaagactcccagtggactggatactagggttgggtctcaggtctgctcctgatggccgaggccagcagctacattgcatttatacaaatggttagcggagctcccaagctggctcctgtctttcc

SEQ ID NO: 685578 - DNA, 3340 bp, Homo sapiens
ggtacccttcacagaaggagccaccacagtggagaaggaagctcatggcttttgggcaaggtaggcttaggttcaaaacccggctctccctgtaggacctagggcaactgatcctctctttcttaatctgtaaacggtacctgcctactagggctgtgctgagacttctggataaagtgtcaaagcacctagcccagggccagcacatagtaagcacacctaagtctaagttctcatctcctcttgagggacttagatcttttatccctttttctttcccatcaaatcctccaattctagcctctaacgtggaagagctgtattgactcaacacactagtacaccagtacacaaaggcactagtcaaatcttatggctttgggcagagaatgcccccgtgtgggttgtgtgacctggggcaagcctcttcctttcctctgattgtgggtctttcatctctgatttgagatgcacaggctaggaagtcacctttatttatttatttatttatttatttatggatatggaatctcgctctgtcacccaggctggaatgcagtggcacaatcatggttcactgcagccttgacctcctgggctcaagcgatcctcttaccccgcctccggagtagctgggaccaaaggcgtgcaccaccacacccagctaatttttgtagagatagggtctcactatgttgcccaggctggtctcaaactcctgggagcaagcgattcccccacccaggcttcccagtgttgagattgcaggcatgagccaccacgcccgacccaggaagtcactttaaagccccttctagctctgcctgttgtgtctccccagaagcctccttgtcatatgggatccttggccctgggagggagctggggcagctgtgaaaatcatctaacgagcgcccaaagaggaggctggaccattcttcctcaccactcagcctgattttctttttgtttgtttgttttgttttttgtttttgtttgtttgtttgtttgtttgagacggagtctcgctctgtcatccaggctggagtgcagtggcacaatctaggctcactgcaatgagccattctcctgcctcagtctcctgagtagctgggactacaggcgcccgccaccacgcccggctacatttttgtatttttagtagagacggggtctcactgtgttagccaggatggtctcaatctcctgacctcgtgatccacccaccttggcctcccaaagtgctgggattacaggcgtgagccactgtgcctggcccactcagcctgattttcaagcacccgatcatctcattcattcctcagacacccacatgtccccacttgttggcaggcacgatgagggcacagatgagaaataaagggtctttcacctcaagatgctgacaggccagcagggcagacagacaagcaaacaaatagctaagccagggtgacaggagctatcctagaagcaacagacagagcacagaggatgcaacacgtgattctaccagggatgagggatgggtggtggttcagagaagctaacgagaagcgaatgttggcgttcaggcttgaaggatgagtgggggtctgcctggtgggaaagggaggaggggcactgcaggccaaggacacagcatgggcattggcccagggattggaaagtcctgttccactcttggaatgacctcagagttcagcaaagcttgaggaagttgactgggagatgagagtggaggcacgaaggccagctggctgtctgctgtggagatccagactggagtccacgggaacatgaactaggacagagcctttgtccttagtaggcaatctggggacacaaagaccagccagatctggatcctcctttccagggactgaccatccatccaaccattcactcatcagtaaatgtcgatatagcacctatgctgtgccagatgctgtgacggcggtgagccttctccaggaggaagaaatcgcctgtcctcctgtgcattaatttcccagggtggctacaagaaagcgccatgatctgagtggcttaaaaccacaaaaatgcatccgtgcataggtctggaggctggaagtctgaaatcgaggtgtcagcagggctatgctccctctgagactccaggtagaatccatccttgcccctgcctaccttctgctggtggccattcatcttagtgtttcttggcttgcagacgcattaatccagccttggcctctgtcatcacgtgaccttcttcctgtgtgtctgtctctgtatcgcttctcctccttgtcataaatagaccagtcrtataggattagggctcatcctaattgaataggacctcatcttaactaattatatctgaaaagaccaaatttccaaataagatcacattcacaggtactgggcagttgggtcttcaacatctctttcttggggggtgggggaggtggagacacagttcaacgtgcaatgccaagtaatcacaatgcactgtggcaactaccttagaggaattggggacaggctgtgagcattcagaataaagagttcttgccaagcggaggaatcctcagtggcttcctggaggaggtggcctttcagccatacattgacaggatttagctatggaaatggaagggcatcccaggcagagggtagtgcaggagtacaagcatgtaggagggaattgcagggcagtaattatgtcacttgttgtaagcagtactcagaaagccctctcctctcacccttctgcctgcctgcccccaccaaatcttatacatgccaagctcactccagcaccatccaatcttgcacttgcatttgatggggtttggaagaaaattgctgcccggagtcatcatgacattcctattcatgtccaagcctggatttgtttttcttgagctgcagtgaagaaaaaaaaataataaactctgtatttatcaagcagcaaaccagtaggaaattataaccttttaaaataaatatgtatctaattataggagagcagaatttacttttgcagtactgtcaggatttccctggccagcctagtctacagataatgttccaactgccctcaacccccaaatctcactgggcattaacctcaaaaataccacctttgctgatctctcagcagacagtgatttaggctgcgctgagatgccctgagcaggctggagaggaacctgattccccagactttccttttaaagccagaggcccagccccttcattggctcctaaccacaaagccacaacccgcacccccaagaatgtctgttctgtccagcacacatctctgtggttggcagtttcctcccttgca

SEQ ID NO: 685579 - DNA, 821 bp, Homo sapiens
agtcataggcatgtggcctatcatctagacaggtgacatagtaaagaaaacaattataattggtagtaattaagaaaactatattcagtcttgatcattcccattgattgctatttcaatggaaattgaattttgtcattggactctttggggaaatggtcttcttgtatagggcctttattaaaaatcaagtccraagtcaattatagacttgaaagtattgaggagctagttcctaacaggtggtgagttcgtatgaagataccaccaagcacgaggacagatcagcaggaaagcatcatctggcagtcagtcagggaacagtggctggatatgctcacctggcagtggacaggtggaaaggcagcaggagagcaacaccattggctccgatgcttgacattaatcacattcctatggaaatgctgcaatttttacagcacacccgtggaagggaactgtcatattctattggatgttcacttacactttacttaagagtaaaacaaacaagctaaaccaacaaacagtttgtctcagcaacatcccaaaacagaatggaaataatattacgtttattgtggtggttcaaaccttgagaatacgataatgttttaaagcacaggcctctcttttgtggtaagaaaaattattgctgaaaaaatatcagctagtatatggcctgtttacttcttgaagagctactcttggttgtagacatgagtttaatctccttctgggtgcatctggggtgttgcttctaacaaagggattttgcttcttggtcgcagaagcagagtggtagctatgagtagaaggat

SEQ ID NO: 685580 - DNA, 821 bp, Homo sapiens
agtcataggcatgtggcctatcatctagacaggtgacatagtaaagaaaacaattataattggtagtaattaagaaaactatattcagtcttgatcattcccattgattgctatttcaatggaaattgaattttgtcattggactctttggggaaatggtcttcttgtatagggcctttattaaaaatcaagtccaaagtcaattatagacttgaaagtattgaggagctagttcctaacaggtggtgagttcgtatgaagataccaccaagcacgaggacagatcagcaggaaagcatcatctggcagtcagtcagggaacagtggctggatatgctcacctggcagtggacaggtggaaaggcagcaggagagcaacaccattggctccgatgcttgacattaatcacattcctatggaaatgctgcaatttttacagcacacccgtggaagggaactgtcatattctattggatgttcacttacactttacttaagagtaaaacaaacaagctaaaccaacaaacagtttgtctcagcaacatcccaaaacagaatggaaataatattacgtttattgtggtggttcaaaccttgagaatacgataaygttttaaagcacaggcctctcttttgtggtaagaaaaattattgctgaaaaaatatcagctagtatatggcctgtttacttcttgaagagctactcttggttgtagacatgagtttaatctccttctgggtgcatctggggtgttgcttctaacaaagggattttgcttcttggtcgcagaagcagagtggtagctatgagtagaaggat

SEQ ID NO: 685581 - DNA, 2099 bp, Homo sapiens
ctcgggaggctgaggcaagagagtcgcttgaaccccagaggtggaggttgcagtgagtcgagatggctgcactctagcctgggcgacagagcaagactctgtctcaaaaaagaaaagaaaagaaaaacaatttagtcagtactcttgtgctcaacttctatttcatgcctgttttccaatttcagtatcttagtgataaacatgtttattttatttattcctaaattatatttatgaacatctttgtagctgtttctcagacaaaacaatagaaaacgcttcttgtctacccccccccccaaaaaacaycctattttatttgctagattaaaatgatccctaaacatttattcctggctgggccaggggctcctgcctgtaatctcagcactttgggaggcagaggcaggcggatcacctgaggtcgggagttccataccagcctggccaacatggtgaaactcccatctctactaaaaatacaaaattagctgggcatggtggcgcacatctgtaatcccagctactcaggaggctgaggcaggagaatcgcttgaacccagaaggtgggggttgcagtgagccgagatagcgccattgcactccagcctgggtgacagagcaagactctgccaataaataaataaataaaacatttattcctaaagtacttagctttcctctggcctggagtggactgtttgctctatatttatcttcatatgttccttttagaagcaaatattgttgaaatacagacataagaacaaactccacagaattaatattttctctaaaaagtgattatggattaagacacaagcaggatatattttgtgtgttttaatacttctatagaagacaatggatattttctaagacaatatagtgattgtttaatgaggtaatcagtatttgagctactaaatccctaatattcctgaaattgcaaccaggactttccactggggccagagttagggaaaaaaggacttgtactttattttgtacttttttttttttttgagacagagttttactttgtcacccaggctggagtgcagtggcgcagtcttggctcactgcaacctctgcctcctgggttcaagcagttctcctgtctccggctcctgagtagctgtgattacaggtgtgcgccaccatgcccggctaatttttatgtttttagtagagacgggggggggtttcactatgttggccaggctggtctggaacttctgaactcaggtgatgcaccagcctcagcctcccaaagtgctgggattacagacatgagccaccatgcctggcctacagatattttaaaggaaaggaaaacacgtggtaaactgctcactttgatctataatacagttccgttgtatgtttaaatttgccacatactaaattgtaggagacaaagcaggagaaagatttcaccaaaaaagaaacgagatatgagcctagggcaccagggtctctggaaagacaatatttatttatttatgtatgcatttatttatttatttatttatttattacttttgaatagggatggcaaaaagttagcttgagaccagtgcaaacagaacccaactggcctttattttatttttgtcctttttacaaatattttttgagaatatacaaagtacaaggcactgttttcatttttgaatttgtttcattttatcacactgatatatttctgtgtttctaatttgtaattcaaactttattttaccctaggctaaaagaaccacacaccatgtccagaagtcaaaagtttctcatctggctttctgatctgtaagaattttaatttcttaatatgcaagttattgcttcagctatatttattaaatactacccttaaaatgttgtgcaagctttccacatgtaatttgtaacaaggacaaattgagcacctgctatgtaaaatgtgtatgaatcatttagaaatatcttaattactaatcacaaaatcttaggaagaatcttgagagataatgtcctccaacttcatgagaaaactgagcccccatatacccagttaaattatttacttggggttatctagctagttagtagcagaacta

SEQ ID NO: 685582 - DNA, 875 bp, Homo sapiens
gagagaagagcttcagtcccctgctggaagccaaggaaagataaagacacaaagataaagaacagaagagtcaagtgaaaaagcagccaggcaaacggaacaatcccagcaaatagatgctggcatgaaatctccactgggctgcagttcaccccaagccaggagtctcaagtgaggaaggagggggtgcgggagagcaggtgaggggctaccttcccagttctggcgaaggcctcggccaacctgcggttccgccctccgtaacaggtggtgatcaggtcggccaccccgcagctctctaggaaggtggctgtagacacttggcctttgcagaagatcctggcaaaagcaatcatttccatgagtcccaggcggatgacggccgctttggtgttgtctccacagcggaggccgtcgcagaacccagctcccacagctacgatgttctgcaaagsagatgacaaagcccagatgccgttacagcacccaccacgggtatggatgccagaggtggtgggggatgccgaggcaggggcagaccagggacattggctccatcttcaaaatactcaatgccgggctctgctcttgtacacctgggtgaaagagatgacgaaaggagagacagggcttccatattcccctttctaggacaaagagcccatatttggggtcagcagttgaagagcattggacagaaaatcagaacggctgatagtagtctttggttaaataatgtttggacaaactactttactttttgttttgttttaaatggaatgctttatgcaaccataacattcatacagaaaagtacacaaatcctaagtgcacggattgaagaattttcacaaactgagcatacccccatagcc

SEQ ID NO: 685583 - DNA, 1568 bp, Homo sapiens
tggatcacttgaattttattatgcttcagaagctccacacgggagagaaactacggaagtatgaggagggtggtatgtgcttcattcaggcctcaagtcttcaacttcagaatgtccacattggagagaagcctcagtaatgtgtgtaataaagtctttactcagttttcatgactacagtctcacctaagcattcacaaaggggagaaacattaaaatatgaggcacatagaaagcagttccttttgagtttgtatcttgtaatttatcacagaatccatgctgatgatacatttcattcagtcctgtaggagaaaaaacatttaagttaaagcctgtttcagccatagctcagcataccccagtggtcctgggactgtcacagtggagaacccttgtaagttgtgcagtagggcttcaaacaaaagtttgacagttacagttattcaggagacagaccttagagttcattcatgcatttacaaaacgaatcatgaacatatcaaagttgattaccactagaatgtcagtgacatgtgttttctgctgcatcttcacaactttaacactgattatcactttgtgttcactatgtgttaaatgaattaaaaggagcaaacgcgatgtttttaaattgtatctaagagaggaaatctacaaataattcagggacacctgagttgaaatgcagagtacactaaatactgcagttcacagcattattttgataatatctgttcacacttggttcctgtcttcccctcctcctctattccgaagttgcattcttagtatttgtggctttgtgtagtgttccattggttgaatacaatataaattcaacaataatttgtaatttttctcacactacaggctgaaaacgttgtaataaattcaataaaacatcttaataaattcaaaagtttaataccataaaagtcttttccaattataatctagatcacaaaagctgaaattcaatcacatcatgaaaagtggaaaattcacaagtatgtggaaactaaacactctttatatatatatgtgtatatatatatgtatgtatatatatgtatatgtatgtatatatgtatgtatatatatgtatgtatatatgtgtgtgtgtgtgtgtrtgtatatatatatatatatatatatatatatatatatatacccaccctgtgtccaagtgttctcattgttcaattcccacctatgagtgagaacatgcggtgtttggttttctgtccttgtgatagtttgctcagaatgatggtttccagcttcatccatgtccatacaaaggacatgaacccatcttttttaatggctgcatagtattccatggtgtatatgtgccacattttcttaatccagtctatcattggtggacatttgggttggttccaagtctttgctattgtgaatagtgccgcaataaacatacgtgtgcatgcagcacactcttaaataatatgtcagagtacatcaggagtgaaattaggaaataccttagacaactgaaaatgaaaacaatggccaaaacttttggaatgaggcaaaagcag

SEQ ID NO: 685584 - DNA, 641 bp, Homo sapiens
cctgctcacacgctggctgccccaacccctggcaatcgctagcactcctgggacccatgcaagtgagggaccctgacatgatgcttatgttttattcccatcaaaataaatccatctccatcctcagcacggtgggttgcaactgtaactgaacataataatcaccaggcagccttaacaaatactgaagcctgggccccactggcagagaggctgattgatttgctctgggttgtggcctgggcagcagtttcaggagctcccctggtgattagggtgggcaggggtagggagctgagaacccatcaccattgctgctccccagagaggtgagagaagttttcttctttgtaatccctgctatattttcttttctccygaagattctttcccactaccttgtgccctgctcttcagtcctttcattgactggggaccttggttgacttgttctatctctgcgttagaccccagttctggcctcaggcaacacagcagtgaatgtgggttgtggcctttccttttcaaggacacagatctggctctagtacctgcctaagttcttttgtccactttatattcatgatcgagatttaggagagatttttcatccaccaagacctgaagagtttcttcttttt

SEQ ID NO: 685585 - DNA, 978 bp, Homo sapiens
gccactgtgggtttcaggggctggaaagccctccttcacgtcagagcacattcacgatgggaaaccaaggggaatcagtatttttaaaatctggggctgggtgtgaaggctcatgcctgtaatcccagcgctttgggaggccaaggtgggtggatcacttaaagtcagtagtttgagatcagcctgaccaacagggtgaaaccctgtctctactaaaaatacaaaaattagccaggcatggtggtacatgctaataatcccagctactcgggaggctgaggcaggaaaatcacttgaacccgggagtcggagtttgcagtggagattgcgccactgcactccagcctgggggacagagcgagactccatctcaaaataaataaataaataaataaataaataaataataaataaataaaaataaaaatcaggaccaacgttgagagtgaaaaagccaacttgaaaacgggctgcagagcagacctgcccccagcccacctccatttttgagggatccctcaggatctgcagcggtgcaactccccatcttccctggttcattctcgtcttccttgttctcacagacactactacctgaccatcctcagccttcccaagatttggatggtctgcaggagcctttgcatgtgatgggagcattgaattygggaataaaatccttggttccgatcccaccttttccccttagaaaccatattatctttctgggttttgacttagtcatctgtaaaaggacaaagttgaactaggtgaactctcagatctttttgagacctaacagctgaagagttattttcttcaatacccactcccactgaaagccgagggaagggaactcatatggcatttcctcggagttcatgctctgattctcacccattgaaatgggcattgaaatcactgctccctaactttaatgtgcattcagatctcctggagctgtgttaaaatgcagat

SEQ ID NO: 685586 - DNA, 1448 bp, Homo sapiens
ggcccttttacttcatcatcataatagtgtgactataaccttatatcctagcaagaactctaaggaaaagtatataattgttaaagtgtacatttcattagaactctttattaaacaatatgaggattcaaatagtcaggtgtagtctatgataccaaagagcttatgatctaattaaggagacacacatgaaaaacaacactttaaaggttttcaactcaataacgaggcagagtctattatctaactgtccaatttagcaataaattatgaaattactttcaacttcttcatagacaaatggccaaagagaactttaaacctaaatttacatcacagataaaagaaaaatttaaaaaaacatggattttctagggtgcttgcttaagcttcttttgcttaaaaaaaaatctataaaaattattttcctgtgcctttcatttattgctttttcccaatagcaaataccctacatgtgtttgtgagccagtaagcttttagctgacccatatatctagttaatttaagatcaagccaccaaggtactaagctgaccacaaccctgacccctgagaagctgttatcccgtgaagtccatgttctaaggatagaatttcacagtagggattttctacatctatgttgtagagaaaattatttgtggtataatagattttttttgctaggccaactgagtcagcactttgtagtgttaacatttaatccctcttccctcttaggtttttgattcacactcgtcctggaatcaaggcaggccagcatgatgccttggaagtcattctttgggccagagaggaccagggaaggctcatgacatttctaattcttttgctgccagatctgatgagcagctgctttcagagaggtctccacctccagggtgcttaaactgcttagccaacaaatctgtgaagtcatgcatactgtaaactggctagtgtgcatgaatctaaagatttctcaaaaatggagtgtaatgtcctgcacatgtatcctagaacttaaaataaaataaaaaatggagtgtaaaattatgaaaatatttgaagccaattcatccttctgaataaagtgacagctactcctatttgtatatccaaactaaatgtctttrtaaagtctggtgtgttatgaagtttatgtttcaaagaaaatgattcataataccttgagttttataatatctattatgtcaacataaacaaattaacaagcccatcaatgcaagtaaatgatttaacatgaatgaagctaagaggtatttaatgtaagtcacagaggactttgcaagggatgtaacacttttttattcttattttgtataatttctggatttcttcaaaatgtatgtaaactagccctttgacacttacatattcccagacattcaaaaattcccagcttttgagaatctttttgatacctcc

SEQ ID NO: 685587 - DNA, 626 bp, Homo sapiens
tgagaccttgtctctaaaaaaataaaaaataaaaatgaaaaaatttaacaaacagacttgagagccagttgcatagagatgaacacgaaagactgaagacttctctgcaaaagagaaggaaaayaaaaacgtataaagaatgaatcttgaggaatgctcagatttgaaaggatgagggaaaaagctgttatttaaaaacaaagcccacttggttagtaatgggatctttcttgtgaaagatataccctgcagaggtgagaaaatttgacttcctcaaagaatactgattttctcaaaatgttgtccttggctggaaaaggaagggtgggtatatgaagagaaggtgattaaggggtaccaaaatacagttagatagaagaaatatagtctagtatttgacagtatagtagggaaattatagttaatgataattttttgtatattccaaaataattacatgagaattataatgtttccaacacaaagaaaagataaatgtttgaggcaataaatattccaattaccctgacaaaatcattatacattgtatacatgtatcaaaatatcacatgtatcccaaaatatgaacaactctagtatatcaataaaaatatgtagtccctgga

SEQ ID NO: 685588 - DNA, 1004 bp, Homo sapiens
atcaaaatatcacatgtaccccataaatatgtacaactattatgtatccattaaaattagaaacataaaaaactgtgagatcactaacaggatataacataattaatcataagtcatgtaataaaaaaaatcagaagtttttctgggaaaaaaataagaagtcaaagcacaacacagttgataaaccgatagggaacaaagaatataatcagcactgagagtcctcttcctcttacctagattttagatttacaaatttttatatttttaatcaccctttctaccataaccttgaggctaactttttaataaccgtagaaccaccaaaaattcactgccacatcactttcccttctcttggccaccccctttctccagaaagagttttctttacgcagttgaataaaaatttccactacaagtgtaagatgtggagtatgaaagtagggaaaatgaaaccaattttaaaactcaaggaaaaactaataggagagaaatcttgaggggaaatyagttaatgaaatgctctaattttacatttgaagaacaagagaaattaagatgatgtaattaaactaagactctcaactttttgtttgtcatcaaaaagttgttaacaatcttagttatcaaaaattatttttattttagataaaactgtatacataaaggaaataaattgagaaaacattttaaaatacagtgatagaaccaatgatgcacctcaattagaaatctgttattgttcgttatcccctaggagaagaccagagacacaaaccatttctttggtcccctctgaatctaactcttgcataaagggtacatccaaattacttaagatgaaataatttggttcagttagataccttgtaaatgcaggatcaaaatttgctataaataaagagatatcattggggcagttcttcccatttgaacaatatgtaaaggcatatgcctaatataacccgcctacagggaaaaagagaagggaagaaaaagaa

SEQ ID NO: 685589 - DNA, 2482 bp, Homo sapiens
  misc_feature 2382, 2383, 2384, 2385, 2386, 2387, 2388, 2389, 2390, 2391,2392, 2393, 2394, 2395, 2396, 2397, 2398, 2399, 2400, 2401,2402, 2403, 2404, 2405, 2406, 2407, 2408, 2409, 2410, 2411,2412, 2413, 2414, 2415, 2416, 2417, 2418, 2419, 2420: n = A,T,C or G
  misc_feature 2421, 2422, 2423, 2424, 2425, 2426, 2427, 2428, 2429, 2430,2431, 2432, 2433, 2434, 2435, 2436, 2437, 2438, 2439, 2440,2441, 2442, 2443, 2444, 2445, 2446, 2447, 2448, 2449, 2450,2451, 2452, 2453, 2454, 2455, 2456, 2457, 2458, 2459: n = A,T,C or G
  misc_feature 2460, 2461, 2462, 2463, 2464, 2465, 2466, 2467, 2468, 2469,2470, 2471, 2472, 2473, 2474, 2475, 2476, 2477, 2478, 2479,2480, 2481: n = A,T,C or G
ttatgatttattataaaattcttggacacacacaaccagtgggttccatcacttggcaactgacagtccaatgaccacaaccagggtggatttcacaaggggattcactacttgtaaggaggatgcccaggatagttcctaaagcagtgccttacgatggcgaacatagggttgtggttttttttgtttttgtttttgtttttgagatggagtctcgctctgtcacccaggctggattgcagtggcgcactcttggctcactgcaagctctgcctcccgggttcacaccattcttctgcctcagcctcccgagtagctaggactacaggtgcccaccaccacgcccggctaattttgtgtgtgtgtgtttttagtggagacagggtttcaccrtgctagccaggatggtcttgatctcctgacctcgtgatccacctgcctcggcatcccaaagtgctgggattacaggcgtgagcctccatgctgggccaacatagagtttttaattgggctgttttgctgggtctttttttttttattttttattatactttaagttttagggtacatgtgcacattgtgcaggttagttacatatgtatgcatgtgccatgctggtgcgctgcacccactaactcatcatctagcattaggtatatctcccgatgctacccctccccctctccccccaccccacaacagtccccagagtgtgatattccccttcctgtgtccatgtgatctcattgttcaattcccacctatgagtgagaatatgcggtgtttggttttttgttcttgcgatagtttactgagaatgatgatttccactttcatccatgtccctacaaaggacatgaactcatcattttttatggctgcatagtattccatggtgtatatgtgccacattttcttaatccagtctatcattgttggacatttgggttggttccaagtctttgctattgtgaataatgccacaataaacatacatgtgcatgtgtctttatagcagcatgatttatagtcctttgggtatatacccagtaatgggatggctgggtcaaatggtatttccagttctagatccctgaggaattgccacactgacttccacaatggttgaactagtttacagtcccaccaacagtgtaaaagtgttcctatttctccacatcctctccagcacctgttgtttcctgactttttaatgattgccattctaactggtgtgagatggtatctcattgtggttttgatttgcatttctctgatgaccagtgatgatgagcattttttcatgtgtatgctgggtcatttttatgtagatgtggagtaaaggcagcgcaggtgcactgctctgcttctacatacgtcattatgtatacaaagtggcggataagctcctccctggacaggaattttcatgtgataataaggggagttctctaaagtaaatctccaactcatgcatctctgacttgaatctgtttttgtttttctggggctgagcttcttcctggaactttgtgaaacaagaactcaaggtgcaacaattacaagtggatactttttcatagtgcatacccaacagcccaggaaccctgagttatgaaatcttaggaaaaccatttagattcttttaaaatgtttccgctaccaggcatggtggttcatccctgtaatcccagcactttgggaggctgaagcgggaggatcccttgaggccaggcgtttaagaccagcctgggcaaaatagtgagactctgtctctactaaaaataaaaattataaaattagtcaggcatggtgacatgtgcctgcagtcccagctgtccaacaaggagaggaaggaggactgctggagcccaggagtttgtgcctgcagtgagctatgattgtgccactgcactctaaactggttggcagagaaatatatatatattttttttgtctcaaaaaaaattgcttcatcaactgttaaatggaaataataatatttacttcacagtgtagattaaataaaataagcatgttaagtactgagcacactacctagcatatggtacctggaatattaattaatagtaataattaggattattaaccatgatacgctgactacaaatgggattggcagtcacaaagcgttcctgcaggaggtggaaattaagctgctggaccttcttttttttttttttttttgagacagagtctcactctgttgcccaggttggagtgcaatggcgcgatctcagttgactgcaacctccacttcccgggttcaagccattctcctgcctcagcctcccgagtagctgggactacaggcacatgccaccacccctgggtactttttgtatttttagtagacatggnnnnnnnnnnnnnnnnnnnnnnnnnnnnnnnnnnnnnnnnnnnnnnnnnnnnnnnnnnnnnnnnnnnnnnnnnnnnnnnnnnnnnnnnnnnnnnnnnnnnt

SEQ ID NO: 685590 - DNA, 632 bp, Homo sapiens
ctcaaaaaccatgtggtttatatattttaagactttgtcaatttctcagtattgctgcaattatgaccttcaattgggcatccacttwttttcttgattgctgaaatagtctccaataggtctccctgcctctagtctgcctctttctgagcaattctctagagtgatatatccaaaacgcataccatattgtgtctttcttttgctagtcagtttatcagctttacctttattataaagtctaaattgccagacacactggctaatgcctttaatctcagcactttgggaggcggaggcgtgtggattgctttgagctcaggttcaagattagcctggccaacatggtgaaaccccatctctactaaaaaatacaaaaattagctgggcatggtcgtacctacctgtagtcccagctgcttgggaggcttgagtcatgagaattgcttgaacctgggaggtggaggctacagtgaccagagatcatgtcactgtgaagcagcctcattgtctggggtaacactcgaggtttgttgtctcatagccatgagaacaaggatgcagacacacaaagagtgagattgacgatggaagtttaataggcaaaagaaagagaatagctctctgctgca

SEQ ID NO: 685591 - DNA, 949 bp, Homo sapiens
tggtcaatagttttgttccttttacagtggcacctaaaatgctatcattattttggattaaagtatatctccaagaactccctgttaaatgcaattatcgaacatgacaagcaaacatttgtgtttgtgcacgtggtgtgtttatttattcttctctatggtaatacaattctgacagctggtcacaaaaagagtggatagagtgtgttatggccttttaagaggcatgagagatggtgtgataagacattgactagggtgaggtttaagcctatacctcagtgctaggactctatagaaaacattggatccttggaaaagagggagataaagcctcaacrctgaggcagacagcagggctgttggacagggaagagtgcatctaagataggtttcaacctccttatattttaattcagacaaactggtttatctcatttggcttttgagaacccaaaaggagacatttatgttgaggttactaaactgtgcatcctggagcatttctgtgaatctgggcctttcagtgttttcaggttaacaattctttacttctgtcacctctctttgttcatattaaagtacaaataccctgtggaaactattcagtaaaaatgcggccctttgaaacaagtgatttctagttaaaatcatctgaataattttgctgcttagtttttatcttgcactctatttttgtgcatcaagaaatttagacatttaaagatatgcatgttgaattaaaataaaaaagaaacacaaaatagtaaatttttgatactgtcactaagttatgatgaatttctctttcaatacttaaaattctcttaagaagtgtgaagtgttttctattagctgaattgcatttacatttataatctagccaggtttggggaatttcattaaaaaccttgttaaaattcttacgcagcatttacatttcacttag

SEQ ID NO: 685592 - DNA, 1206 bp, Homo sapiens
agtgtattttttatacaggttggctaatctgcctgagttagctatcatgtttttagcatttaggttattgcaacaaagctttttattgacaatgatgcaacataataatgaaatatgtttcaaaggtgaaaaataagcttttaggagaaaaacttgaaattccttttctaggatttctgtaacttatgaaagttcactgttttcccttctaattttattgttttcctgaaaaagctgtgtgctaaagtgcacacaatcactttatatactttgacattccacacatcattagatggttttgagaaaaagtgtaaaatatctcctatggaaagtacaacattgctgatctttgtaaagtttcttaagaaatgaaaatttgtgaaatccctttttcatcacatcagtatgtttttcttatattctttaacagaataggtataatttccccagaagattgcttcttccagcttaaaaataaagggctaagacttgagaatctgttgctatttaagaaaagaggttcccaaacttaatattgaatgggtaatgcatatgttttgctttatgaataaaagacagacattatgatgaacwgatgctacaacatgtttttaatttaatttatttattttgatagctttatgggcatgaatggtttttggttatatggataaattttgtagtggtgaagtctgggcttttagtgtacccgtcccctggatagtgtacatcgtacccatcccctgggtagtgtacatcgtacccctcccctggatagtgtacatcgtacccatcccctggatagtgtacattgtacccatccattcctgaggtacttcacttaggataaaggccttcagttccatccaagttgctgcaaaatacattatttcattccttatggctgagtagtattccatggcatgtatacaccatattttctttatccacttattgattgatgggcactttggttgatttcatcttgcaattgtacaacacatttttttaagcttgaatgtagctgtggattgttttccttatctaaaattcccacaaagatgtgggagcaagatattgtacagcaacatgtgtagagcaagatatttattaaaataaattatatagcttaatatataaatcctttctcacttctcatgaaatatatagatattaaatgacctaaaaattttgttttttggaata

SEQ ID NO: 685593 - DNA, 654 bp, Homo sapiens
tgctctacacagccacttgttttaagcaggagagatgagtttcgttattgaatttgctgccactaaaaacattagtagaacaatcaatcctatttgttcattctagtctttaaactcttcctcatgtttctttttcccctctttaaccttgtggtcccctggtttctttgatgagtatttccttttcttatttatatctttatatttacatatattatatatttatatttacatttatatatatttatatctgccctctatatcttttcctattcaattcttattttgaaggctagtttaatgaccaacacattgtagtgttgtactaacgatcacttttccaactgattcttcctcttcttttaaagaatatcacttcaactgaatgtctgatcacagactgaaagtgccaatttagctgtaaagctgatttattcttcttcctttcattacacacatatatawttttttctgaaaaaataaaaattacgttttataggtttctaaactgaagtttcccaagaatgattacatcattttttattaaaagtcattatgtattcccctaaaagattacaggtacatattaataatacattaatgcgagcttatttattatactctctgaagagatattttgaatgttctttatta

SEQ ID NO: 685594 - DNA, 650 bp, Homo sapiens
cgtgagttagcgaaaatgttcaatcagtgcccagtgtttgctcagaggcattgaagggaaatgtaactagaaatgtgtaccagatgagtgatgaagaaatggtcaagattacatgctctctctaaacttataccccaagccaaaaagacacatttaactgtaattgctaccaaaattcttcaaactgtatatcaccaactgtctgaaattcttttagacaaaatattttcaatattttgggggggttttgtccagtgaattaaattgctcaacaagactgaagaatgtatgcattttaggaacaggttgygattttgaaaagaaaaaggaaaaatgactagaatgaaggggaaaacaggctgggcgcagtggctcatgtctgtaatcccagcactttgagaggccgaggcgggcagatcacttgagatcaggagtttgagaccagcattggcaacatggcaaaaccctgtctctactaaaaatacaaaaattagtggggtgtggtggcacatgcctgtaatcccagctactcgggaggctgaggcatgagaattgcttgaacccaggaggcagaggttgcagtgagcagagatcgcaccactgcactccagcctgggtgacagaaagagactccatctcagaaaaaaaaa

SEQ ID NO: 685595 - DNA, 1029 bp, Homo sapiens
  misc_feature 381: n = A,T,C or G
tctatttaagctcctttacaccaacaaagtgatgtggtgaaaattttttgcattaactagtggaagtactttttatttcttgaacacgtaacctctttgaataatgtagaaaaccattgttttctggctgcgagcggtggctcacgcctgtaatccaggcactttgggaggccgaggcgggtggatcgcgaggtcaggagttcaagacccrcctggccaagatggtgaaaccccatctctactaaaaatacaaaaaattagcctggcacggtggcaggcgcctgtagtcccagctactcaagaggctgaggaaggagaatcatttggacccggagggtggaggttgcagtgagccaagatcatgccactgcactccagccntgagtgacagagtgaaactctctctcaaaaaaaaaaaaataaagaaaaccattattttctatatgagattctcatactttatgaagagaatgtcaatgaggaagacatttatctctgttttatataatttttaacattattttcctttcaagataattttggtaattctattttaatatctgccaaataacaaaaaagttctttttttttttttttttttttgagatggagtcttactctgtcacccaggatggaatgcagtggcacgatctcagctcactgcaacctctgcctcccggttcaagcaattcttgtgcctcagcctcccgagtagctgggattacaggcacatgccaccacgcctggctaatttttgtatttttaatagagactgggtttcaccatgttagccaggctggtcttgaactcctgacatcaaaagatctgcctgcctcggcctcccaaagtgctgggattacagccgtgagccatggtgctcggccacaacaaaaaagttctatgatatgagattctagctcaatgtttctattgaaataattcaatgtacaagtctgttcccctgaactttgggcagggttcataaatttaagagtccattgcagttattcagttactgcccctggagtc

SEQ ID NO: 685596 - DNA, 1029 bp, Homo sapiens
  misc_feature 381: n = A,T,C or G
tctatttaagctcctttacaccaacaaagtgatgtggtgaaaattttttgcattaactagtggaagtactttttatttcttgaacacgtaacctctttgaataatgtagaaaaccattgttttctggctgcgagcggtggctcacgcctgtaatccaggcactttgggaggccgaggcgggtggatcgcgaggtcaggagttcaagacccgcctggccaagatggtgaaaccccatctctactaaaaatacaaaaaattagcctggcacggtggcaggcgcctgtagtcccagctactcaagaggctgaggaaggagaatcatttggacccggagggtggaggttgcagtgagccaagatcatgccactgcactccagccntgagtgacagagtgaaactctctctcaaaaaaaaaaaaataaagaaaaccattattttctatatgagattctcatactttatgaagagaatgtcaatgaggaagacatttatctctgttttatataatttttaacattattttcctttcaagataattttggtaattctattttaatatctgccaaataacaaaaaagttctttttttttttttttttttttgagatggagtcttactctgtcacccaggatggaatgcagtggcacgatctcagctcactgcaacctctgcctcccggttcaagcaattcttgtgcctcagcctcccgagtagctgggattacaggcacatgccaccacgcctggctaatttttgtatttttaatagagactgggtttcaccatgttagccaggctggtcttgaactcctgacmtcaaaagatctgcctgcctcggcctcccaaagtgctgggattacagccgtgagccatggtgctcggccacaacaaaaaagttctatgatatgagattctagctcaatgtttctattgaaataattcaatgtacaagtctgttcccctgaactttgggcagggttcataaatttaagagtccattgcagttattcagttactgcccctggagtc

SEQ ID NO: 685597 - DNA, 958 bp, Homo sapiens
tctccaatttacaggagaggaatttagccaacttttgcctaaggtcatagagttaacaagcccagtgtgtgtcaaagacgggcaatgtcatcttagttttaagaagtacaagctggccaggtgcagtggctcacaactgaaatcccagcactctgggaggccgaggcaggtggatcgcttgagcccaagagtccaagaccagcctgggcaacatggtaaatatcatttctacaaaaaaatacaaaaattagatgagcacgggatgtgacaagaccctgtctcaaaaaaaaagaagaaagaagtacaaactggtccaggcacagtggctcacacctgtaaacccagtggttttggaggctaagaaaaaaggagaccccatctctaaaaaatggggcaaggggtggggactctgaattaaggtaatgactgttarctggaagagggaaaatttgagagctaatttgaagttgaaatgaggcaggacctgatgacaatgaattggatgtggaagacaaaggaaagacagacccaacatcctgggtcactcccaagtttctggtaacgccattaagtgacaaaagaccattaagtggcaatagagaattcaggagggggccaggtatggtggatcacgcctgtaatcccagcactttgggagaccaaggagggcggatcacgaggtcaagtgacagaaaccatcctggccaaaatggtgaaaccccatctctactgaaaatagaaaaattagccgggcgtggtggtgggctcctgtaatcccgactactcgggaggctgaggcaggagaatcgcttgaacctgggaggcggaggttgcagtgagccgaggtggcaccactgcactccagcctggtgacagaaagaattcaggagggatagttagttaggaaaggagttcaaattgagatctaaacggtgtgcatttagaaataagaagtctg

SEQ ID NO: 685598 - DNA, 2492 bp, Homo sapiens
gcacctcctggaccaagggcctctgcacttgcttttccttcgcccagaatccaattcctctagacattcagacagctcatctcactacctctttctattctttgcttatcactttcccaacaagacctttcctaagcacttttctaaaacgttaacatatcctctataccccgatacctacagaatctttcttttgtccctgactaattttactgataaagtgtatccatttctaaaatgctatacaaatttttcattttgttaatatctgtctcttccagaggcggataattaatcacatctccatcctcctcctccagccccccacaccccgtgtactagaagacaagctcctgcaaggcagaaattgttctgctcttttcacagacgtgttcactgaccacctactmcttccctgcaatacctagaaaagtgtattcaaagtaggcttatgaataaatatttgagatatacatgagcagagggaacatgctatgggatctctggaaagcagatgtcccagggagaggaccagatgaaaggagtggctggcttgttcagtgaacagcaaaggggccactgtggctgagatcgatgagcccagagcgaaaagctggacgacaggcaatcagggagtgcttttttggccactagacaattttggttttactctgagtattgtgagaagttttggatgaattttaacaagttgactataatggccccagggctaaaactgaaagaacattcagtagagcacagcaacaaacccacgtagatattatgaacgaggcttagcttcttccatcacatttagtgtcagcctgtgttcatgtatttttaatcaacacaaatgttgtattgtactatatatctccttctcttccttacctttcttttttttcactccacagtatgttttcacaatctatccatgctgattagtgaacaactagtcaattgcttctaattgctgagtattacttcactgtcagcatctatctcttctttcctaatgtgaactagaaacaaggttagaattggaaaaagtgtgctgtcgggagctctgggagaaaaaagaatcaatttactgaggggaatgggatagtgagaatgaaacggaaaagcaatgggttagattagcccatgttagaatttgccagattgggacaatgaagaaagaacaaggccacagaatcaaaagaaataataaaaaaagtggccaaaatgataaaccatcgggtccatatggatgttaattattgtaagaagaacaatagcaacaacaatcacaccaagatagtattcagtaaatactttcatcatgaaagacactgttctagggattcacatacattgaggaagggaccaatatatttggagcaaaaaagaaaccaagatatttgttactacatagaaataaactgtttaatggaaataacaaaatgaaaaaagttcgaagtgttgtacatggtattcagatgcactgatatttaattttccaaatgtaaatactttcaagatgatgacaggtctggtaaatgtcttcacaactagataagagatgacgatgttagtgaatcatgaacatggataatgaagtctccaagatgaagctagtcatgtaatagccacggctgcaattggaagataggacagtaccatctcaacctcacgtccattgatatgtaggttagtgaggaataagacgcccttgctcaggaggaccactagaagagagctagatttcaggcaatgcagagaaagaaatgcaagtggaggcattgaagtatagggtagtttgtggtcagtggaccaggaagtttcagttgttatagtaatgaggtctaaaggaagatgatggaagaaaccacagaatcacagagtggtcagcgatggggagaaatggctgacaagcaggcttacatttagggagggtaatatgaattcattgctctcatagttttaaataaaagagtggcaagtttgcccagttaattaaataattaatctggcatgacatatattcaattagacaactgttttgctctttgattattaacaaataacaacaggtgtgtcttcgtggtggtgaaaggggccagtttcgcccaactctcttgccattttgacttatcccctccccccatacatatccaaatgaataagtaaaaattaaaattattacatataatgttgccatgttgactgtttgttatgtgtggggttgtttgtttgagatggagtttcgatcttgtcacccaagctggagtgcagtggcacaatctcagctcactgcaacctcggcctcctaggttcaagtgattcttctgcctcagcctcccaagtagctgggattacacgcaaccaccaccacacctggctactttttgtatttttagtagagacaagatttccccatgttggccaggctggtgtcgaacgcctgacctcaggtgatccgcccacctctgcctcccaaagtgctggga

SEQ ID NO: 685599 - DNA, 2492 bp, Homo sapiens
gcacctcctggaccaagggcctctgcacttgcttttccttcgcccagaatccaattcctctagacattcagacagctcatctcactacctctttctattctttgcttatcactttcccaacaagacctttcctaagcacttttctaaaacgttaacatatcctctataccccgatacctacagaatctttcttttgtccctgactaattttactgataaagtgtatccatttctaaaatgctatacaaatttttcattttgttaatatctgtctcttccagaggcggataattaatcacatctccatcctcctcctccagccccccacaccccgtgtactagaagacaagctcctgcaaggcagaaattgttctgctcttttcacagacgtgttcactgaccacctactccttccctgcaatacctagaaaagtgtattcaaagtaggcttatgaataaatatttgagatatacatgagcagagggaacatgctatgggatctctggaaagcagatgtcccagggagaggaccagatgaaaggagtggctggcttgttcagtgaacagcaaaggggccactgtggctgagatcgatgagcccagagcgaaaagctggacgacaggcaatcagggagtgcttttttggccactagacaattttggttttactctgagtattgtgagaagttttggatgaattttaacaagttgactataatggccccagggctaaaactgaaagaacattcagtagagcacagcaacaaacccacgtagatattatgaacgaggcttagcttcttccatcacatttagtgtcagcctgtgttcatgtatttttaatcaacacaaatgttgtattgtactatatatctccttctcttccttacctttcttttttttcactccacagtatgttttcacaatctatccatgctgattagtgaacaactagtcaattgcttctaattgctgagtattacttcactgtcagcatctatctcttctttcctaatgtgaactagaaacaaggttagaattggaaaaagtgtgctgtcgggagctctgggagaaaaaagaatcaatttactgaggggaatgggatagtgagaatgaaacggaaaagcaatgggttagattagcccatgttagaatttgccagattgggacaatgaagaaagaacaaggccacagaatcaaaagaaataataaaaaaagtggccaaaatgataaaccatcgggtccatatggatgttaattattgtaagaagaacaatagcaacaacaatcacaccaagatagtattcagtaaatactttcatcatgaaagacactgttctagggattcacatacattgaggaagggaccaatatatttggagcaaaaaagaaaccaagatatttgttactacatagaaataaactgtttaatggaaataacaaaatgaaaaaagttcgaagtgttgtacatggtattcagatgcactgatatttaattttccaaatgtaaatactttcaagatgatgacaggtctggtaaatgtcttcacaactagataagagatgacgatgttagtgaatcatgaacatggataatgaagtctccaagatgaagctagtcatgtaatagccacggctgcaattggaagataggacagyaccatctcaacctcacgtccattgatatgtaggttagtgaggaataagacgcccttgctcaggaggaccactagaagagagctagatttcaggcaatgcagagaaagaaatgcaagtggaggcattgaagtatagggtagtttgtggtcagtggaccaggaagtttcagttgttatagtaatgaggtctaaaggaagatgatggaagaaaccacagaatcacagagtggtcagcgatggggagaaatggctgacaagcaggcttacatttagggagggtaatatgaattcattgctctcatagttttaaataaaagagtggcaagtttgcccagttaattaaataattaatctggcatgacatatattcaattagacaactgttttgctctttgattattaacaaataacaacaggtgtgtcttcgtggtggtgaaaggggccagtttcgcccaactctcttgccattttgacttatcccctccccccatacatatccaaatgaataagtaaaaattaaaattattacatataatgttgccatgttgactgtttgttatgtgtggggttgtttgtttgagatggagtttcgatcttgtcacccaagctggagtgcagtggcacaatctcagctcactgcaacctcggcctcctaggttcaagtgattcttctgcctcagcctcccaagtagctgggattacacgcaaccaccaccacacctggctactttttgtatttttagtagagacaagatttccccatgttggccaggctggtgtcgaacgcctgacctcaggtgatccgcccacctctgcctcccaaagtgctggga

SEQ ID NO: 685600 - DNA, 1346 bp, Homo sapiens
tttctgacctaaaggaatatagtgaaattaaaagctatctcaattcctattcaggtgaaaatatctcatgtaagacagaggtgtcttacatgacacctctgtcatgtgaaaatatctcatgtaagcaaaggtgaaaatatctcatgtaagacaggatgtcgtcgctgactccctactaatccagaatttttttctctttgttgtcagaaaaaaaatctgttagaaaatgttgataatggtttttgacaaattttccttatatccaagttcttttatttwttgtttacagaggtcaccaaatataagtgctaaaattttgaaagttttaaagctggtttattagattctaattgctgctgtaacaaattaccacaaagttagtggcttaaaacaagacgcatttgttctcttatagttctgaaggtcagaagtccaagaggaattttgctataagatggattatatctagagtcccatctgtgcttaatttagaatattgaaataatgagatttggaaagtttgagctggtcagacttatataagattttggatttaaaatgatgtttaatatttaagacttgagaatggggtgaatgtattgcatgtgagacagacatgaagttttgggggtcagggggtgtcttctgctgaggtggcacagggaatccatgagtcacacacctaatttcatcaatagtcctctttatgactgaataatttgaccttttgatacttcagaggcacaagtaaaagttgttcaaccacatccctgtctctcactccagagccaagtcacttcttgacaatgaatctcccatttagaatcttttgcacctttagataggctgagaaatctcccagtcaccacagcctactttatttttgcttaaaagttgttgcttcagtctaattgtttcctatcacattttattactagtagcaagaatgaactaagccacacctcttgatgatgtgtttctcatttccttaggagatctcatgagcagtgcttttaacattcctattattattatttatttattttttttagatggagcctcactctgtctccaggctggaatgcagtggcatgatctcggctcactgcaacctctgcctcctgggttcaagtgattctcctgcctcagcctcctgagtagctgggactacaggcaatcatcaccacgcccagctaatttttgtatttttagtagagatggggttttaccatgttggccaggatgatctcgatctcttgaccttgtgatctgcctgcctcggcctcccaaagtgctgagattacaggtgaaagccaccgcgccaggtctaattttcttatttgtat

SEQ ID NO: 685601 - DNA, 1143 bp, Homo sapiens
aattttaaatttacctgagtttcaacatcataattatcagaaagaattactaatacataaagaacttttggtctaagatacctcaaattcaaaatgtcaaattcaaaatgtcaaattcaaatgtcaaattcaaattcaaaatgtcaagtcccttaccttcaggaattaggaattaaattccttcagaattaatagatgaatgaatcctccccctaccccccagtacaggcaagaatttcttctccaaacccattttagccacagccttaggtcagaggaagtggtagcagctcaaataacttatacacrtgaataatccaaaaccaagtgtatagctgcaaaataaatttcaatcttctctctttaaaaaaaagcaacgcaactgtaaagccattttaataactttctgaaagaatgtgagaaatatacaataagtacacaaaatagtaatcacaaacaggtgctcagcaaaaaggaaaagagttgactaagccataggcatacaggcaatttcacagccagacagtcttctgggtgagagaagtgaatgaaaactagtgttatggcatcatagatctcacatgtcaacacagcacacaggctattcttctcaaaaaacattttaacaaagtaatttagaggttcaacattatctagaatgccttgctctttagcaaaaatttgaagcactaagccaaacttcctaacagcacattcttacatttgatgtctccaggtgcatgctgtggaccctgacctaaccccacccaacaggtgagaacaacagcttttgttacatcaccactaataccttgcttaagcttttcaaattccaaatggagatatcaaaccaatgattaaaacacagtgtttgggccgggcacagtggctcacgcctgtaattccagcactttgggaggccgaggagggtggatcacctgaggtcaggagtttgaaaccagccaggccaacatggtgaaaccctgtctctactaaaaatacaaaaatttgctgggtgtggtggctagtcccagctactagggaggctgaggcagaaggatcacttgaaccaggaaggtggaggttgcagtgagctgagatggcaccactgcactccagcctgggcgacagagcaagactctg

SEQ ID NO: 685602 - DNA, 1564 bp, Homo sapiens
gaggaatggcaaatgaggaagaccaggctgttcctggtcataattctgacaaggtggaccaagaagaaagggaaaggaccttgtttcccttcckgtgtcggtccaggcttttatcagtgctcatcagggattggctggaccttcttccctaaccaataacgaaaaccaggcttcctgacatgtgcttgaaactgataggaactcagtgcaaggctagaaaagtcagtgaagacagggagttagcttgggagtttagctttttgatcgcattggtaagcttcttctttcagccagtcttgttctcttttttgctttagctctcaatctttggccaatctatctttgcactgtggcaaagaaagacattaatactgtgtaagcccacccctgctttgtggctcattgctgttatgatttaacaaaagaaggtatcattttgctgtctttcattaaggaagaaactctcagctaagatggcccttcttaacatttacttgacttcaaaaatatacctagctcttgacttcaaacaatttgcaggcattaccttgttgttgcgttcgattccaacataatctgcctcttctggtatcattacaaagagttcagcttcatatgctccttccccttcatttcttgcatttattatgagcataaggtgattttcatctccaatgattacctgatgcttatctctaaaaatgcagtttaaaaagaaggattaggtactctacttcttggcttcgtgaatattttatttaaggatttatagaggaggaaaagaaaaatggcaagtgcaaaaaaagaagatggaccatcatgaagagatggtaggaagaggcaagagaatcatctctgggtaaaaagggcaggaaaacacccagtagtgtgttggtaaatgtttaacaaccagttctcaaaaaaaaaaaaaaaaaaaaaaggattgatttatagcattttcagattccagtggtgtaaatccatgaaccgtggtcattttcaagctaccaacatatttaacaatctaccaacaaaattactgcaaatttaacatttcacttacaagccagaatgaagcagcttcagcacttcactgaaaacatacattaggaagaaaatgggcaatggaataaaaggaagagaggtggtttagaaagtaagagggatagattaatgcaaaggaaataatgagagggaagaagcaggcagatacaataagatcttaaatcactggtagaggacttcaaggtattttgaagacatgcagttcacttagaactgcaaatcaagccaatagttggaaatgcctactccactttttaaccttacttaaagcgattgcatttgaagttgataaattatgaaatttgggggaagtccctctgagaagttaccaagcagattccaaacactggcagtgagatagttcctgggagggaaagaaacacaaatctgtttcttgaccacagaatgttttacatcctagtccatgtcttcccataacagaatacagtgcaatttccagtgctggaatgggggcgtccattactggcaactgtgaagc

SEQ ID NO: 685603 - DNA, 649 bp, Homo sapiens
caacaccccagagagcttgcttgagaaaatgccgtcaaagactgtgaaggacttacctgttcactaacaatgttttctctgtagtagttcaatattggtttcacttccaggccttctttaaaggtggattcgtccaaactgtaattcaaactaatgttgattggagataatttatctcggaattcagtttcatcctaggaaaaataatcacaaactcaacagaggctccatgaaatagctgcaagatgtcagtctgcaaaagtcaggcaacactggaatttactcaatgaaagtgaatgatgaaacaattatctttgcagcaggcttagatggaggctgatttatgtggtatatagtagccagcatacctaatatatgtgcagtgatgaaatcatttagagctgcggcttcattgaaataygcttctggagccaatctttgggttctccagaccttcaacaactcatgcagaactggtcaagttgcaaagtaaaagattacacgtgtatatcataaatgtcacaaaaaacatcatgaatttggatttttattttcgtgaggttgccagaatttatgagttctctcttggggctcagaagaagaaaacatcttgattctcttcctctcatcatctttttaagcccttgcc

SEQ ID NO: 685604 - DNA, 804 bp, Homo sapiens
tgaactgtgagagttgctacttgttcatgagtattaaaacttcagtatttcccccaaataggctcatgttcacaccttcataacagaatggacttctaggctgaattcctttaagcacatgtggtacactctgatatagaatgttgttgttttgaactagataattgattctaagggtttttagtttaatgcatatttgtataagactgaagtgtgtggtttttttkttttttttttaaccagattaagagttctgtttggggccgggcgcggtggctcacgcctgtaatcccagcactttgggaggccaaggcgggcagatcacgaggtcaggagatcgagaccatggtgaaaccctgtctctactaaaaatacaaaaaattagctgggcgcggtggcgggcacctgtagtcccagctactcaggaggctgaggcaggagaatggcatgaacctgggaggcggagcttgcagtgagctgagatcgcaccactgcactccagcctgggtgacagagggagactctgtctcaaaaaaaaaaaaaaaaaagagttctgtttggttttatggaaagaatattactttttaacaagaaaatgtctttcttttcatgagccattttcttactgcatttaatcatattattaagataaagtgcaatttgttatgtggacaaatgtatatccctttacaattatatttgtttctattgcatacatttttctggaagaagtcttattttcacatgcaaaatttgtgaatggtgcctcagagcctcagaagacagaaagttaacagctggttc

SEQ ID NO: 685605 - DNA, 804 bp, Homo sapiens
tgaactgtgagagttgctacttgttcatgagtattaaaacttcagtatttcccccaaataggctcatgttcacaccttcataacagaatggacttctaggctgaattcctttaagcacatgtggtacactctgatatagaatgttgttgttttgaactagataattgattctaagggtttttagtttaatgcatatttgtataagactgaagtgtgtggttttttttttttttttttaaccagattaagagttctgtttggggcygggcgcggtggctcacgcctgtaatcccagcactttgggaggccaaggcgggcagatcacgaggtcaggagatcgagaccatggtgaaaccctgtctctactaaaaatacaaaaaattagctgggcgcggtggcgggcacctgtagtcccagctactcaggaggctgaggcaggagaatggcatgaacctgggaggcggagcttgcagtgagctgagatcgcaccactgcactccagcctgggtgacagagggagactctgtctcaaaaaaaaaaaaaaaaaagagttctgtttggttttatggaaagaatattactttttaacaagaaaatgtctttcttttcatgagccattttcttactgcatttaatcatattattaagataaagtgcaatttgttatgtggacaaatgtatatccctttacaattatatttgtttctattgcatacatttttctggaagaagtcttattttcacatgcaaaatttgtgaatggtgcctcagagcctcagaagacagaaagttaacagctggttc

SEQ ID NO: 685606 - DNA, 1276 bp, Homo sapiens
gcagcagctgcattacagggggagctattgtacattctaggggcctctccagcagtatgtcttctctttctagaactttgcctctctcacccaggcccccatgaatagtgactacagttctttgcatggctatgttcactccagctgagatgaagtcatgaatgtgggggaaagtcctttgttaaaggtacataatgcgtgttgcaaataatccattcccagaaaactcagagttggctgtgcttattctatacttcagttcaaagcaagttttctacacaaaaaatattcaagtctcccaaactcaactgtttaaacaaaagagttaattactcaggattctgggtggtcaatgatgaatcaccagaaaytgtgacaccctcagtgaggagccatgggtctaccctgaacttagaaggggacagtcacttcacgtctctgggcctcagaatcattctctgtaaaaagaagggatataattcaatgatattgactgtcttttccagcacagctcagcttacggttcttggaaacattattaaattttttaatgaattcttttgttctgtgtcttcagatgagaattacaatagaatagtctcgtttcctctgcaacaataaaataactgtgcatttttccatcctaaagtatttaaaagaataaatgataaaggtctgcaaaatgaatattctatcttaacctagccataattttataatttacattgccactgtttctaagtaagaaactgccttctatctgtgttttatactggcaagaagaatttaatctataaagaaaacctctaaagtactttcagaccatcgaaatttataattccataactcaataacttcctttgttttctacattacattacatattcaggaagataagacttttttcttattaatttaaaacttggaagtagagacaggtatcatctttttctggaacaaataacactagagttgagtcagcaatcaagttatgcatattcataaccatctaggccaacctcatttataattctttgttaatctataaaaataattttatttttaaaaatttgatttgctacttgaagcaaaggcaagaataacacaatttcacagggttcccaatgattaatgtgaaaattaaaaaaatacaaaaggaggaaattatttgcactattaaagtatatactaataacaagtagaaagttatgtggaagtcacaggaatcaaggccaatgaacaaaattcaatttcattttctatatatcagcaacac

SEQ ID NO: 685607 - DNA, 605 bp, Homo sapiens
aaccaataggaaataagagtgtttctagcttagtaagatgagggttctgacaacataggaattcatggttccactctctagaaacagcagcactagaagagactttagacctcatgcttaaaggaagaaaccaataaaggaaaaattcctgaacatataaaactcttctgtgttagggcccagggcagactctaggctgctaactgccagccccagattctggacctgtctcacctgcctccatgccatggtcagcaaacacgcacgatgtctggggacttagcaawgttggttagttaggaatctttttgtgatatccccctgtagccataacattgagaaacagactagatctttatcctgctggtgtgaagtcaggcctctgtgaccaaataaaaatgtccatggatctttagagaaggcaaagcaacactgggattgctaatgtgagatgttggatggacaggcaccagttatgatggagctggggaggggggctggaggtggccattgacagctgcacacagagaagctacagtttactgagtttggagtttgggtaaaagaaggagagaatgggaagctatgggattatacatttgatg

SEQ ID NO: 685608 - DNA, 1735 bp, Homo sapiens
taaattgtaaaacagttaaaaatataaatgaagtgttatataaaatattttaaatcttttgattgttctgagtattgtaaatataattaaacctgaacaaaatatttgtaaatttggatttagttatctacattaacaagtcagctctaaatcagtcaacatgtaaactatgtaggttctacatggtttacatgttgactgttttagagtattttacacatattcacacatgtcatgtgtaaaataattataattgacctatttaaacctaagtgaaccacaaaaaattattgaaatagtaataactttattattttctaccatagaaccaaatgttcacattttattttgatagatcctttaggataataagataatgttatacattgaagtcagcaaatgtaagaagttatgcctgaaaaatttggggtatacacaaagagaatgcaaaaaaaaaaattaacgatgtcaatagatagatgagtcttttattgaagtctttatccaatttaaatattctgtgaagccttgctgtctaaatattgtgagaaggtagctagaattctttcaaatataatagaaatggggggaataaaattaagtcaaagctaatatttttttcacatgtggccatacagtaagcccgttcaatttgtagttagtaatttaggttttgatactgaagcctaaatagtcaaagtgatgaccttaatctgatgaatgagtcctgcaaagtgtttctttaccctagaatgtcatagagatggaaacaaagttcaatttccaaaattaggagcaacttgaaaatctagaaagcttggggccagaagaaatttaataaggctcggttacatgacagcaaccagagagcataaattcaagagcttctattattaagacaacaaagcaacaatcagtaatacccacaggatcccagtgtaagcccaggatatatgttgatcctctgggaacatatatacttctgtaatcccattttctctagcccttgccagttgctgcattctaatatgtttataataaaaacagtgctgcaaaggtcaccagctaatgtccttatgtgcataatactatacttcaattcactgagaaaaatctctttttcctcagcctgcatttttgcattacatatacttgtcaggatgtccatcttcttttttgcacacacttcctcacatttagtgtttgctactgataaaatttcataaacgcattacttcccaactgactctgttgctgctgctttttcttagtgttttcatccctgtacaagctctgcatctaagctggtaccgaaattcttctttatcccccgcgtgtctctcaatttttcaccacttacttcccatttcttcaaatttaagagtaatactttgttctctcttcacttttcattctccagcatgtaatcggttaaatgagtaacttctattattttttaatttggacatctcagacrtccagaaatttgcagaaatagtaccccaaatttctatatattccttacttacattcttccctccaccctctttcattctctcccatctcctgtccctcttgctatctctctcttctctctctttctctcatttgaatttctgatattatgccttctttctctgtaatactctattgagtgtaacacacttaacctgtggtattattatctaatctaaaggcatttttcaagttttggcaattgtcccaataacgcaat

SEQ ID NO: 685609 - DNA, 1735 bp, Homo sapiens
taaattgtaaaacagttaaaaatataaatgaagtgttatataaaatattttaaatcttttgattgttctgagtattgtaaatataattaaacctgaacaaaatatttgtaaatttggatttagttatctacattaacaagtcagctctaaatcagtcaacatgtaaactatgtaggttctacatggtttacatgttgactgttttagagtattttacacatattcacacatgtcatgtgtaaaataattataattgacctatttaaacctaagtgaaccacaaaaaattattgaaatagtaataactttattattttctaccatagaaccaaatgttcacattttattttgatagatcctttaggataataagataatgttatacattgaagtcagcaaatgtaagaagttatgcctgaaaaatttggggtatacacaaagagaatgcaaaaaaaaaaattaacgatgtcaatagatagatgagtcttttattgaagtctttatccaatttaaatattctgtgaagccttgctgtctaaatattgtgagaaggtagctagaattctttcaaatataatagaaatggggggaataaaattaagtcaaagctaatatttttttcacatgtggccatacagtaagcccgttcaatttgtagttagtaatttaggttttgatactgaagcctaaatagtcaaagtgatgaccttaatctgatgaatgagtcctgcaaagtgtttctttaccctagaatgtcatagagatggaaacaaagttcaatttccaaaattaggagcaacttgaaaatctagaaagcttggggccagaagaaatttaataaggctcggttacatgacagcaaccagagagcataaattcaagagcttctattattaagacaacaaagcaacaatcagtaatacccacaggatcccagtgtaagcccaggatatatgttgatcctctgggaacatatatacttctgtaatcccattttctctagcccttgccagttgctgcattctaatatgtttataataaaaacagtgctgcaaaggtcaccagctaatgtccttatgtgcataatactatacttcaattcactgagaaaaatctctttttcctcagcctgcatttttgcattacatatacttgtcaggatgtccatcttcttttttgcacacacttcctcacatttagtgtttgctactgataaaatttcataaacgcattacttcccaactgactctgttgctgctgctttttcttagtgttttcatccctgtacaagctctgcatctaagctggtaccgaaattcttctttatcccccgcgtgtctctcaatttttcaccacttacttcccatttcttcaaatttaagagtaatactttgttctctcttcacttttcattctccagcatgtaatcggttaaatgagtaacttctattattttttaatttggacatctcagacatccagaaatttgcagaaatagtaccccaaatttctatatattccttacttacattcttccctccaccctctttcattctctcccatctcctgtccctcttgctatctctctcttctctctctttctctcatttgaatttctgatattatgccttctttctctgtaatactctattgagtrtaacacacttaacctgtggtattattatctaatctaaaggcatttttcaagttttggcaattgtcccaataacgcaat

SEQ ID NO: 685610 - DNA, 1798 bp, Homo sapiens
aaacctgtggagtagaaagcacatgagtcctagtgccctagcagcttccgattggaaaatgcaaattgtttttatttaaagatggtgagaaagtgttttcattaaaatatgttttaaaaaccattttcaggctgggtgcgatggctcacctgtggtcccagcactttgggaggccaaggcgggcgggatcacctgaggtcagaagttcgagaccagcctgaccaacatggagaaacccctgtctctactgaaaatacaaaattggccgggcatggtggcacatgcctgtggtcccggctgctcgggaggctgaggcaggaggatcgcttgagcccgggaggcggaggttgccttgagctgagatggtgccactgcactccagcctgggcaacaggacgagactccgtctcaggggaaaaaaaaattttcactgactaaacctgctgcagttcttttttactacagacttggagattttagtttaatttggtttaattctctgtcctttccctttcactgtttcactccaaaacgggtaagaatggcattgtttgaacatctacgtttgggtctactgccaccttagcaagcctcattaactgttttataaaaattgcgttattgttgttgttgtttttgagatggggtcttgctctgttgcccaagctggagtgcagtggcatgatttcagttcactgcagcctcaacctcctgggctcaagtgatcctcttgcctcggcctccagagtagctgggagtgcaggcagtgtgccaccacacccagctaatttttgaaagttttttcataaagacggggactcactatgttgtccaagctggtctctaactcctgggttcaggccgtcctcccgcctcggcctcccaaaatgccgggattacaggcacgagccactctacccagccaaaattgttttcttttttgagtgaattcaacaatttctgtgagtggctctttgcatgaacactgcaatgtgttgaagaaatccaaagctgaccaaaatatgatccccaccttttggagcttacagtctgttctggggaacagagattcagccaaagtcaagaaacactggatgctagctagattatctgttctgtgctttagtgtctataagtacatatgtgggtatgggttcattttatccctaaatttagtaccaaaccagcatttgtttcctaattataaatctaatttggcctaaactttattattgcacactgcctgaacaaaacatattcgtcactatgtaaattttttcctcatggaacaagggtgtgaaatgaaaatattttaagatttatttaaaaacagactattctgttttcagcttcaaaatttttctttgaatcctaaggaamctctgtcaacagttgaagttgctattgaaaagaaaaaagaaggaggcagaagtctctcagggataattatttccttctttttctatttcagatacctggtggggtggggagaagtaagaattgtaagggaggttcaatagtgggaaattctgtgacagctgattgaagatgatgatgaagaacctctgcattctagttaccctttgctttcctttgcctcttgtaaaatttggcttggcaacaatgacattgccatgcttactgtcccaatatccatcctgtcatagatcttaatgtttttgatcattgcattaaagtggaagtgccacccacagtgaaaccagatcccataaataaataagcttaaaggcaaaaaaaaaaaaaaaccaaaaaaaactctgatcccgaatgctcgggg

SEQ ID NO: 685611 - DNA, 602 bp, Homo sapiens
ccttccccttcctggccacctaagacacagggccgttatgttgcggtgccctacttcgcagcacccccagacctgcccagggctgctccccatgccagaaccctccctgtcccctaagaacctgactatcctttgtttcattccctaaaagccttacttttcaaggctgaggctgcagcatcctttatactggtatacactttcatgtttacaagtgtcattgggcatctactggtactcatcttagttacccttgtaacagagcccttagatgtcaaaccaaagcagtgactgacactgagatttgtggctgcctgggtaggtagagaagagagagagagtagagttgaccatgtttctcagctcacaagttcctatgatggcttggaaccctgaccagcattttcttctgaagcaacaccctcgtggtatgttcagmctttttctagatctctccaagacagagaaatacttgttgctcctgcattgaggttgggcagatgggcattactggggcactagtggccaagttgccctgatccacccacctgagaccaggtatgtgtgtggtggtgcaagccactgctttttcaggctggtgc

SEQ ID NO: 685612 - DNA, 628 bp, Homo sapiens
catggccagctgtccacctctaacaataaccaaaggggtcctggaactcaggaccttataaaaacctcagaggattaactgagaaagaccaagcccagactataaaagaataaaaacatattatttaccattatcatacaaatgaccatatattatatgagttttaaaatactgtttagcgggctcctatgttcactttatatcctccagctatggataagccttttgtccctgcttccagtatggttcttctgcttttgcatcctgattctgctggtttcactcctctgcttaaaacctcccattgattcctactgttcttagaaagaaacccatgcttccaactatggcggacagaataatggcccctcaaagatgtccacctcctaatccttggaacctaattatgctattttacatggccaaaggggctttgcatatgtgcttaagttaaagactaagwgtgcaaaggcctctgcttttgtatgtaattgtaatgggttgaatagtggccctcagaaagatatgttcaaatctgaacccccagaacctgtggatttgaccttatttaaaaaaccgttctttgcagatacaatgacatgaaaggtctcaagatgagatcatcatg

SEQ ID NO: 685613 - DNA, 689 bp, Homo sapiens
tgaaggctgagtttaaccatattttgaagtaaaaagtacatgtatttaagagaactgaaagtgactctgtgtgactggattattgtgttgacactattagttagaagccttggttgaaatcaacagaaaacccaacttacgctgacttaaacaataaaaagaattcatggtctcacctaaaaagtcaggaggcagttcaggctctagataaggcttgattaaggatcttgtttcttttcctctctttgttctggcttccactgtatraactgcatcctagggcagtcttccttcagagtcccaaagcagatgccaacagtcctgggatcatatgtttccttgttcatgacagcaagagagagaacctctctgccctcagatgtcagataaattcctgggcttcatactaatgggactggtggctgtatccaggagcatgggataccctgctgagcatagatcagctcatcactggagttgcgggggaattaatcccatccagattatgcttgccttgctgagagtgggtttgaatggttatgcaaaggaaaattagggtgttgttttagaaagagtaaatggatgcaaggaggcaaaaaataccaacactctctattgagtgtactggtagaaaaactgtgaggtccctggaaaggtgggctgaggagtgagagtggattttaaagagt

SEQ ID NO: 685614 - DNA, 597 bp, Homo sapiens
tatatgttcctgccaggagctcagaagtgctgctgggaatagaggagcttgaggtcattgacctcctggaatcccagcactttgggaggccaaagcagggtgacwgcttgagcccaggtgtttgagaccagcctgggcaatgtggcaaaatcctgtctctacaaaaaaaaaaaaaaaaaaattagctgagtgtggtggtacgcatctgtggtcctagctacttgggaggctgaggcaggaggattgcttgagcccaggaggttgaggttgcagtgagccgagatgaggccactgcactcagcctgggtgacagagtaagaccctgtctcaaaacaaaacaaaacaaaaagaaaagaaaaagaaaaaaaatcattgatctgaaaaaaaggtgcccagaataaatcataaagggaaaaggcaggtttcaaagtgccatatgcagtacaatccaatcctcgtgaagaaaaaaaaaaactgtgatgaagaatttggaaatgtatacagcaaaatctgtgatctttatttttcttttaataaagctattcctactacctatcctcccccaaataattctttcattgccactgtagtaaaata

SEQ ID NO: 685615 - DNA, 597 bp, Homo sapiens
tatatgttcctgccaggagctcagaagtgctgctgggaatagaggagcttgaggtcattgacctcctggaatcccagcactttgggaggccaaagcagggtgactgcttgagcccaggtgtttgagaccagcctgggcaatgtggcaaaatcctgtctctacaaaaaaaaaaaaaaaaaaattagctgagtgtggtggtacgcatctgtggtcctagctacttgggaggctgaggcaggaggattgcttgagcccaggaggttgaggttgcagtgagccgagatgaggccactgcactcagcctgggtgacagagtaagaccctgtctcaaaacaaaacaaaacaaaaagaaaagaaaaagaaaaaaaatcattgatctgaaaaaaaggtgcccagaataaatcataaagggaaaaggcaggtttcaaagtgccatatgcagtacaatccaatcctygtgaagaaaaaaaaaaactgtgatgaagaatttggaaatgtatacagcaaaatctgtgatctttatttttcttttaataaagctattcctactacctatcctcccccaaataattctttcattgccactgtagtaaaata

SEQ ID NO: 685616 - DNA, 551 bp, Homo sapiens
tcattcccttccttccctcactaggaactaactatgcagaggttagtgaatgttcttcttgattatgtttttatacttttcctatagataatattgacaygttcctcagacacacaaatattcttgatgagatatagcaggatataatagtgtttgcataaaataatggtgcttgcaataagcttctctcttgtgggcaatattagtttggtttttttaaagttctttatatccatgaggaggggaaaaaatcacattttgaagagaagccttaccgattcatagatttacgagttaaaggagataagagattccttttgcaaaagacataatataccaattttaaataattggtttaactgatataattttgcaacttgcttttctcccacttgacattatgtttttgacattcattcatgatgaagtatgctgctttagttaattaacttttaatcctgtgtgataagtatagtattctactgtataaatatactataatttacctatttactgttaatggacattttgatttttgccttttcttctga

SEQ ID NO: 685617 - DNA, 551 bp, Homo sapiens
tcattcccttccttccctcactaggaactaactatgcagaggttagtgaatgttcttcttgattatgtttttatacttttcctatagataatattgacatgttcctcagacacacaaatattcttgatgagatatagcaggatataatagtgtttgcataaaataatggtgcttgcaataagcttctctcttgtgggcaatattagtttggtttttttaaagttctttatatccatgaggagggraaaaaatcacattttgaagagaagccttaccgattcatagatttacgagttaaaggagataagagattccttttgcaaaagacataatataccaattttaaataattggtttaactgatataattttgcaacttgcttttctcccacttgacattatgtttttgacattcattcatgatgaagtatgctgctttagttaattaacttttaatcctgtgtgataagtatagtattctactgtataaatatactataatttacctatttactgttaatggacattttgatttttgccttttcttctga

SEQ ID NO: 685618 - DNA, 551 bp, Homo sapiens
tcattcccttccttccctcactaggaactaactatgcagaggttagtgaatgttcttcttgattatgtttttatacttttcctatagataatattgacatgttcctcagacacacaaatattcttgatgagatatagcaggatataatagtgtttgcataaaataatggtgcttgcaataagcttctctcttgtgggcaatattagtttggtttttttaaagttctttatatccatgaggaggggaaaaaatcacattttgaagagaagccttaccgattcatagatttacgagttaaaggagataagagattccttttgcaaaagacataatataccaattttaaataattggtttaactgatataattttgcaacttgcttttctcccacttgacattatgtttttgacattcattcatgatgaagtatgctgctttagttaattaacttttaatcctgtgtgataagtatagtattctactgtataaatatactataatttaccyatttactgttaatggacattttgatttttgccttttcttctga

SEQ ID NO: 685619 - DNA, 637 bp, Homo sapiens
tgagcacctttggaagaagacaaagatgatcctytcctccttcttctcaacccacctggctgatctgttcaagttggagaccatcttttgggtctctgtatttataggaccaacatgatccttaacccagtaaataattttttaatgtaatgagactgaaacttggggataatttaggcatcattctgtttagagaagtgctttaactttgagggtgatattggagaaagcttttatcctctttcatttttaggctgtgtgcatgtgtgtgtgtgtgtgcaatagaagccatggggtgaaatacatgaggcagaaggcactgagcccgtccttcctgaaagacagtccagcagagcctgcagcccaagttctggaactagtgtgctatctaattgaccatgtgacccgttgcatgttccctattccatctttatgttggtatcttctttaaaaacaattttggaatagatacactaaacttatacttcttgggcttggtgattgagcactgaaattttctggggccatagctatcttttaaaaatattattattgaacagatgttatgaatttcattttggaggagtgtattcatccctatggctactataataaattaccacaaatgtagtggctt

SEQ ID NO: 685620 - DNA, 1264 bp, Homo sapiens
aaattcaaattctgttgaaatgtttactccaagaagcaatgtgtttttgagagctaatcctgatatattcaaatcttaacgacttaagttgatggagtggacttcttttaaattagtgattccctaatttacctgacagttggaatttccaggccatgttgaaaatacagattatccagactcttacttctgcagatgtatttagtggttctaaaatggcacccaggagtctggatttttcctaggggccttgtgtaattcacactgatgaccaggcaagtttgggaaattgtgccttaaggagatttttcattaagcagtcttcatttgaaaagaggatcatttatcttctaataccccatgcttcctctttctcctgctctctttgtctcctgttgtytttcagttcctagaagctttaattgaatgaaagttcctagtagatctgtacctactaaaaaccacacttctgaagctacgtggccaccagaagacacagctagtctgccatgtaaaaaaggaaaggtggcgtgtgccctgaaggcgcaggggtgagaggcagggaaatggagaccccaacagccagcatcagtggccctcatcacagccctccaggagatatcaaaggaggtcagaccttggacagtagtcttgacttcctgctatagaacacattgttaacactgaaaaagatgatctgttctaggggaatggtgaaagctgactctagcacttgtgctttttgtttgtttgtttgagatttgagtcttgctcttgtttcccaggctgcagtgcaatgcgtgatctcagctcactgcaggctctgcctcctgggttccagctattgtcctgcctcagcctcccgagtagctgggattccaggtgcccgcaagtgtgcctggctaatttttatgtttttagtagagatgggatttcgccatcttggccaggctgttctccacctcctgaccttggccaaagtgttgggattacaggcataagccattgtgccaggcctgtgtttttaatttcatcatggcacagcttcaaaatgacatctaagtagctgacataaaaatgaaaattctgtgtactttgatattagcaggcttcaaatacaaaccagaatatgagtaaattgtttcttagccaaactgaataattttcacattggcaggccattggtaggctattcagcatctggctcatgtttgggccaagctgggtgcctcatgaaagtctggagggaaatacagagggcaat

SEQ ID NO: 685621 - DNA, 1264 bp, Homo sapiens
aaattcaaattctgttgaaatgtttactccaagaagcaatgtgtttttgagagctaatcctgatatattcaaatcttaacgacttaagttgatggagtggacttcttttaaattagtgattccctaatttacctgacagttggaatttccaggccatgttgaaaatacagattatccagactcttacttctgcagatgtatttagtggttctaaaatggcacccaggagtctggatttttcctaggggccttgtgtaattcacactgatgaccaggcaagtttgggaaattgtgccttaaggagatttttcattaagcagtcttcatttgaaaagaggatcatttatcttctaataccccatgcttcctctttctcctgctctctttgtctcctgttgtttttcagttcctagaagctttaattgaatgaaagttcctagtagatctgtacctactaaaaaccacacttctgaagctacgtggccaccagaagacacagctagtctgccatgtaaaaaaggaaaggtggcgtgtgccctgaaggygcaggggtgagaggcagggaaatggagaccccaacagccagcatcagtggccctcatcacagccctccaggagatatcaaaggaggtcagaccttggacagtagtcttgacttcctgctatagaacacattgttaacactgaaaaagatgatctgttctaggggaatggtgaaagctgactctagcacttgtgctttttgtttgtttgtttgagatttgagtcttgctcttgtttcccaggctgcagtgcaatgcgtgatctcagctcactgcaggctctgcctcctgggttccagctattgtcctgcctcagcctcccgagtagctgggattccaggtgcccgcaagtgtgcctggctaatttttatgtttttagtagagatgggatttcgccatcttggccaggctgttctccacctcctgaccttggccaaagtgttgggattacaggcataagccattgtgccaggcctgtgtttttaatttcatcatggcacagcttcaaaatgacatctaagtagctgacataaaaatgaaaattctgtgtactttgatattagcaggcttcaaatacaaaccagaatatgagtaaattgtttcttagccaaactgaataattttcacattggcaggccattggtaggctattcagcatctggctcatgtttgggccaagctgggtgcctcatgaaagtctggagggaaatacagagggcaat

SEQ ID NO: 685622 - DNA, 640 bp, Homo sapiens
gtgaggattaacctgtctttaaaagatcatgggtaaatcagcacaatctgaaagattcagagcttttttacctttctctctgctaggcacartgattaccatctccagccttattcttcacagccactcaatcgtggtccttgcagttttgcttcactccacatacaccatttcatttcccttcccacagtcacttcctagaacagatatagagggaggccctgctttgcatgctaatgagggaccacagaaatgactgcaaacagaaaatggaacgcgatctcgtgcatcaaaggggaatgttctgactgttctgtgacttttaaaaatatgttgtcaaaacattaaaaactattgtaggtataaaatgaacaggaacattttcaaaaatagtaaaactaatatttagtatagtgtaatttaaaacatcagaaacacgaatcaatattttatttctttgtaaaaatcttatggagtatagtttgaatgaagctggccctcctcttcttgtagtatacttacagtgcagagtgagctataccttgacaaactgtcattctcctgtctaagtttgaatcagcttccaactatttattctttgtgctttcaatgtcatgaaatacctctgataattccgtta

SEQ ID NO: 685623 - DNA, 986 bp, Homo sapiens
  misc_feature 333, 334, 338, 344, 347, 349, 350, 357, 358, 365, 367, 387,388, 389, 390, 391, 392, 393, 394, 395, 396, 397, 398, 399,400, 401, 402, 403, 404, 405, 406, 407, 408, 409, 410, 411,412, 413, 414, 415, 416, 417, 418, 419, 420, 421, 422: n = A,T,C or G
  misc_feature 423, 424, 425, 426, 427, 428, 429, 430, 431, 432, 433, 434,435, 436, 437, 438, 439, 440, 441, 442, 443, 444, 445, 446,447, 448, 449, 450, 451, 452, 453, 454, 455, 456, 457, 458,459, 460, 461, 462, 463, 464, 465, 466, 467, 468, 469: n = A,T,C or G
  misc_feature 470, 471, 472, 473, 474, 475, 476, 477, 478, 479, 480, 481,482, 483, 484, 485, 486: n = A,T,C or G
ggtcttttttttttttttttgagacagggtctcactctgttgcccaggctgtagagcagtgatgcaaccacagctcactgatgcctcggccttccaggctcagttcctcccacctcagcctcctgggtagctgggaatacaggcatgcaccacaaagtctggctaattttttgtagtttttcatagagatgrggtttccccatgttgcccaggctggtctcgaactcctgggctcaagctgtccacccacttcagcctcccaaagtgagccaccttcggtctcctcatctcatcttatgactcaatgcttgaactggtgtatttatcacagcnntcgnccgttngcngnnatcgganncatggcntnaattttgactcgccccacgnnnnnnnnnnnnnnnnnnnnnnnnnnnnnnnnnnnnnnnnnnnnnnnnnnnnnnnnnnnnnnnnnnnnnnnnnnnnnnnnnnnnnnnnnnnnnnnnnnnntgttcccagtttctccctcctgctggacacttgcccctcaattgctcatctcagcctgcagtgcatacacccctactccaggcctgtccctcagcccctctccaccctcccttgggtccgagctctgggtggcagtgaggtgggcgctgtcaggaagtgcacgcaggaggtgcaaccaaagacccctgggctctcacaggaccctggctctgagcccctgatcacacctgctgacacctggaaagtgtgctaactcaggagtgaggtgggcaagggggctgagtgctggagtgtggccacggggcagcatatggcatctgtgtggcactgcccaggagactctgggaaggtgggagtctctgtttcagcctccagacttcctgtccagataagggacaacttctaagaggccgaggtgtttgtcacgcctggggctgtgctctccagcacagcacaccgcactctggccggctgtcttcccttggagaggggctctttac

SEQ ID NO: 685624 - DNA, 2053 bp, Homo sapiens
tgacaatcttttggcaaatggtagcagagcaccttcttctaacaaaattactgttatcatgacaattaaccagccggtggaagaacacatcttgttccaacaaagtaaatgcatctctttcaacttcaaaataggaggaatgaagtcagtaacagtgagaccttgttggcacaagcatatgtaacatgacctgtgcttcactgttcttttgtgaacaaaaattccttacttttactttttaaatctatggtaggacctcccagagcagggctccacaactccccggccacagactggtaccagtccacggtctgtkaggaaccacgccacacaggagtaggtgcgcagcaggcaagccagggaagcttcatctgtatttacagccactccttatggttcatattacagcctctactctgtctccagtcagatcagtgatagcattagatactcataggagcatgaaccctgttgtgaactgcccatctgagggatctaggttgtgtgcttcgtatgagaatctaatgcctgatgatctgtcactgtctcactttgcccccagaagggaccatctagttgcagaaaaatcagctcagagcttccactgattctacattatggtaagttgtataattattttattatatattacaatgtaataataatataaagtagcacaataagtgtaatgtgactgaacaatcctgaaaccatccccaccttcccccagcccatggaaagattgtcttccacaaaaccggtccctggtgccaaaaagattgtggacaactgacctaaagtaattcactatcacaagtcttacctgggttgctgttttcagaagagtattttggcatctgcttttctttgtagtcagaaagtaattcacaaattctatgtataaaaatataacaaataaaattactgttttaaaatactgatctggaaacttaccaaatgtaaaattcttagagtatttcaaacaatatcagaatatcagaacttaacagtattatcccatccacttatgcgtacgttctacaaacttctcatgaagcttctaattaaagaagaaaaaaaagtaagatgaaatactcataaatcgagggcactttgacccagtaaattaacttgcattagcctgacataatagaaagtgtcccaactctaaataagtcctagctccataatgaacagctatttgctcttgaacaagctgcttctcttaggctcaatgtcttctacaaagtgaggactatgctgccttattttactaggttgttataatgatttaacacgataacatttttttaaatgctcaaagaaatagtaaaacaatggaataatttgttcctaaactttatgactgaaattatcttggaatcccaaataaaacccagtgcgaattttgttcataggttctaatatgcaaatgttgtagttttcaggaaatgttattaagtcctaattttgcttcttagttgtcctactctttatggcttctaattcagggcatctcaactatgtcatagtttgtaactaaattttttcataaatatctcattaaagtagataatgtgattgtccactattacggagttgatcaatcacgccaagggcagaaaaaccaatggatgtcaagacctgacttggaccaatgatccttctctacagactcaaactctcagccagatgtttgttacgatgatgctttatatacatgttcatctccagctgacatgggagacgaaaaccctacttttatttttttttaggttccacgaagaagttgtaagttgccattctctaatttttaacatacatactaacagtatatttggtacacaacaccccacacgttatttggctctggtgtcatctcacagaccaccttacatgactatttttattgcgcaaatcacaatttcaatgtttttgtggcacccattctgctttgattcacaccatttccttaaagctactcagcaaacagtcaaatgaccttccagtgactgcgcaaaatatagaatgcttcaaaaatttgtgtggccgc

SEQ ID NO: 685625 - DNA, 1023 bp, Homo sapiens
tagtatttgcagtccaaagcattctacccagtaaatttcccatggcacacaggataagacctactcatttctatagtattaaaaagtctatcataaacttgccttagctaagtattcacctcattcccaacctctcgtatcacacacttttggtactagcaaaagtgaactgctcagaaaccctgccatgttcactcaagcatcttgtcttttgcacttgctgctcttcctcccaaacaggcaatctcattagatgttccttctggcaaacacacgacctcgctgcatgttccttctgccaaacattcttcttctgcttctttacctagaaaaattcttctctctctgcatgcttaccttaaatcatacctactttttcccaaaactttcattcctcatcacatatgtctggcacataatcaatatataataaatcataattataagcttccagtgggcatctagcacacagtaagcactgaataaagtagtaaaataatgaaaatgacaatgataacaaaaagctcctgtctgtatttttaattgtttgtggtctatagcattagaaaaatggttactatctaaaagacatttgatagttatatgttaagtggacaagtgaaaacataaatagaaatgttttctttgtaaattctgttgaaaaagcacagaaatgaaatggagacagctctattatgagcaccttaaagatcaaaactacatctattccatctttgtctcctgcaacttataaaacctaacttacaaaagctctttgataaatagatgactaaattaaacggtgtcctcacacagtttggacaatataatgtattaggtgtccacaaccaggtagcatactarcatttttgttagcgtgaaagtttttctgcttttattataatctgctgagcctagagttgggcaatttgtatatttattatgacaatcttttggcaaatggtagcagagcatcttgttctaacaaaattactgttatgatgacaattaaccagcaggtag

SEQ ID NO: 685626 - DNA, 569 bp, Homo sapiens
tgttactcatttaggaaaggtgaaagagaaatccctatgagaagcacaatgttaaatcaagattcattttagttataaatatgacctggatatttggagatatcttgaaattctctgttttgggggtttgggttgtgggggattggcttgttttgtttgggagtatttcttctcattgcctgtcttcttatcttactacagactataggcttggaagaagaatgacaaaacctaagcacaaggcagttatcttgaatgatatttcttaccttttctgttttgcaggacatcagaactgatgtttcttttttgttttcgttctatttttttctgcatcctgtctttcatgaaaatatttttctctcccttgatatcactgcttttttctttttgatatatgaatacacagctactcctgtgttctttacttctttaaacagttaacccttttatgttactgtaggcagaaaaagggtagctgttaatcatttaggcactgaagagggtaaaactttgtttgcctgccctagtttgttggstgtctctgagtttgtgtgtgtatcttaaaa

SEQ ID NO: 685627 - DNA, 1204 bp, Homo sapiens
tacaaagccaggtaccacatatgaagatttcagggcctgtgatattatgaaatgaagccattatctatatcctgccaaaataactttttcttctgttttttatagcataraacattgcattaaagagatacagtccgaaattaacaaacaatgtccaggtgtgcagctgcaaacaacaactgactgctttgaatggctaactaactataattacagtacatctgaatcatctttcatttctcatggagacttgataaaatttttcaaaacactggtaaaatgaatttttattttatcatggagtgggatgagtaaacagggaatacaactcattcaatttctatacgtaaatatttatttgagtgaccatattagcctgccatacataggggtttgtgtttttatgttcctatatccccaacataatccactgagctatttgttttaatttttaactatgatttttatcaataaaataaaattttatataaatggagatacaatattatgattcctgggtgatttgtggtatgatatatatcatatcaataccacaaaatgtattgatgtgtatcacagctgtctaccagaaaagttcatattcattatgttttgtatcctttcactattcattttttatatgctcattattaaagcataataagatccccatgtattgtgtctattaagtggccttgactattattccctgcattcctaacctgcagtctaacccagttcttttcaatcaaggtagcaatttatgcaagaccaccaaatgacagagaattattatgttgggtattcttaatattgaccaccatctatgctagagaagtttttgtaaacttcaataagaacagtgattttatcacacttgtttctccaaggctagctagcttgcaaaaacagattcccagagaagcagcataattgttagaaagcagtacttctgtagctatggttttaatttaatttagggaaaaaaaggcactgtttttgtctaaacatcaaacattgactaagacagatgtggaaaatatctggaggttgtagatggcttaggatgacagaatcagatgaaaatagtttttgcctgttgttattatttcagatgtctctttaattttacaaagtaataaaaggaagagaaaggaagactgtgtgccctgaagccttattcttttaaggaaacctctcaccc

SEQ ID NO: 685628 - DNA, 642 bp, Homo sapiens
acaggtgtgagccacagcacccggcctactaagaagttttaatttcctcacctgtaaaataaagataattcctgcccttgctgctgaatgagattatgtagttcaaagaggatgatatgtatgamtgtatcttattagttattgtattaattattttctattgccttcagtagtgaaggaaatttttttccctagtagtaagggaaaattttacaattacctctaaaagaaaaacctttaaaaatacagtattcacaggatgtaaaaccttcgtatgtggagggctgacttttcctataagtgcaggttctgaagaagcaactgcaggacttgattatgtgcagatttcagtatccacaaaggtcctgaaaccaatatcctgtgacagcaagggatgactctatctatacattgggtaatcccttctattaacactaccttagatggaatacacattttccttttcacaattatagtgagatttaagaggtctcaaatgttacctgaaaggaactaaaagtaacaaactattcatgcaacatgcttacttatcaccaacataacatacctgacaaagcttatgcctgttatgttatcaaattagcaccttggtgaagggcatgattagaaagcgatctttga

SEQ ID NO: 685629 - DNA, 642 bp, Homo sapiens
acaggtgtgagccacagcacccggcctactaagaagttttaatttcctcacctgtaaaataaagataattcctgcccttgctgctgaatgagattatgtagttcaaagaggatgatatgtatgactgtatcttattagttattgtattaattattttctattgccttcagtagtgaaggaaatttttttccctagtagtaagggaaaattttacaattacctctaaaagaaaaacctttaaaaatacagtattcacaggatgtaaaaccttcgtatgtggagggctgacttttcctataagtgcaggttctgaagaagcaactgcaggacttgattatgtgcagatttcagtatccacaaaggtcctgaaaccaatatcctgtgacagcaagggatgactctatctatacattgggtaatcccttctattaacactaccttagatggaatacacattttccttttcacaattatagtgagatttaagaggtctcaaatgttacctgaaaggaactaaaagtaacaaactattcatgcaacatgcttacttatcaccaacataacatacctgacaaagcttatgcctgttaygttatcaaattagcaccttggtgaagggcatgattagaaagcgatctttga

SEQ ID NO: 685630 - DNA, 963 bp, Homo sapiens
tggaaagttcctcaattgcttctttaaaaaaatgtccttctatgaggctttcaattaaatttaatacacctctgggaaattcagcatttttaacctaagaaaggaaagattctatgattcagagaaaagaaagataaaattttgcaatcaaatcatgaattagtaagaatttattatttatttattcattcattcatttgagacggagtctcactctgttacccaggctggaatgcagtggtgcgatctcggctcacttgcaacctccgtctcccaggttcaagtgattctcctgcctcaacctcctgaatagctgggcctatggatgcgtgccaccacacccagctgatttttgtattcttagcagagacggggtttcaccatgttggccaggctggtctcaaactcctgacctcaggtgatccacttgccttggcctcccaaagtgctgggattataggcgtaagccactgcacccagcctagtaacaaattttaatttcctcatctgtgaaatgaagataattcctggccttgctgctggatgagactatgtagttcaaagaggatgatatgtatgaatgtattttattacttgttatattaattattttctgttgccttcagtagtaagggaaaatactaccwctaaaagaaaacctttaacaggaatttgcagtttggttgataaaaaagagaaagagctacagcgacatagttctttaggtgaaaaattattttttggttttcttttaaacttaaaaatgaactctgttaaaatatcttaaaaatgttaagatatcatcaagcacaagcaatatttgcaaaaagtgaaaactgattgggagaatcataaaatcactctgaggttgtacatttatataactctaagagcttcacaaaatacattccccttggtcaaactattcttaataataaaagtaactaccttgaataatttgag

SEQ ID NO: 685631 - DNA, 1160 bp, Homo sapiens
tgtggtcccagttcccacttctgtatgggtatacgaagctgtctcctacagacacatgcatgcccatcaccagccccaatttctgcagcactgtgtgtccacacagccaatctaaccactgtcaacaatccccaccaccatgtgctagttcatagctgtcccttacagctgcacatgtgcatatttctagcctcggccccaggagctactttatgcacataacgggcctaacccctattgccagccctcccaatcacacatgttcctggaaatggcccttgcagtcatgtacttgcttgccactagccccagtccctgtaacagcctatgcaagccacaggaccctgctgctgctagctatgcatgtgctcacaagtgacccctgctgctatgtacatgcctacagctagccagcccctacaacagagactgtatacactactgtccccagtctccacaaccagtagcactaacccctcattactgatcccagagatgctaccgaagaccccaaaagaccttacagccactgcagacccctgaagcagccctcactgccaaaaaccatgcagatgttgcagactccagctgcttgagttaatgagacactgtgacgccgtggattgagagcctctgcatgmccccatactttgtgtctggtaacacagcacactccagccaggctcccaccccacaggtaagcgtctttccttaccaaagcaatctatgaggtctgtaagaggttactatttatttgaacgtgtagacatctttgcaagtcttcaagagttgtaagaaatcagaaaaacatgacattaccaaaggaataaaataaaattctaataagcaaacccaaagaaatagagttccacaaattccctaagaataattcaaaataattggtttaaagaagctcagttaatatgagatacatataaacaatataataaaatctggaaaacaatacaagaaaaaataacaatttcaagagatataaaacattaaaaaccaaaaagaaattttggaactaaaaaatacagtaactaaaataaaaaatgcagtatattctcacttataagtggtaactgaatgatgggaacataggaacacgggtggggaacaatacaaactgggtcctcttgggagatgctggaggaggg

SEQ ID NO: 685632 - DNA, 1160 bp, Homo sapiens
tgtggtcccagttcccacttctgtatgggtatacgaagctgtctcctacagacacatgcatgcccatcaccagccccaatttctgcagcactgtgtgtccacacagccaatctaaccactgtcaacaatccccaccaccatgtgctagttcatagctgtcccttacagctgcacatgtgcatatttctagcctcggccccaggagctactttatgcacataacgggcctaacccctattgccagccctcccaatcacacatgttcctggaaatggcccttgcagtcatgtacttgcttgccactagccccagtccctgtaacagcctatgcaagccacaggaccctgctgctgctagctatgcatgtgctcacaagtgacccctgctgctatgtacatgcctacagctagccagcccctacaacagagactgtatacactactgtccccagtctccacaaccagtagcactaacccctcattactgatcccagagatgctaccgaagaccccaaaagaccttacagccactgcagacccctgaagcagccctcactgccaaaaaccatgcagatgttgcagactccagctgcttgagttaatgagacactgtgacgccgtggattgagagcctctgcatgaccccatactttgtgtctggtracacagcacactccagccaggctcccaccccacaggtaagcgtctttccttaccaaagcaatctatgaggtctgtaagaggttactatttatttgaacgtgtagacatctttgcaagtcttcaagagttgtaagaaatcagaaaaacatgacattaccaaaggaataaaataaaattctaataagcaaacccaaagaaatagagttccacaaattccctaagaataattcaaaataattggtttaaagaagctcagttaatatgagatacatataaacaatataataaaatctggaaaacaatacaagaaaaaataacaatttcaagagatataaaacattaaaaaccaaaaagaaattttggaactaaaaaatacagtaactaaaataaaaaatgcagtatattctcacttataagtggtaactgaatgatgggaacataggaacacgggtggggaacaatacaaactgggtcctcttgggagatgctggaggaggg

SEQ ID NO: 685633 - DNA, 1160 bp, Homo sapiens
tgtggtcccagttcccacttctgtatgggtatacgaagctgtctcctacagacacatgcatgcccatcaccagccccaatttctgcagcactgtgtgtccacacagccaatctaaccactgtcaacaatccccaccaccatgtgctagttcatagctgtcccttacagctgcacatgtgcatatttctagcctcggccccaggagctactttatgcacataacgggcctaacccctattgccagccctcccaatcacacatgttcctggaaatggcccttgcagtcatgtacttgcttgccactagccccagtccctgtaacagcctatgcaagccacaggaccctgctgctgctagctatgcatgtgctcacaagtgacccctgctgctatgtacatgcctacagctagccagcccctacaacagagactgtatacactactgtccccagtctccacaaccagtagcactaacccctcattactgatcccagagatgctaccgaagaccccaaaagaccttacagccactgcagacccctgaagcagccctcactgccaaaaaccatgcagatgttgcagactccagctgcttgagttaatgagacactgtgacgccgtggattgagagcctctgcatgaccccatactttgtgtctggtaacacagcacactccagccaggctcccaccccacaggtaagcgtctttccttaccaaagcaatctatsaggtctgtaagaggttactatttatttgaacgtgtagacatctttgcaagtcttcaagagttgtaagaaatcagaaaaacatgacattaccaaaggaataaaataaaattctaataagcaaacccaaagaaatagagttccacaaattccctaagaataattcaaaataattggtttaaagaagctcagttaatatgagatacatataaacaatataataaaatctggaaaacaatacaagaaaaaataacaatttcaagagatataaaacattaaaaaccaaaaagaaattttggaactaaaaaatacagtaactaaaataaaaaatgcagtatattctcacttataagtggtaactgaatgatgggaacataggaacacgggtggggaacaatacaaactgggtcctcttgggagatgctggaggaggg

SEQ ID NO: 685634 - DNA, 1160 bp, Homo sapiens
tgtggtcccagttcccacttctgtatgggtatacgaagctgtctcctacagacacatgcatgcccatcaccagccccaatttctgcagcactgtgtgtccacacagccaatctaaccactgtcaacaatccccaccaccatgtgctagttcatagctgtcccttacagctgcacatgtgcatatttctagcctcggccccaggagctactttatgcacataacgggcctaacccctattgccagccctcccaatcacacatgttcctggaaatggcccttgcagtcatgtacttgcttgccactagccccagtccctgtaacagcctatgcaagccacaggaccctgctgctgctagctatgcatgtgctcacaagtgacccctgctgctatgtacatgcctacagctagccagcccctacaacagagactgtatacactactgtccccagtctccacaaccagtagcactaacccctcattactgatcccagagatgctaccgaagaccccaaaagaccttacagccactgcagacccctgaagcagccctcactgccaaaaaccatgcagatgttgcagactccagctgcttgagttaatgagacactgtgacgccgtggattgagagcctctgcatgaccccatactttgtgtctggtaacacagcacactccagccaggctcccaccccacaggtaagcgtctttccttaccaaagcaatctatgaggtctgtaagaggttactatttatttgaaygtgtagacatctttgcaagtcttcaagagttgtaagaaatcagaaaaacatgacattaccaaaggaataaaataaaattctaataagcaaacccaaagaaatagagttccacaaattccctaagaataattcaaaataattggtttaaagaagctcagttaatatgagatacatataaacaatataataaaatctggaaaacaatacaagaaaaaataacaatttcaagagatataaaacattaaaaaccaaaaagaaattttggaactaaaaaatacagtaactaaaataaaaaatgcagtatattctcacttataagtggtaactgaatgatgggaacataggaacacgggtggggaacaatacaaactgggtcctcttgggagatgctggaggaggg

SEQ ID NO: 685635 - DNA, 1489 bp, Homo sapiens
tgaatctttaggactaggacttctgccttagaggacaggctccaaatctctgaccaggatatctagacagtagacaattcttggaatttgggtgggttgttctttcataccaggaaatctgacttcgagctattgaggcaagtagaggattatgggaaataagatggcagaactccaccctttatatgtaatttaggctaggactttagtcttcaagggagtgtaggcatctaagcaacataatgcacaaaagctcagttgtacagctttggcttgcatggcaaggggggtcagaatttactctccacatataacctgcgtacccagaatgcatactagtaaccaaaaggctggtcttatttgttagtgataaaaacccatacaagtcacaagaaagttctacagctgttgctgggaccaggcccatctctaacatttgtgggtctggaggaagaatataaatatggaggcctaattccatatgtctaaatatttaagctattgtcaacataaacatctgttaaataatatgagcccaattgccatccttctatcttggcaaatgtttaaaatgtttttaaatgtgcaaaagattaaatttttatggctgaaagtcatcaaaatataaatactaaatctattatttcatgtatctagttggctaatatagtgatactttacacaaagaagacatacatgacttactgtacatttatactgaaactattaaatttatctttactttcagtctcacaatcagtcattatgttgttataatcagtatttccacaccactttgaatactgctgacaaaaatgccaaattacacaacttttttgagtcattaaaatttcgatttggagaacaattctgtaaaaacagaagcaactggagttgtcaataaaattttaagacaatggctttttaaagtgagctagaaattcattgaaatgatgttaatatgaagaaatataattgttgcaaattgataaaatttttatctatacattttcattacttatgtcacaatttttatcttttatttaaatccatacagtatttaccttattctcttttggaatttcaatgctagaatattagaaagaaacctatgaatactgatatattatcattttttccaaatctctcttcagttgatgccaaaccttgacttcacctggaaaatacgctctctttagagattagtttaagtagtatttgtatgtyaatctgtaatggacatgcagagtcttattatcttgttttaattgggatatcatatttattgggtatatctcaaggaatttctttcaattaaacacatattttctccaaaatttgaaaaatgtatctatttttaaggtattttaaaatgtaaggggaactttcatttttcagatgatgaagtagacgtgctttttcctcactcttccctgagaacacctgaaaatgctggacattatatataaaacaaatgtaataagattct

SEQ ID NO: 685636 - DNA, 600 bp, Homo sapiens
  misc_feature 128: n = A,T,C or G
gaaggagggaaaatcatgacattctgagataaaggaaaattaaggtaactggttgccggcagaattactctaaaagcatggctaaaataagctatctaagcagaacagaaacaacaaaaatgtaattntggaatatcatcgaggaataagaaaccaggttaataaatatatcaatatataaaatagtcttttcttctttgtttgagttttctaatttatgtttaatgattgaagaaaaatatgacactgcttgatgtggttctaaatatatttatttagagaaaatatgtaacacaaccaaattatgaataggggagagtaaagagatgtaaaagaaggtatggtttctacacttcatttgaatagttaaaatgatatatataattaaaattctcctcataacaatattcttttaacctgccagctgatatcggtaattctatgccttgaatctcatttgattaatttgaarctgtaccctttgaacagggtccaaatatttttcaacaattatacacatgtgaattttttatatagtttcttaaagttttatatagttttttaaagtgttgcttttactatttttcttttctccaagca

SEQ ID NO: 685637 - DNA, 648 bp, Homo sapiens
tttataatgtgaattctatctaaatgtcccagttctgtacttagtattaaatgtgatttttctccatccccaatgtcacagctatccccctttcccttaccttggaaactcttcctcccccactgcaatccctgtgaatatatttttctgatttgcagcaaaccatgctattaatttttcgcgtatctttctgttgagcttcacataatcttracgagtttttatagcagagtctgacaaatactactttcttataatgccatcctttcccaaataaattagaggtttctgaaaattactataacaggtatttatttatacttaaataatcaattttaaattgcatagctattaaaaagctctgtgctctttagaatcacccttcccgccccccctccacacacacacacacacacacacacacacacacacacaggttgtataatggcttcactaactcttgaatgaatatctccgaaacaagtggatgccagattctttcccagaggccaggtttcatcatgttcctggttcttacattttagaataggaagctgaatttccctttttatccagaaattatatttacaaaagattattcagataaggatacgactatttgcaaaggacacaaatattttcaaaaga

SEQ ID NO: 685638 - DNA, 746 bp, Homo sapiens
ctactgcatgccacattcacaagtagaatactaaaaatatttaaataaaaatcatgagcaaaaatggcatataaaatgtggaaaaaggggacagaagtaaaagtaatcaaacacattgtttttgaaaaattatcaaagaaaaaacaacgcattaaagatataaagcaatttttttctttgatgactttacaatctttaaggtaaattttaaatacttttctgaaatatttcagatcttatttccttttatgcattaatttactggcaattgtaattgtagatattgagtttattaccatacataatatcatgaatttcaaattccttcaaaaatgaaccttcaaatraaagtgagttttttgaaataaactaactcatggcatcacttcaactcagagacttataaagtctgtggtaagaattattttgattacttttaattaactttgggcctatgcaagttagatatattaacaaaaggatttgattattttaaaaaagataaagggccaccatttggaggaaagtacagattcaaaacaaatcttcttcagtaaataaagggatatgaaaccaaattatttggactctacactgcaatagaaaacaaagaaaagtaataaaatgaattaacttagatcaatgctgatactccagttagccatgtattcttacatattaatttctttccattattccaaaagtgttagcaaatgaatctcattttaaaatatacttgcatatgt

SEQ ID NO: 685639 - DNA, 610 bp, Homo sapiens
ggctgaagccggactgccaagattacaattgctggctctgtccttaatataactttgggcatctttcttcctttctctgcttcatctataaaacgaaaacagtaacaactcccacctaagtgtcgttgtgataactaaatgaaatrgtgtgtgtaatgtgccaaggaatttctggagctaccaagcacttaaactaagttctaactaagtttggttactttcacgttataaaggaatttttaggaatcacctaggcactctcctaaagtctcaaaataacttaatacagtacttctaaggagttcaagtgcctccttatctgggacgccatctcagatgctcttcaaatgaaagggaccctgcaaatgaaagttaactttttccattttttaaataatccttcgcaggaatctgaagcacgcgacactcacgggccattcagctccgcctctccagggaacaagaaggttaactgagtaacgtggtcacggagcaaccccgagtcgctgcggctgcttagtagtcactcaggatggggatggtacaggggaccattaactggcccggcaggaaaagtttcccggtgaggtgacgatggacaagagtcgcc

SEQ ID NO: 685640 - DNA, 1037 bp, Homo sapiens
ggctttttcgatccacctctgaaatgtttaaagtcccataaagaatggaaggactttccgtcacaacccagggtcttgaacgcagagcttggtacttacattctgaagtggattaaataggataacgccttaaaagagattaggtttcagtgtcactaattgtgtgaagtcccgtaacccagtttgagatatatgtgtgtgtgtgcgcgtgtatatatgtatacatctatgtgtgtgtatatgtgtatatatgtgtgtgtatatatattcgtttaacacattgagcctgtagccctttaatggccaaggaacgctattgacgttcttacatgttgtgcacttgttttccaacaactgaattgagtttccttaaaagatgaaccatatttgacattacgtaaacataccatacagaccccaacgaggtatttcttccctcgatttctgctattaatcctcctcataattaaataggacctcttgtactttggatataattagaaaaagccatgaccattttaccgcataaggtgtaaagtctgctcattggatttaagaaaatgcttaagaattttgctatacttggccaggttccaactttggaggagaactggtattcttattgcyaatttgtacagtttaaaactgtcatgaagtactatagccagacacttaaaaacaaaatattaccttcacatctgtgttttctattaccttatttgaacaatctggattcgtggcacttaggtaaatttcaggggttgctgatcggatggcattcacttttatgaaaaccaaggacattttagggatgtcgttttcctcgagattggaccctgatacgaagtaaaactcccattgaaattaaatgttatgtaataatttagacaatttaaattatacttcatgcattgtagagctttctctatatctaattgttttatttttaattagtaggactagtattcttattttaaggaattatgtgtgaaagttgtttatagtatccatcaacttttaaaatgatgcatatgtta

SEQ ID NO: 685641 - DNA, 1037 bp, Homo sapiens
ggctttttcgatccacctctgaaatgtttaaagtcccataaagaatggaaggactttccgtcacaacccagggtcttgaacgcagagcttggtacttacattctgaagtggattaaataggataacgccttaaaagagattaggtttcagtgtcactaattgtgtgaagtcccgtaacccagtttgagatatatgtgtgtgtgtgcgcgtgtatatatgtatacatctatgtgtgtgtatatgtgtatatatgtgtgtgtatatatattcgtttaacacattgagcctgtagccctttaatggccaaggaacgctattgacgttcttacatgttgtgcacttgttttccaacaactgaattgagtttccttaaaagatgaaccatatttgacattacgtaaacataccatacagaccccaacgaggtatttcttccctcgatttctgctattaatcctcctcataattaaataggacctcttgtactttggatataattagaaaaagccatgaccattttaccgcataaggtgtaaagtctgctcattggatttaagaaaatgcttaagaattttgctatacttggccaggttccaactttggaggagaactggtattcttattgccaatttgtacagtttaaaactgtcatgaagtactatagccagacacttaaaaacaaaatattaccttcacatctgtgttttctattaccttatttgaacaatctggattcgtggcacttaggtaaatttcaggggttgctgatcggatggcattcacttttatgaaaaccaaggacattttagggatgtcgttttcctcgagattggaccctgatacgaagtaaaactcccattgaaattaaatgttatgtaataatttagacaatttaaattatacttcatgcattgtagagcyttctctatatctaattgttttatttttaattagtaggactagtattcttattttaaggaattatgtgtgaaagttgtttatagtatccatcaacttttaaaatgatgcatatgtta

SEQ ID NO: 685642 - DNA, 648 bp, Homo sapiens
tcccccttcccttcttgagcatgacgacttcttctcccttatccccagtctcccactcccattcccaagtacccagatatgtggtttatattttagcacttttgatgtatgttaattcacatttaaaaatgtctcaaagagtaaatatctcctattttagagggcacttttgtctcagtatattatttctaaatatacttataaggtttctgacagaagtttatcagtcactgtttgcatctcttcattacaggtggaaccaatttactaaccatggcttcattctgctgacactatcttcaatgtcctgacgaatttcataagttgattctaagcggaagaggttaaagttccttagcaggtagtcatgaagagtcaaaaactgcaaattcaatttgggaagagcaagacaacctgaaaaggaaaaaaasatccatatttcaatttttttttttttttgagacggagtctcactctgtcacctgcacaatctcgtctcactgcaacctccgcctcccagattcaagccattctcctgcctcagcctcctgagtagctgggattacaggcacctgccaccatgcctggctaattttttgtgtttttagtagagacagggtttcactatgttggccaggctggtctcga

SEQ ID NO: 685643 - DNA, 648 bp, Homo sapiens
tcccccttcccttcttgagcatgacgacttcttctcccttatccccagtctcccactcccattcccaagtacccagatatgtggtttatattttagcacttttgatgtatgttaattcacatttaaaaatgtctcaaagagtaaatatctcctattttagagggcacttttgtctcagtatattatttctaaatatacttataaggtttctgacagaagtttatcagtcactgtttgcatctcttcattacaggtggaaccaatttactaaccatggcttcattctgctgacactatcttcaatgtcctgacgaatttcataagttgattctaagcggaagaggttaaagttccttagcaggtagtcatgaagagtcaaaaactgcaaattcaatttgggaagagcaagacaacctgaaaaggaaaaaaacatccatatttcaatttttttttttttttgagayggagtctcactctgtcacctgcacaatctcgtctcactgcaacctccgcctcccagattcaagccattctcctgcctcagcctcctgagtagctgggattacaggcacctgccaccatgcctggctaattttttgtgtttttagtagagacagggtttcactatgttggccaggctggtctcga

SEQ ID NO: 685644 - DNA, 607 bp, Homo sapiens
caccgtcactcacacctgtgagtatcacttcactccaaaatccatctttctttaaatcccagaatccccgggttcttccacaccatggcctgtaattgttctctcgtgagmacttccgatctcagaagatgatgagattgtctcatcctgtttagtttcaatctctcgcggaatctaacacagcgcagggcacacagtaggagcagataaaaacccgctgatattctgtgatgggtgtgacttaccccctcactactcaaactctggtctgtggaccggcattgctgccatgtatggcaaccttttcagagatgcagaattcaggtcccgctccagacccatgagtcagaatctgcattctcctgagatcctcaggtggttcgtaagcacattgaagtttcaagagcactactttaccctacatgcttagttcaaaagaacgcctttttggaagtgacctattttttgacacttgacatgcacacacccaggggcaggctcacaggtggtcaggctgagtcctgatacaggcacttcctactcctccctaaatgagaacgagcctgccttcatccagccccctgactgctgcaccatccactcacca

SEQ ID NO: 685645 - DNA, 607 bp, Homo sapiens
caccgtcactcacacctgtgagtatcacttcactccaaaatccatctttctttaaatcccagaatccccgggttcttccacaccatggcctgtaattgttctctcgtgagaacttccgatctcagaagatgatgagattgtctcatcctgtttagtttcaatctctcgcggaatctaacacagcgcagggcacacagtaggagcagayaaaaacccgctgatattctgtgatgggtgtgacttaccccctcactactcaaactctggtctgtggaccggcattgctgccatgtatggcaaccttttcagagatgcagaattcaggtcccgctccagacccatgagtcagaatctgcattctcctgagatcctcaggtggttcgtaagcacattgaagtttcaagagcactactttaccctacatgcttagttcaaaagaacgcctttttggaagtgacctattttttgacacttgacatgcacacacccaggggcaggctcacaggtggtcaggctgagtcctgatacaggcacttcctactcctccctaaatgagaacgagcctgccttcatccagccccctgactgctgcaccatccactcacca

SEQ ID NO: 685646 - DNA, 607 bp, Homo sapiens
caccgtcactcacacctgtgagtatcacttcactccaaaatccatctttctttaaatcccagaatccccgggttcttccacaccatggcctgtaattgttctctcgtgagaacttccgatctcagaagatgatgagattgtctcatcctgtttagtttcaatctctcgcggaatctaacacagcgcagggcacacagtaggagcagataaaaacccgctgatattctgtgatgggtgtgacttaccccctcactactcaaactctggtctgtggaccggcattgctgccatgtatggcaaccttttcagagatgcagaattcaggtcccgctccagacccatgagtcagaatctgcattctcctgagatcctcaggtggttcgtaagcacatygaagtttcaagagcactactttaccctacatgcttagttcaaaagaacgcctttttggaagtgacctattttttgacacttgacatgcacacacccaggggcaggctcacaggtggtcaggctgagtcctgatacaggcacttcctactcctccctaaatgagaacgagcctgccttcatccagccccctgactgctgcaccatccactcacca

SEQ ID NO: 685647 - DNA, 2556 bp, Homo sapiens
cccacttgctgccttgactgggacaggtgaaggaggcattgcctggccccccatccccagagcctctgcctgtgactgtcccgtgttacggcctctgtggtgtctccacacctcccatctcctggggaattcctctgcattagaaaatggacttggaatacattccttaaaacatgtttttgtatgtctgacatctccttcttcctacagaaagggtaatgattccccattataagaaacccaaactgaaaccacacatcctcacagtcctgagggctcacacacgccccacaacagcatggacgtccactgcacagcacaacaggtgccaagaggagccgtgcctgcccctggcccaggcctcacccccagtacatacacacacacacacacatatactacatacatgcaccacagacacacacacacacacacacacacacacacactgcatctatacatacagaatacatgcatacacatacaccaacagatacatcacaccacacgcacacagatacacagatactgtacacaccacatgtgtatacacacacaacagacacacagatacacagatgctgtacacatgtgcacacttgcacacaccacaggcgtacacatacacacacatcacacagatagatactgcacatgtgcacacatgtacatagacacatgtgtatacacacacaccacatatacacagatacacagatactgtacacaccacatgtgtacacatacacacatcacacacagagctagataccacacatgtgcacacatgtacatacacaccacatgcttacacacacaccacagatagataccgtacacatacacacatgtgtacacacaagcacctacaccgcacacacgtacacagaggcaccgctgtgtgtctgcggatgctgcctggtgatgagggagggcacagcacacaagcccctcacagggaaatgtgctctgggtcaagctccattcactggatcccacggcctggaccacgtcacaggcatctgacaaacaggcactgaaccaggagctctgagtgtgtaaatccctgtgtgagctgcacctgtgtctacccctgccgtgccggtgaccacacactgggtgtctaaagcgatctatatccgtccggagatgcgatgtccaaaacggactccctgggctgaagcacactgtccccaggacctggcttccttctggaggctctggagaatcttcctccccttccaggtcctctcggcgtcttcatccaatccttgaagccctgcaggaacagaaggccgtcccttcccgaggaaggggagccccctgccccacggcccctgagcgggagagagctcctgctggttccagggtcgctgagggcctcacacctgcgcggggatgctggggacttcggctctgtggttgggacctgccagcctccacaatcacacgcgtgcatgcacccctggttctgcgtctctcgagaaccctgatggacaaggggctccctacgcagcggcttcagcctccacagggctccgtggcatcctcctcttcctcccacggctccaggcctcggggacggggagcagcctccccagtgctggtctctgggcatctcggcacccgcctggccgctcacgccacactcacctctaggtgtgggtccctaacggtggggtccggggagacagccgcgccttctttccctaaggccgagcgcagcgccccgccgtgcacaacacgctcctggagctgaatcgcgcaccgcccggaggcggcgtggagaaaccgagcacgggagccagcagcggacgcatcgttcgatgccaaaccgatatgtgggaacggaaaacaaagcgaaagctgccactctccattctctcagagtcttctggaagcttccgtccagcaagtcaggaacccgtgttattacagctctgtaagtccgaatccaggctgatttcaacgtgtctctaaataagatccaacctttgaaggtcaagggctgtgcgctcccctgaggctttgtcaaaccaacatctgcagtttgccgtccagcgcaagtgacgctttggtgacgctaatggacgtggcagtgggacrtgcaggcgggaggctctttccggaggtccgaggagctggcgggtcagaccagagaacaatcagcatccaggcccttcagcccccgaggagcacgaggccagatggatggtttatgaggaacaagcatcgcagtgtgaacggaaacaccatgaatcatttcagaacaactgctagtgactgtccttgaggaaatacatcggaaagcacagttttaacaagctctgaagatgaattaggagccggggccacgggactgagctcagtgagaaaagaacacgcaggaccccggagcaagaggctggagacggcgcatgaagcctcgatggggaaagaggcagtgaggaaaagacacgaagctgtcccaggaggaaggtgacacccggtgctgcacggtggggaggagagcacgggggccagggaaacccagcctctcctgtgggcctgtgcagg

SEQ ID NO: 685648 - DNA, 1699 bp, Homo sapiens
  misc_feature 53, 129, 174, 175, 176, 177, 178, 179, 180, 181, 182, 183,184, 185, 186, 187, 188, 189, 190, 191, 192, 193, 194, 195,196, 197, 198, 199, 200, 201, 202, 203, 204, 205, 206, 207,208, 209, 210, 211, 212, 213, 214, 215, 216, 217, 218: n = A,T,C or G
  misc_feature 219, 220, 221, 222, 223, 224, 225, 226, 227, 228, 229, 230,231, 232, 233, 234, 235, 236, 237, 238, 239, 240, 241, 242,243, 244, 245, 246, 247, 248, 249, 250, 251, 252, 253, 254,255, 256, 257, 258, 259, 260, 261, 262, 263, 264, 265: n = A,T,C or G
  misc_feature 266, 267, 268, 269, 270, 271, 272, 273: n = A,T,C or G
acagcgattttgcctttgataccacacagtctagacaaagactcagagactanaatagaaaaacatttcaacttacacttacatagggactggaggcatcttgtgttatctttagaaagtcacgcaganatggggttggaacaggccacacgtttgtcgacactaccacacggnnnnnnnnnnnnnnnnnnnnnnnnnnnnnnnnnnnnnnnnnnnnnnnnnnnnnnnnnnnnnnnnnnnnnnnnnnnnnnnnnnnnnnnnnnnnnnnnnnnncagagaaggaattctggagtgggttttgacgtatgactaggagtttttcaggcagatgtcgcagactcagagctggaaaaaaaatgcaatctttggcaagaaagaaaaaaaggtattccagtatgactagaccagggttttttcatctgggagtgattttgctttctgggggcaacgtctggagacattttgattgtcatgactggggtgctactaacatgtattgactagaggccaaagatgatgctaagttttctgcaatgcatagaacagtactgtcacaacaaataattatctggtcaaaaatgtcagtagcgtcaaggttgagaaaccctggactgagttattaagcatatacaagggaatagaactgtattatattgagctaagtgtttttgccagtgactctatggtccagagatgttttaaaaataaaatgtctgtggtggaaaacaggtaatacaaatgaggcataagggctgggtaragactgtggcaaattagtgagttcatgccctaaagggtgctattctgttgatttttgcaatatggaaatggattgacagatttaacaaatcttgaaatgttttaaatgaaagcttaagtcaagatttttacataaaatcttttgttttataaatactggcattaaaaacgaattataaatttaaataacaccccgcaaagtcagataaaacaagctttggagccagattgagctcaggggccttcagctggtaatatctgctgtgggcaatgaggacattgtgaaaaaggagtacatgaagacatgaggggctgccacaatctaccttggtttcttccgaagcactgagtttgggcaatgtctgtttcctcttgggatggccaagaaccagggctgcgtttctccctcttcgcaactacagaagcccctttaccaggtgaaggaaaccctggggtttaatcattagaaggtaagacaaagaaggatttgaaatgaaatatttttccttccacatggccagagcctgaacctggggaaacggaatttactcccaaaattaaaagagccattactgctcagcccttggaaattctaaatgagactcacgccctgcaggctgcttttttgttcatattccccagttccttactgagttgtgctgtgtggttgagttctcaaaagagaaagtggctgattgttctagaagaaagaatttccaggcaaaactgagtggacaccccattaattataattactcagattaaggagtgaaaatatgctgttctcactcagaagcaaaatgtgttggcaaatgaatttggaaacaagaaaaatagatgtgaatttctgtcattgataaggcattaaataaaatacagtttattttatttctgtcctggttttaaggaactttctgtgctgatggatttcacccctgat

SEQ ID NO: 685649 - DNA, 1000 bp, Homo sapiens
gagagacgagatgttgacaggattaaagaagataagaaggactgtgaggtatccagagaccagcaacaagaggggctgttagccctgtgagcaagggtcgggacaaggtcagggagctgcatcacagaccccagtgaggacagagccatggaggaaggactgttggcagcagctgagatttctggggtctgcaatggtggccaaaacctcaggaggggagagaaatatccgacctctttgtccgctagtcctgtgacagcctgctggttcctctcattggccacacccaactggaagccagagagcaaagggccygggtgatgcatcaatagaggacggcttcctgggtgcagagcagggcggaggaggggcagagagagcgactgcatggacagacagagctaccaacatggtcactgaaaaccagtcccagaacgcagaggtactaaagagctggctgctattgtctagacaaaatgccgagcttctccatcttctgttatatgaaagattagcaaatgtcggggaagcattaaaaacatattagcacgaaactgtaacgttctcctagacttaaacagagtgacggaaaagtaattgaaaagggatttttatttcctatcagtccatgttaagccgtttccagagaccacttaaattcatctcacttacctggcacagagggtcattggaaatagccaggatcggccgggcacagtggcttacacctgtaatctcagcactttgggaggctgaggtgggcggatcacttgaggtcaggagttcaagaccagcctagccaacatggtgaaaccccatctctactaaaaatacaaaaaaattagctggatgtggtgtcatatgcctgtagtctcagatactcgggaggctgaggcaggagaatctcttgaatctgagaagcagaggttgcagtgaactgagatcacaccactgcactccaggctgagtgacagagcaagaccccatctcaaaaaaaaaa

SEQ ID NO: 685650 - DNA, 1000 bp, Homo sapiens
gagagacgagatgttgacaggattaaagaagataagaaggactgtgaggtatccagagaccagcaacaagaggggctgttagccctgtgagcaagggtcgggacaaggtcagggagctgcatcacagaccccagtgaggacagagccatggaggaaggactgttggcagcagctgagatttctggggtctgcaatggtggccaaaacctcaggaggggagagaaatatccgacctctttgtccgctagtcctgtgacagcctgctggttcctctcattggccacacccaactggaagccagagagcaaagggcctgggtgatrcatcaatagaggacggcttcctgggtgcagagcagggcggaggaggggcagagagagcgactgcatggacagacagagctaccaacatggtcactgaaaaccagtcccagaacgcagaggtactaaagagctggctgctattgtctagacaaaatgccgagcttctccatcttctgttatatgaaagattagcaaatgtcggggaagcattaaaaacatattagcacgaaactgtaacgttctcctagacttaaacagagtgacggaaaagtaattgaaaagggatttttatttcctatcagtccatgttaagccgtttccagagaccacttaaattcatctcacttacctggcacagagggtcattggaaatagccaggatcggccgggcacagtggcttacacctgtaatctcagcactttgggaggctgaggtgggcggatcacttgaggtcaggagttcaagaccagcctagccaacatggtgaaaccccatctctactaaaaatacaaaaaaattagctggatgtggtgtcatatgcctgtagtctcagatactcgggaggctgaggcaggagaatctcttgaatctgagaagcagaggttgcagtgaactgagatcacaccactgcactccaggctgagtgacagagcaagaccccatctcaaaaaaaaaa

SEQ ID NO: 685651 - DNA, 1000 bp, Homo sapiens
gagagacgagatgttgacaggattaaagaagataagaaggactgtgaggtatccagagaccagcaacaagaggggctgttagccctgtgagcaagggtcgggacaaggtcagggagctgcatcacagaccccagtgaggacagagccatggaggaaggactgttggcagcagctgagatttctggggtctgcaatggtggccaaaacctcaggaggggagagaaatatccgacctctttgtccgctagtcctgtgacagcctgctggttcctctcattggccacacccaactggaagccagagagcaaagggcctgggtgatgcatcaatagaggacggcttcctgggtgcagagcagggcggaggaggggcagagagagcgactgcatggacagacagagctaccaacatggtcactgaaaaccagtcccagaacgcagaggtactaaagagctggctgctattgtctagacaaaatgccgagcttctccatcttctgttatatgaaagattagcaaatgtcggggaagcattaaaaacatattagcacgaaactgtaacrttctcctagacttaaacagagtgacggaaaagtaattgaaaagggatttttatttcctatcagtccatgttaagccgtttccagagaccacttaaattcatctcacttacctggcacagagggtcattggaaatagccaggatcggccgggcacagtggcttacacctgtaatctcagcactttgggaggctgaggtgggcggatcacttgaggtcaggagttcaagaccagcctagccaacatggtgaaaccccatctctactaaaaatacaaaaaaattagctggatgtggtgtcatatgcctgtagtctcagatactcgggaggctgaggcaggagaatctcttgaatctgagaagcagaggttgcagtgaactgagatcacaccactgcactccaggctgagtgacagagcaagaccccatctcaaaaaaaaaa

SEQ ID NO: 685652 - DNA, 1000 bp, Homo sapiens
gagagacgagatgttgacaggattaaagaagataagaaggactgtgaggtatccagagaccagcaacaagaggggctgttagccctgtgagcaagggtcgggacaaggtcagggagctgcatcacagaccccagtgaggacagagccatggaggaaggactgttggcagcagctgagatttctggggtctgcaatggtggccaaaacctcaggaggggagagaaatatccgacctctttgtccgctagtcctgtgacagcctgctggttcctctcattggccacacccaactggaagccagagagcaaagggcctgggtgatgcatcaatagaggacggcttcctgggtgcagagcagggcggaggaggggcagagagagcgactgcatggacagacagagctaccaacatggtcactgaaaaccagtcccagaacgcagaggtactaaagagctggctgctattgtctagacaaaatgccgagcttctccatcttctgttatatgaaagattagcaaatgtcggggaagcattaaaaacatattagcacgaaactgtaacgttctcctagacttaaacagagtgacggaaaagtaattgaaaagggatttttatttcctatcagtccatgttaagccgtttccagagaccacttaaattcatctcacttacctggcacagagggtcattggaaatagccaggatcggccgggcacagtggcttacacctgtaatctcagcactttgggaggctgaggtgggcggatcacttgaggtcaggagttcaagaccagcctagccaacatggtgaaaccccatctctactaaaaatacaaaaaaattagctggatgtggtgtcayatgcctgtagtctcagatactcgggaggctgaggcaggagaatctcttgaatctgagaagcagaggttgcagtgaactgagatcacaccactgcactccaggctgagtgacagagcaagaccccatctcaaaaaaaaaa

SEQ ID NO: 685653 - DNA, 3161 bp, Homo sapiens
  misc_feature 802, 1296, 1297, 1298, 1299, 1300, 1301, 1302, 1303, 1304,1305, 1306, 1307, 1308, 1309, 1310, 1311, 1312, 1313, 1314,1315, 1316, 1317, 1318, 1319, 1320, 1321, 1322, 1323, 1324,1325, 1326, 1327, 1328, 1329, 1330, 1331, 1332, 1333: n = A,T,C or G
  misc_feature 1334, 1335, 1336, 1337, 1338, 1339, 1340, 1341, 1342, 1343,1344, 1345, 1346, 1347, 1348, 1349, 1350, 1351, 1352, 1353,1354, 1355, 1356, 1357, 1358, 1359, 1360, 1361, 1362, 1363,1364, 1365, 1366, 1367, 1368, 1369, 1370, 1371, 1372: n = A,T,C or G
  misc_feature 1373, 1374, 1375, 1376, 1377, 1378, 1379, 1380, 1381, 1382,1383, 1384, 1385, 1386, 1387, 1388, 1389, 1390, 1391, 1392,1393, 1394, 1395: n = A,T,C or G
caatgtacagtgtgatgttttagtatgcatatacactgtgaaatattaccaaaatcaagctgattattatgatctgatactttagcagatggcaagtatatgatacatgttagtctgtctactgcagtctctatgctgtacattagcggtccaggactgtttcctcctgcatggctggaagcttgtactgtttgaccaacacctccccactttcccacctgtgttgttcaaaccctggcccagtgtccatctgtgccctggcattgtcctgcagcccgaatgacagtcttgaatgaggcaattcaaatctctgcttccactgacccgttaaaggggggtctgcagattttactcaagaaaaaaatagaaaataccatttcagatgtgaataaactaaccagggcatatggcagaaggaggaagggttacttcagtggtcatggagtgctgctctggggaggggccatttgtgttgagactggatgaggtgaaagagctcaagctgcaaggggcctggggatgggcactccaggtcaggaaacagccagtgcaaaggccccggggcgaggactgagttcagtgcacgtgaggaagaggatgaagagcagtgtggttggagggaggtaggcaagggcaggatgcacagtcagaggtgcttcctcccgtggactttgtctatcaccttacctggggccccaaaggtgccactaaatccatctatgttctctcaacagtttcgaggtgagtttctagacctaggaatgcattaggacttgattctcaaagcagggtccctggacangccacatcggcatcacttgttagaatgcaaattcttgagttccacccaaacctgctgaacagaagctctgggggtggggcccagccacggcaagcctgctgggtagatgagtcacatgtaggccaatgttggagaagcactgaactcagtggagaccagaaggtttttgtctctgtgtttgtttctttgcaatctcacagatggtggctgggactcacacacctgcctctcacccacagttaccagctgagttcatcagtgcagctgtgaaatctgtaggtaaaagctcaagcaagacacacaaggtgaggatgagaccaaagctgctcatcagattgtctgctgtgtctggctggttatggtttaagaaaaaaaagttgccttggatttgttttccctcctccttcccaaaacacacaaagctcctttgcatacactacttgaggtaatcttgcaatttttattaaaaaaaaaaacaacaaaaaaccaaaaannnnnnnnnnnnnnnnnnnnnnnnnnnnnnnnnnnnnnnnnnnnnnnnnnnnnnnnnnnnnnnnnnnnnnnnnnnnnnnnnnnnnnnnnnnnnnnnnnnnctcccagcgtgcactgggcctggctatggctaaaagcagcgtttcccaagcaaaagctgcatcttctcacctgggtgggaatgacaaggtcagacagattccgctggatcccctaaagtcagtcatctacagacattgataaatatttaaaaaatttaatgttgaccaaacttacaatggactctgacaaaacagtatttcgtggtgccaaggctgctggccccacctacaaacatcctgctaaatcctggggccaacgataggcctcatgcattctgttgtcacttatattttgctgtaacatataatgccagctgctggacggagacagacaccgtgtgtaatgtggggaaagtgtcagtctactcctatcttacagtttttctctctttacatcaaaaatgtatgttgggttttatcgaaattgtagttgayatacatctagaggtctcctttactaacacgtttcttaatatgacatcattcttacatgtttgtcaaaaccatttggtgtcattaatgtgttatattatcccacctgacttattattttattggaggctttatggatgagtttaattatttttatgaatgagacttttctttatgatttttcttactatcatttttagatttcagtgcctggattacgttggcttcctaaaattcattaaaatattttttccttttttcccatgttccatttctattactttctaattacatcaaatggaaataaatatccctttaaaaattaaagagggccaggtgcggtggctcacacctttaatcccagcactttgggaggctgaggagggtgggttgcttgagcccaggagtttgagaccagcctgggcaacatactgagaccctgtctctaaataaataaataaataaaaattaatgaatactaaaattaaaggaaaacatcatataaaactctttgggctaaatcttttttggggggatgatgaatgtaacaatatttttattcagtttgaatctttcccacctactcatttgttccaatttttgtttttattttttaaaaaagttaacctacggataccatttactgcttctgttgttttcatttctagaaatacttttctaatctaatcctgctcttttttcttaatttatgtgtgtttaaacatttaggttcaggggtacatgtgaaggtttgttacataggcaaactcctgtcacacaggtttgttgcacggattaattaatccatggaatactaggcagccacaaaaaaaagaaagagttcatgtcctttgcagggacatggatgaagttggaaaccatcattctcagcaaactaacacaggaacagaaaaccaaacatcgtgcgttctcactcataagggggagttcaacaatgagaacacatggacacagggaggggaacatcacacaccagggcctgttggagggtggggagtaaggggaggggtagcattaggagaaatacctgatgtagatgacgagttgatgggtgcagcaaaccaccatggcacgtgtatacctatgtaaccaacctgcacgttccgcacatgtaccccagaacttaaagtctaagataataaataaataagtagatccagctcttttaatcttgccttcatcttattccactacctcgtctcaatgaccatctcttgctttagaaggcctctctcaaatattagctaggcatcttttaacaccggcttgttttctacagggacactttctttccaaactgtacctcttctcaa

SEQ ID NO: 685654 - DNA, 624 bp, Homo sapiens
ctctttytttattcagtcaataataatttatgtgatatctgcttcaggccactaggtcaaacctcctactgagaacaagtagaaaagctgaagaatacgacaacaaaaaaacatgcattaaaggcattagagagctttggaggcacacaggatattaaaaatccaagacgtcaggaggaaggaggcacactccggtgaatccaacattctgagatgttttcctttgggaaccttttgcttctacttctttggtgcgaagcaaagaaattcagaatctgaggagaaggtggtagttaagaggatgctgaacagagttttttacagtctcataagacaaaaattgtagtttattttctaccaagaaatagatttccttgtctattctaataaatagttacatatcctttctttggatctatagtttgtagctgatttttcagctttatggctggcactgcactcaacattcttataaatttttcagagtatttctgtatttcctcacaatggattcttagatatacaatgaatggggcagagagacaggaaatttcaagcctcttttaggcattgtcaaatcatctcccagaaatttgaccccgaccatgattcttcttgagttcc

SEQ ID NO: 685655 - DNA, 1486 bp, Homo sapiens
aatgtaaggtcctctgagtggccgcaccatggtcaagctatcatgacattcccctgcccttgtgataatgtactttgtgatattccctgcccttgtgaatgtactttgtaacgtccatcccctgcccgcaaaaaattgctcctaactccacggcctatcccaaacccttaagaaccaatgataagcccaccacactttgctgactcctttctcagactcagcccacttgcacccaagtgaataaacagccttgttgctcacactaagcctgttcagctggtctcttatacggacgtgagtaacaattaagaaatgtcatatttttccctcctagtctctcagttatgtccttcatttctctgaggagccgaaagtctaatctggacaaagagggtggcaatgaattgttcacagtttgtcttttttgtatactttattttaatgctgttattaatttgtatgctgtacctccaggagatcttcaatttatattataaatatactctgccattgtaattatgcatttacaaatccccactccaggggtrtgctccctgagggtggatgctgtttcaattggttaagagctttatataaaccttctatcactcagaccatggtagaaggtttatataatgctttgtaaggtctgaatcacaacttggcttcctgctcattcactcattcatttattcactctgcacacactgattgcatatcttggttaataatgagcgtcaacttgattgaactgaaggatgcaaagtatcgttcctgggtgtgtccgtgagggtgttgccaaaagagattaacatttgagtcagtggactgggaaaagcagacccaccctcattctcggtgggcaccatctaatcagctgccagcacggctgggataaaaacaggcagaggaacctggaaagactagactggctgagtctcctggcctccatctttctcccgtgctggatgcttcctgccctcaaacatcagactccaagttcttcagcttttgggctctcggaccttcaaccacagactgaaggctgtgctgttggtttccctacttttgaggttttgggactcggactggcttccttgctcctcatctagcagatagcctacgtgggacctcactttgtgattgtgggagtcaatactccttaataaaatccgctttatatatacatctatcctattggttctgtccctctagagaaccctgattaatacaccaggggtgtgctctctgagggcagatgctatttcaattggtttagagctttaccattcagtccacggtagaaggtttatataatgctttgtacggtctgaatcacactgtggcttcctgcccattcactcattcattcgttcactcagcacacactgactgaatatcttatgtgccagactcagcaatgacccaaacacacgattactgccctctcgaaacatactgtcttatagaggcagacttaaaaaaa

SEQ ID NO: 685656 - DNA, 1606 bp, Homo sapiens
cctagatagtcaccattgataatagatagttcaaagtactagtsgggtgtttggcgcctgcaatgctatgatggttaattttaagtgtcaacctgactggattaaggaatacctaaaaacctggaaaaacattagttttttgtgtgtctgtgaaagtgtttccagatgagattagtttgtgaatctgagtggacaaggtgagtaagatccacccttaatatgggcaggcagtatccaattggcttggggcccgaagagaaaaacaacaacgacaacaaacagataaaatgttaatgtgtctatttgtctgcttgaactgggatacactctacctttcttattcttggatgtcaaaagctcagatttcctagcctttgaactcctggattctcaggctttcagcctcagactgagagttatgccatcagcttccctggttccaaggtctttggatttggactgagccatgccattggtatcgcaggatcttcagcttacagatggactgctgtgagacttctcagcatccataattatgtaagccaattgctctaataaatctcctctcatatgtctgtctatctatctatctatctatctatctatctatctatctatctatctatctatgtatctatctgtctatctatccatctatccatcctattctttctctctagagaatcctggctaatacaaatatgtagctgacactgtaactgttaaagaagatactgcccaagcaaagtaaacttgctatgcagaaattgatattgcaaatgccctttttggcatccctctctacttggatgatcagaattcattttccttcatgtggagtgtgtccaatacgcctataatttccttccaaaaggctctataaattttctggctatctgaaatttatgggtagatcaagattcaaaataagtgccacttatgtaggaaacactgacttcccattgtgatgatgacattctcctggtgggcctaggacaccattcaataaggactcgatactcttttaactcacatgccacaatacagttaggccgctaacacagacaaaatacaagaaccgaataagtaaaatttgtgactataatctgggaaagaacattccagagggaatgattgccaaaattttaaccttccctacccaacaaataaagagattggtggagctattgagctactggagttctcacattcagcatgcagggatcttgatggcatccatatacagggctactggaaaaactgctacctttgaacagaggccccgaccagcaggattctctccaagccctccagctggttatccagaatgcccttctgctgctttccacatatatacacttgtcatttgagttacagatctcagcatcctctcagttcaccaaaggcaaaagactgccacaggttagaggtgcccacttggacctataaggaccttgagtcagctaaaaggtacatacttcttaagagataattattggcccattatgggaccttgataggtactaagcacataactaatggccatgaaggaatcttaagactagagatccatgtcatgggtacaaacaagggtctcaaattgcag

SEQ ID NO: 685657 - DNA, 1606 bp, Homo sapiens
cctagatagtcaccattgataatagatagttcaaagtactagtcgggtgtttggcgcctgcaatgctatgatggttaattttaagtgtcaacctgactggattaaggaatacctaaaaacctggaaaaacattagttttttgtgtgtctgtgaaagtgtttccagatgagattagtttgtgaatctgagtggacaaggtgagtaagatccacccttaatatgggcaggcagtatccaattggcttggggcccgaagagaaaaacaacaacgacaacaaacagataaaatgttaatgtgtctatttgtctgcttgaactgggatacactctacctttcttattcttggatgtcaaaagctcagatttcctagcctttgaactcctggattctcaggctttcagcctcagactgagagttatgccatcagcttccctggttccaaggtctttggatttggactgagccatgccattggtatcgcaggatcttcagcttacagatggactgctgtgagacttctcagcatccataattatgtaagccaattgctctaataaatctcctctcatatgtctgtctatctatctatctatctatctatctatctatctatctatctatctatctatgtatctatctgtctatctatccatctatccatcctattctttctctctagagaatcctggctaatacaaatatgtagctgacactgtaactgttaaagaagatactgcccaagcaaagtaaacttgctatgcagaaattgatattgcaaatgccctttttggcatccctctctacttggatgatcagaattcattttccttcatgtggagtgtgtccaatacgcctataatttccttccaaaaggctctataaattttctggctatctgaaatttatgggtagatcaagattcaaaataagtgccacttatgtaggaaacactgacttcccattgtgatgatgacattctcctggtgggcctaggacaccattcaataaggactcgatactcttttaactcacatgccacaatacagttaggccgctaayacagacaaaatacaagaaccgaataagtaaaatttgtgactataatctgggaaagaacattccagagggaatgattgccaaaattttaaccttccctacccaacaaataaagagattggtggagctattgagctactggagttctcacattcagcatgcagggatcttgatggcatccatatacagggctactggaaaaactgctacctttgaacagaggccccgaccagcaggattctctccaagccctccagctggttatccagaatgcccttctgctgctttccacatatatacacttgtcatttgagttacagatctcagcatcctctcagttcaccaaaggcaaaagactgccacaggttagaggtgcccacttggacctataaggaccttgagtcagctaaaaggtacatacttcttaagagataattattggcccattatgggaccttgataggtactaagcacataactaatggccatgaaggaatcttaagactagagatccatgtcatgggtacaaacaagggtctcaaattgcag

SEQ ID NO: 685658 - DNA, 1606 bp, Homo sapiens
cctagatagtcaccattgataatagatagttcaaagtactagtcgggtgtttggcgcctgcaatgctatgatggttaattttaagtgtcaacctgactggattaaggaatacctaaaaacctggaaaaacattagttttttgtgtgtctgtgaaagtgtttccagatgagattagtttgtgaatctgagtggacaaggtgagtaagatccacccttaatatgggcaggcagtatccaattggcttggggcccgaagagaaaaacaacaacgacaacaaacagataaaatgttaatgtgtctatttgtctgcttgaactgggatacactctacctttcttattcttggatgtcaaaagctcagatttcctagcctttgaactcctggattctcaggctttcagcctcagactgagagttatgccatcagcttccctggttccaaggtctttggatttggactgagccatgccattggtatcgcaggatcttcagcttacagatggactgctgtgagacttctcagcatccataattatgtaagccaattgctctaataaatctcctctcatatgtctgtctatctatctatctatctatctatctatctatctatctatctatctatctatgtatctatctgtctatctatccatctatccatcctattctttctctctagagaatcctggctaatacaaatatgtagctgacactgtaactgttaaagaagatactgcccaagcaaagtaaacttgctatgcagaaattgatattgcaaatgccctttttggcatccctctctacttggatgatcagaattcattttccttcatgtggagtgtgtccaatacgcctataatttccttccaaaaggctctataaattttctggctatctgaaatttatgggtagatcaagattcaaaataagtgccacttatgtaggaaacactgacttcccattgtgatgatgacattctcctggtgggcctaggacaccattcaataaggactcgatactcttttaactcacatgccacaatacagttaggccgctaacacagacaaaatacaagaaccgaataagtaaaatttgtgactataatctgggaaagaacattccagagggaatgattgccaaaattttaaccttccctacccaacaaataaagagattggtggagctattgagctactggagttctcacattyagcatgcagggatcttgatggcatccatatacagggctactggaaaaactgctacctttgaacagaggccccgaccagcaggattctctccaagccctccagctggttatccagaatgcccttctgctgctttccacatatatacacttgtcatttgagttacagatctcagcatcctctcagttcaccaaaggcaaaagactgccacaggttagaggtgcccacttggacctataaggaccttgagtcagctaaaaggtacatacttcttaagagataattattggcccattatgggaccttgataggtactaagcacataactaatggccatgaaggaatcttaagactagagatccatgtcatgggtacaaacaagggtctcaaattgcag

SEQ ID NO: 685659 - DNA, 1016 bp, Homo sapiens
gaaggaccaaggtgttgcattcatggcccctcaaacacctgtttttttcttcccctcttgcctccatgcctttgcacaaggtggcccctattcctggactgtctgtcttttctttcccatccctgcagctcctaggtaacttctacttagtgtgcaaggctcagtccagggagcagttcctccaggggcctccctggccttgcgggtgaagtgaagtcctctcacccctgcacacctgatgctctcacagtggctcttgcacacaccaagatgtgcaagatggcagaagtgtttgttcaggggtctacctcccctccagcccagcccaaggagggcagctgctgtgacctgtacttggaatcaggcactctgtacatgtatagtgcatgaggcttagtaactgctgcctgattttctgaggacggtcggttttagtgtcttggaatctcctgggtcaaatgacttttcaagccttccaataggaatgttaaccttctaaccttgatggagtggcaagtgcagggtttgactaagtgacaacacaggcagcttagtaagatgccatgcctggtactcgtcctgtgtagtggaatcagcggctcccacgggaggaacctgctctgtgagcagtgtgaaaatatcatgggaagtcgactgaagtggggaggtgatgtgtgatgagagtgggggttcytgggctggactgcccctgtttgttgataccattagtagtttttgctgtgatcttcggatggatgcactcaaacagcagagacacaggaaggtttggctccttcttgatgaagttaaatgttgtgggtgtgtttccttcactgtgtttaacaatggaacacaatgaaccctgggacctgctgacaatgatgagttgctatggcctggatgtttgtgtccctaaaaaatccatatgttgagtgctaacccagtgtgagggtatcaggaggtggggcctttgggaagtgattaaggcgttaagagtggaggcttcatgaatggga

SEQ ID NO: 685660 - DNA, 664 bp, Homo sapiens
ttcccaaggacccctggctgagagaggaaggccctcctggagaggtcagcccttcctcctgcttcacatcctcagtcaagtcaacaggccagcagaagacgcctttctctctcttcacatctcaggccaatcttgttctcagattcattagaggtgactgtaggcccaaaattaatgcacatttacatcagtttcgattaataggaagtgcaattcaagctggctcaagtaataaaatatctcttgtctctcacactggaaaggtctatggggaagcatgggttcagcatcattaaatcagatttctgtcttccccactacagccctcccagtgctggctgtttcctcagactagcttccttcccagttgcaagagggccaccagcacacagggccatagggaagcccctcccttagccacaaaactcaactcctgatcttgatgctgcctggtcaccccctgtggacaagggagtgccatgtgggaactggctcaggcctaggggagagggacacaggtggcctgaaccagtctctacccttcagcccaatggagacaggcaagatacaggggcaaccaccatgtctgccatgccaccaccttccctgatygtgcaagattattaaaggaaatttttctgattacataaaaaatataaagtgg

SEQ ID NO: 685661 - DNA, 594 bp, Homo sapiens
ggcacggttaatattattgttttatataaatatatactccgaaaggcgtagcatacaatgggaaatcataattactgaattgaattcactgctggatagatgtatcatagttaacttagtgttaagtccaatatttcttgaaatctrcaactataaaaggcatcaaagtaacaaatatttctagagttgggattatgaaattggttgctacgggttggaaggaaaatacaggacataatcctacatgtgctaaacaacttcacatctaaacaatgagtagtacaaatatttttaactctccattaacctgagctttccacttatcatcacctgtctagctttctgatggtaagtcaaaatattttacaatgatttttactttacttgtattaaggttaaaatagccataatttcatagggaaatgcatttttaatatatgaacttgctgcatgattaaatagcttaggtactttattaaattgcttttctatttcaaccatttgagagaggctatttttttcagaatgcagattcaatgctgcattcccacagtatttgctatgcaaacataaccaggtagaagatagaatacg

SEQ ID NO: 685662 - DNA, 621 bp, Homo sapiens
tattgtggtaccttccatttttgtttatcattttgttttagttaggaaagtttctattgagggatcttgcagctcactggttgtttccttggccatgcctagtctatcagtgattgcattaatgacacttttcatttctgttgctttttttattattatttctagcatttccttttgatactttcttagcatttcaacctttctgtttatataactcctttgttcttccatgttgttagcttttccaaaagaggcatttacatattagtcatagtaattttgaatcgcctgtctggtaattccaattctgatgtttgctttgtcttttgagactaagctttgttttacctttagcatactgtattaattagggttctctagagggacggaactaataggatagatgtatagttagaggggagattactaaggagtatttaatcaygtaatcacaaggtgaagtcccacaataggccatctgcaagctgaggagcaaggaagctaatccgagtcccaaaactccaaaagtagggaagccaacagtgcagctttcagtctgtgatcgaaggtctgagagcccctggcaaaccactggtgtaagtccaagagttcaaaagctta

SEQ ID NO: 685663 - DNA, 654 bp, Homo sapiens
tttattgatagtttctcttgtgcagaagctctrtagtttagttaaataccactcatcaattttgttaacaaaatcaacaaattggcaattggaggagttgcaattgcttttcacaacttatcacaaatctttgttaaggccgattttcagaacagtatttcctaggttttcttctatggattgtattgtttcaggtcttacatttgagtctttaatccatgttgagttgatttttgtgtatggtgaaaagaagggctccagtttcagtcttttgcatatggctagccaattatcccagcacgattattgaatagagaatcctctccccactgtttgttattgacaactttgtcaaagatcaggtggttgtaggtgtgtggctttatttctgcattctctgttctgttccactggtctatgtgtctgtttttgtaccaatactgtgctattttgattactgtagcctaaagatttatcacagctgtttcccatgggggtgtggttgagaaaagtgttttgagctgcatttgggcatgattgatacctgctccttttgatctggatgatctagagggcattttcactgtttgagactgagtactatgatgcctccagctttattcttttgcttaggattgctttggtgattctggc

SEQ ID NO: 685664 - DNA, 654 bp, Homo sapiens
tttattgatagtttctcttgtgcagaagctctatagtttagttaaataccactcatcaattttgttaacaaaatcaacaaattggcaattggaggagttgcaattgcttttcacaacttatcacaaatctttgttaaggccgattttcagaacagtatttcctaggttttcttctatggattgtattgtttcaggtcttacatttgagtctttaatccatgttgagttgatttttgtgtatggtgaaaagaagggctccagtttcagtcttttgcatatggctagccaattatcccagcacgattattgaatagagaatcctctccccactgtttgttattgacaactttgtcaaagatcaggtggttgtaggtgtgtggctttatttctgcattctctgttctgttccactggtctatgtgtctgtttttgtaccaatactgtgctattttgattactgtagcctaaagatttatcacagctgtttcccatgggggtgtggttgagmaaagtgttttgagctgcatttgggcatgattgatacctgctccttttgatctggatgatctagagggcattttcactgtttgagactgagtactatgatgcctccagctttattcttttgcttaggattgctttggtgattctggc

SEQ ID NO: 685665 - DNA, 684 bp, Homo sapiens
ggtgactctgcaagtccctagagatcaataaccatagaaaaggcttggtaagcacctcctatagccagacactattrtaagatcttcacagccaccccatgggctaagcactcctattactcctgtttgatagatgaggaaaccgaggcacggagacagcatgtgatttacccaagcctcggagctggcggctggagcctggatctgcggtcaggctggcagccgtccatggtcttcacctgcactgctttgttgtgattctaggtcacggactttaacaatgcacgtgtttatgaggttcagtttccacattttaaaggcatataaatataattatttaagtacagaagagcatttcacaaagcttgtctccttgaccaaactccagttggacttctgagtttggtccaactatgcctatccgtggatgtcaatcaagaaaaatgatgagacaagtctcaatcattttaggagatttatttgccaaagtttgacttgcgcccgggagacaggtctaggcctttttctgaaggtgattttgagggctccgaatttaaagaagaaagaacaggatattgagaagtacacaattttcatgtgagggggatggggaaaaatatgctcagtgaatctgcatttttacataagataatatagacaaatgaggcaggggaacaatcagat

SEQ ID NO: 685666 - DNA, 618 bp, Homo sapiens
agccccaacagtcaggatgataaaaatctaattcccatacagagaattagaggaggttgatgttcggaaatcctcagcccttctcagtgcacggtgggaggaacactcagggaatggcagctactactgataaagagtacgtgtaataaaaygtcacagaagcgggagagcttggccctaatgctggcatcgcagctgaatgcagcccccatgactgaggaaaagtaactgctgagccagaggagaggcagaggagacgtgaccagcagaaaacacccacacctgcttctcaaatgtgatctctgtgctcatcctacagaggtgagagacacagtgactcattaaactcctaagctagttttacggaaaaaacccttaatttcaaaaactcgtataggccaagtctgcattaaacaaatacaacgtgtgaaaatgaagcttcattgtttgtaaaattttatttcataaaatagcttgacacagaaaacctttaagcacatatcctacagaactcaaaggagtcctttcttagagaaaacaggttcctacacacagtttagttctatcagtggcttaacataaatgtctgtgtacacaaaacctgtctgatgattttaa

SEQ ID NO: 685667 - DNA, 1072 bp, Homo sapiens
catatttgacaatggagtggatattataccttttaagaataggtcatttgtgtctttccaaagtctattgaatggtcaatggtgaacttaaatgagtattgttgccttatataatagaggtcaataatttaaggtcatatttatccagaactaagtgtgactttaaagtctaaagatccaggcattcctgtaagtgcaaagaaagagaacatcttacttcatttttcatcctgagttacacatgaaacttagggcagaaagaattttaaggatgcttcttattttgcaccaggactatagagagaactgtcttatcacaagtaaattttggcccctacccttcttatttctagctctatagatgagggaggtagatagagaaatttagattttcaattcaatatttatttaaaattagacatcataatgtctaaaattatatggtgactttcatttgcaaaatgatttaacacatatctcacagaagatagatttaaaatactagcaaacacacttaacacttgcataagttgttagcaatttgaaagaacttgttgtaactgtaagaagttttgtataagcctcatggtaaccacaaagcaaacatctatactagatgcacaaaaaatgaaaattagggactcaaagcctacctatagagaaaaattacctaatcacaaaggaaaacagcaacagaggaagaaaggaacaaatcttctataaaacaaacagaaaacaatgaaaaaaatggcagtagtaagtccttaaagatcaataattacaggccaggtgcagtggttcacgcctgtaatcccwgtactctgggaggccgaggcaggtgggtcacctgaggttgggcgttcaagacgagcctgaccaacatggagaaaccccgtctctactaaaaatacaaaattagccgggcaaggtggtgcatgcctgtaatcccagctactcaggaggctgaggcaggagaatcgcttgaacccaggaggcggaggttgcagtgagccaagatcgtgccattgcactccagcctgggcaataagagcaagactctgtctcaaaaaaa

SEQ ID NO: 685668 - DNA, 601 bp, Homo sapiens
agtaaaataaaattttgtctgtgtgtatattcattttctttccacttgctgraaatgaaatcaagtccaagaaagaataatattgaagctaaattgattattgcatatacaaagttattccaattgctaaaagtaatttcaggagtatgtttgagtaatgaatgtctctctttttagcctgactatatccataataaaatatcactaaacatatctctattaatgcattttcttcttaaaagattgaggaattaaactggatgtggttaatgaaacttactttaatccatcttgtaaaacacactgataaaaatctgttaaattcctcatttaaaatatcacacgtatttcatttagctactacgctcctgaactttttattcacaaactaaattaaaagtaataataaattaaactagtctatagctttaaaagaagaaaactaatatgattttttgttcagttcccatatgttcttaagtattgccgtttgtcataaatttcatgttttccttaattaactctataaataacatattaaagtgaaatacttgatgaaaattaaaattaaggacttgtaaaagctatacctgtctaacgg

SEQ ID NO: 685669 - DNA, 904 bp, Homo sapiens
tcttggaccaaaaaaaaatatgttatcatgtgttcttttcataaatgtttctttatttcagtaaaaaaaaaaaaaaaactattaatttcaatgatgaaaacaaggtaacacattaaattacggaatgccatacaaagggggtattatttgtcagttttaatattatatatgcgtttctaggagacagaaatatttctgcttcagttatgtttattttactgcactgttccatacaagaatacattgcagggttaacagtttttaaagtgactcacaattttgtgcacatctctgctatattattgcaatctgcattctgtttaagttttaaatttaaaaataattgcttcttattaaaatctcccacattgcattattgctggtcatgcagaaaattactttgctgcaggaaacaaaactatccaatataatcttttctccttatagcagaggagataattggattaatcacaagtcaaaatcttggaagtagagtacttggttggctaaactgagccatgcctgttggcgatgatagatgatagagattcgataacgctagataatcragtgaagctagtcaccatgataatgattattttttaaaatactggaatttgttaattatccaccaaatatgaggagaagctggacttgccctttgagggaactagttgccttgttaagacatcatcatatatccacgtccacttaggcaacttgctcctctgcttatctagaactattctgtcaatgttgaaagcttgtgatgaagtagaggtctctcatattgtgaatcttagcgatgattactgcaaatgttaatttttttgctaaatttttcttctttttcttctattaagccaattcaaagtgtgatatatttcttgaaactgtcttacag

SEQ ID NO: 685670 - DNA, 904 bp, Homo sapiens
tcttggaccaaaaaaaaatatgttatcatgtgttcttttcataaatgtttctttatttcagtaaaaaaaaaaaaaaaactattaatttcaatgatgaaaacaaggtaacacattaaattacggaatgccatacaaagggggtattatttgtcagttttaatattatatatgcgtttctaggagacagaaatatttctgcttcagttatgtttattttactgcactgttccatacaagaatacattgcagggttaacagtttttaaagtgactcacaattttgtgcacatctctgctatattattgcaatctgcattctgtttaagttttaaatttaaaaataattgcttcttattaaaatctcccacattgcattattgctggtcatgcagaaaattactttgctgcaggaaacaaaactatccaatataatcttttctccttatagcagaggagataattggattaatcacaagtcaaaatcttggaagtagagtacttggttggctaaactgagccatgcctgttggcgatgatagatgatagagattcgataacgctagataatcgagtgaagctagtcaccatgataatgattattttttaaaatactggaatttgttaattatccaccaaatatgaggagaagctggacttgccctttgagggaactagttgccttgttaagacatcatcatatatccacgtccacttaggcaacttgctcctctgcttatctagaactattctgtcmatgttgaaagcttgtgatgaagtagaggtctctcatattgtgaatcttagcgatgattactgcaaatgttaatttttttgctaaatttttcttctttttcttctattaagccaattcaaagtgtgatatatttcttgaaactgtcttacag

SEQ ID NO: 685671 - DNA, 904 bp, Homo sapiens
tcttggaccaaaaaaaaatatgttatcatgtgttcttttcataaatgtttctttatttcagtaaaaaaaaaaaaaaaactattaatttcaatgatgaaaacaaggtaacacattaaattacggaatgccatacaaagggggtattatttgtcagttttaatattatatatgcgtttctaggagacagaaatatttctgcttcagttatgtttattttactgcactgttccatacaagaatacattgcagggttaacagtttttaaagtgactcacaattttgtgcacatctctgctatattattgcaatctgcattctgtttaagttttaaatttaaaaataattgcttcttattaaaatctcccacattgcattattgctggtcatgcagaaaattactttgctgcaggaaacaaaactatccaatataatcttttctccttatagcagaggagataattggattaatcacaagtcaaaatcttggaagtagagtacttggttggctaaactgagccatgcctgttggcgatgatagatgatagagattcgataacgctagataatcgagtgaagctagtcaccatgataatgattattttttaaaatactggaatttgttaattatccaccaaatatgaggagaagctggacttgccctttgagggaactagttgccttgttaagacatcatcatatatccacgtccacttaggcaacttgctcctctgcttatctagaactattctgtcaatgttgaaagcttgtgatgaagtagrggtctctcatattgtgaatcttagcgatgattactgcaaatgttaatttttttgctaaatttttcttctttttcttctattaagccaattcaaagtgtgatatatttcttgaaactgtcttacag

SEQ ID NO: 685672 - DNA, 904 bp, Homo sapiens
tcttggaccaaaaaaaaatatgttatcatgtgttcttttcataaatgtttctttatttcagtaaaaaaaaaaaaaaaactattaatttcaatgatgaaaacaaggtaacacattaaattacggaatgccatacaaagggggtattatttgtcagttttaatattatatatgcgtttctaggagacagaaatatttctgcttcagttatgtttattttactgcactgttccatacaagaatacattgcagggttaacagtttttaaagtgactcacaattttgtgcacatctctgctatattattgcaatctgcattctgtttaagttttaaatttaaaaataattgcttcttattaaaatctcccacattgcattattgctggtcatgcagaaaattactttgctgcaggaaacaaaactatccaatataatcttttctccttatagcagaggagataattggattaatcacaagtcaaaatcttggaagtagagtacttggttggctaaactgagccatgcctgttggcgatgatagatgatagagattcgataacgctagataatcgagtgaagctagtcaccatgataatgattattttttaaaatactggaatttgttaattatccaccaaatatgaggagaagctggacttgccctttgagggaactagttgccttgttaagacatcatcatatatccacgtccacttaggcaacttgctcctctgcttatctagaactattctgtcaatgttgaaagcttgtgatgaagtagaggtctctcatattgtgaatcttagcsatgattactgcaaatgttaatttttttgctaaatttttcttctttttcttctattaagccaattcaaagtgtgatatatttcttgaaactgtcttacag

SEQ ID NO: 685673 - DNA, 904 bp, Homo sapiens
tcttggaccaaaaaaaaatatgttatcatgtgttcttttcataaatgtttctttatttcagtaaaaaaaaaaaaaaaactattaatttcaatgatgaaaacaaggtaacacattaaattacggaatgccatacaaagggggtattatttgtcagttttaatattatatatgcgtttctaggagacagaaatatttctgcttcagttatgtttattttactgcactgttccatacaagaatacattgcagggttaacagtttttaaagtgactcacaattttgtgcacatctctgctatattattgcaatctgcattctgtttaagttttaaatttaaaaataattgcttcttattaaaatctcccacattgcattattgctggtcatgcagaaaattactttgctgcaggaaacaaaactatccaatataatcttttctccttatagcagaggagataattggattaatcacaagtcaaaatcttggaagtagagtacttggttggctaaactgagccatgcctgttggcgatgatagatgatagagattcgataacgctagataatcgagtgaagctagtcaccatgataatgattattttttaaaatactggaatttgttaattatccaccaaatatgaggagaagctggacttgccctttgagggaactagttgccttgttaagacatcatcatatatccacgtccacttaggcaacttgctcctctgcttatctagaactattctgtcaatgttgaaagcttgtgatgaagtagaggtctctcatattgtgaatcttagcgatgattactgcaaatgttaatttttttgctaaatttttcttytttttcttctattaagccaattcaaagtgtgatatatttcttgaaactgtcttacag

SEQ ID NO: 685674 - DNA, 664 bp, Homo sapiens
tgtcttggttttcttctttcattctgttcttgttcaaccattgtgaatagtaattggcaaacggaggaaaggatttctttttaagtcagaggcttcaaaaattaagtctcagactggatgtggcaatcaaatattgagaaacatgttattcccaaagatttaaacatttaaaataaaatagggtataataaatataaaattccttttatcccaaacattattcaaaaataaaaatactaatgagtacacaragatttatgaaatgatcgtctattgcatgtgagcccaacataatttctacttatctatctacagtctatgtgtatttgtaggccttatcataacaactaatgggacatttgagtaatattaatttttccacccaatataggatttgtaaaactaaagagttttaatagcaagataagccaatctttaattaaaaatcaatgaatcacatcttcagaagaattttcatgcttgcttttatgagaaaaataactctttagtaagttttattttgcttttgtttttgtcaaataaataaattcaatgtcatcttaaaaattaacatacaaactgtggctgccagcatctgtttcctctatctcttctaattaattttattatatttaatttttagttattgtaacatatgcttaat

SEQ ID NO: 685675 - DNA, 828 bp, Homo sapiens
cattggttttatcactgaaacaaagactgggaagttgtatagggttaattaaaaggagaatctaatcagatacagttggtgaatcctggaatggattgtggaggccatttaatgatctttctaaatataaggccagctgactttgtgtctactttgttagaaagaaaaggaaaagtaagaaagataatttttattagagtcaaaatttgtattcctgcattagccataaacccagaaaataagctactgttcrtggaaaaaccaaacactgtaaaatagttaaagaggtttattctgagtcaatatgaataaccatagcccaaaagaacagtctcgaaaggtcctgagaaagtgtggctgaggcaggtgggttacagcttggttttgtacattttagggagacaggaattacaaagacataaaccaatatatggtaggcatacattggtttggccccaaaagatgggacatctagaagcggtaggatgcagggggtagagtgttacaggtcatagattgattcaaatatttttgattggcaattggttgaaagacttagctttgtctaaaaaattgaagccagtgtaaagaaatgcgtgcattaagataaagggggctatggaagccaatgttcttgttatgtagatgaagcctctaggtagcagccttcagagagaatagatgataaatatctattttcaggccttaaaaggtgtcagactcttaacctctcctagatccaggaaaggccagaaaagtgtaggcctggctgcattaatggagattctctacaggtgcaaatttcccccacaaaagatggctttgcat

SEQ ID NO: 685676 - DNA, 366 bp, Homo sapiens
agagactcttgttagttcccataatgccccgacagtgtttttattttaaaaagtttcatttgagggcctggtgcggtggatcatgcctgtaatcctaacaccccgggaggccaaggcagggggatcacttgaggccaggagtctgagactagcctgggcaacatagcaagactccatctctatttatttatttttttaatgtaaaaaagtttcatttgattagaaagttgaaagaattgtgtttgtgattatttgtttaaaaacaagygcagggcaggcacagtggctcacacctgtaatcccagcactttgggaggccgaggtaggcagatctttgagcccaggagttcgagactggcctcggca

SEQ ID NO: 685677 - DNA, 583 bp, Homo sapiens
gtgtcatttctcaaggttattgttttgaaagttcctttggatctatggttctgtgcagttgtttaaagtcagtctttttatcttacaaatggaaataggataaatttctctttctcacccaagtatatggtaaatcacatatctatatcttttgtttattaataaaaactattaggatgaaagacatkctatttaatgactgaagttttaaagtttataaagtagatcagtatagaggggcacagcagatgggaagaatactgataagacagcatggtgttgatgtggctgctcccaccaggcatcagcagtctttgaaaatccatttaattcaccgggcgcgtggctcacgcctgtaatcccagcactttgggaggccgaggtgggcggatcacagggtcaagagatctagacgatcctggctaacacggtgaaaccccatctctactaaaaatacaaaaaattagctgggtgtggtggcgggcgcctgtagtcccagctacttgggagggtgaggcaggagattggcatgaacccgggaggcagagcttgcaatgagccgagatcacaccactgcactcca

SEQ ID NO: 685678 - DNA, 630 bp, Homo sapiens
catcctcatagatgaagtaacccaagtttgttgatgatttttttcctcttgaatttggtaaaatgctattttagaaaaattcattaagaggaaagtagtgggttattaaaattttactattccctggactcatttaagtgaaaaaatattttaagaatttgtgaaatatggttttcagtgttagtatttctgataacttayccttgaatacagtgtaaagctcagctgtattgtactgatctctgggtttttttattcttattttttattgtttattttttttttgctgttgttgtttttgagatgcggtcttgccctatggcccaggctggagtggcgtgatctcgactcactgcaacctccacctccccggttccagcgattcttgtgccttggcctcctgagtagctgggattacgggcgcccacgaccatgtgcgactaatttttgtatttttagtagaggcagggtttcaccatgttgcccaggctggtcttgaacttctgacctcaggtgatccgcctgcttcggcctcccaaagtgctgggattacaggcgcgagccaccgctcctggccatactgatctctttggaaagaggatttgtgttaatataaacaggttccagagg

SEQ ID NO: 685679 - DNA, 552 bp, Homo sapiens
agcctggtgacagagcgagactctgtctcaaaaataataataggcgcagtggctcacgcctgtaatcccaacactttgggaggccttggcgggcagatcatgaggtcaggagatcgagaccatcctggctaacatggtgaaaccccgtctctactaaaaatacaaaaaattagctgggcgtggtggcacgcgcctgtaatcccagctactctggaggctgagacaggagaatggcgtgaacctgggaggcagagcttgcagtgagcctagataccaccactgcacaccagcctgggtgacagagtgagactccgtctcaaaaaaaaaacacamaaaaaaaaacaaataaataagataaataataataataatagtgttttctccatgacgtatagctactgaagttttaaagtaagtaattactggctgggctcagtgactcacacctgtaatcccagcactttgggaggcccaggtgggtggaacatctgaggtcaggagttcaagaccagcctggccaacatggtaaaaccccatctctactaaaaatac

SEQ ID NO: 685680 - DNA, 2944 bp, Homo sapiens
  misc_feature 837, 838, 839, 840, 841, 842, 843, 844, 845, 846, 847, 848,849, 850, 851, 852, 853, 854, 855, 856, 857, 858, 859, 860,861, 862, 863, 864, 865, 866, 867, 868, 869, 870, 871, 872,873, 874, 875, 876, 877, 878, 879, 880, 881, 882, 883: n = A,T,C or G
  misc_feature 884, 885, 886, 887, 888, 889, 890, 891, 892, 893, 894, 895,896, 897, 898, 899, 900, 901, 902, 903, 904, 905, 906, 907,908, 909, 910, 911, 912, 913, 914, 915, 916, 917, 918, 919,920, 921, 922, 923, 924, 925, 926, 927, 928, 929, 930: n = A,T,C or G
  misc_feature 931, 932, 933, 934, 935, 936: n = A,T,C or G
ctaaaccaataaggcactaattatatgccaagcacagtattaagagtttaatattatcagtccatttcatcttcatgaagcagatactattagtagtattattgccattttacagatgaggaaactgaggtgcaaagaagtaagtggctcatgccccgtcacacagctgctgagtgtctccaatgattaaactcagtccagctccagggtctgcattgagtgcaccctagatgcctctccatgtgctgcagagaacaaccccagctgcagcgtgatcccgcatttaggtgcccagatgttagagaaggaagaacatgggaaatggtagggcaagcttcaattctggctccgacaaacaatctcagagaagacctcggaccatatggcggttgtaaaataaacaggttgtacagacaagagccttttcttttatgtgatcccccaagacccaggccaggactgttggagcagacgccacctctgcaattatcgggagaagcccttgaaatggcctttccacamgtgcttcagagaagcaattggcaaaatcatcactacttccttgcatgagagacataggaaaacgtcttgaccaggactcaggttgccatcaagcactcgggcttcaaactctacctctttcttttagtcatctgcagcaagctcaatgtggtgtcttttccatctcaggcacaatataaaacttaacctggcaaatacaaagcatgtccccagagtgctaagtcactatcttatagccagtgccccagaatcacagagagacgaatggtgatgtcttttgggtggtggaagacaccacagagatggggatcctcnnnnnnnnnnnnnnnnnnnnnnnnnnnnnnnnnnnnnnnnnnnnnnnnnnnnnnnnnnnnnnnnnnnnnnnnnnnnnnnnnnnnnnnnnnnnnnnnnnnnttagatcagtgttttataaatgcagcttatttaaaagcaaatttcctaagtgcgttatttctccttcctctgtctccagccggtagaagaatagtgtttcagttgttggcctttaacaaagccccataacatgacctatagtgagaaatttatgtgcgctctctcacaattgaaggtatttgaaattcagggtttatttctctttaccaagggctgaatttactctagttataagattagctaaataaattttggtttcaaaaaaattacttttgaaaacactggatatggctgaagatcccttgctttgatatttgagaggaatgctagggtgataatggttcccaggagacctgccccatggaccctacctccttcatcttcagccccaggatccagctctggacaaggattagcggcttggaatcagagttgttctccagtggcagcctagtttgccaaacagcttttgcctttctccatgtcgaagccccataacccttagtaatatctctcaaaaccaagattgcagagcatactttggggaaggcagctgtggaggagatgcagtcatggttgatgtttcctagggcgtgtaaactctgatctggagctagttacacctgccccatccatgtagaggacatagcatggcgtctggcacccaaacaatgtccaaatcaccatctgcatgggtcactgtgatggcccagctggagccaccatcgactgagaaggacactctgcacttggaggacaggtctgccacttcctccaggcttgtgtccactggcctgagtttcctgtggatgctcccctgccccttggggaaagacaccaggaggtgccgctactgaagccctgtggtctgatgagaaccacatttgttctgacctgcagtgagtgactctttgacgtggggcttttaccttcctgtgggccttgcaaccagaaaattgagaaggaaactccaacacagttttgctggatacataaagagcttggaagtcaccattcccatctttacggtaagaaaaagctggatgaactgaaaatcaacaacttttattggacccatcagagaactgaggtctcaaggcaaaccaccatcctgaaatctggagacatgggggtctccagggagatataggcagtgagatttgtttacgtgaagcagaaagcactgactaagccagtaggaacattaaagtagaaattttaacgaactgtggaatctgcatgtgagataccaagggagaagcttctgggaagcacagccttttgcaggcttttcttctaggaatcttgacaggatcaagatggatccagagggaacacccttctttccatggccctgatgagaggaaaaacacagtaactgttatgtaatccaaccaggaatttcttgcttacagaacaaaaaccttcatcttgggaaggacattgccagaaagccactatgacatgccatccaactagtgaaagggaactccaccccactccagcctcactacagtactcctgtatcacttaaggaacaaaaagaaaaagaaagccttaaactatgggagagacagcttcaaagacacagagtaggaatggtgcagtcagggatggggggaacagagggggaagttccacccttgaaagagggagagaaacagttgtaaaggccacacccctgagacatagacccactgtgtagggcaaagactgaaatataatctgaagggtagagaacattcccctcctccacgctctgccaccatgttatcaggcctccaattacaataatagtagatcacagctgggagagtggtcacaggcagattctcaatgaggagctgctcaaagagaagggccaaagctagagaggagacaataataatttggttcaacagtgccagtccccccaacaacacagttcaaatactgtatattaacagtgagtaatttcataatgtgcgaacctcactgctggtgcttcagtccacagatcactacgtaa

SEQ ID NO: 685681 - DNA, 764 bp, Homo sapiens
acatacccatatgtatctttctaactgccaggaaactctaatgcaatgtattatcacaacaggttgcctaaaaaatggtcagtgacaaatttctaaagagtatttgctctaaagagaatctcagcaagagatagtaaactaaagcctttttaaaatgtaataatttaagatagtctatacatataagcatttataaagataatatattgaaaaaatcacaaaacacaaaagtatatagaaaattatataaaattcactgtaattctattatccaagagacatgacgaatgtgttgctacagttgctttttatttgtaacatatctgaatgtgtattttttaaagtagcaacattactgaatatatttttaaactatgaacttttttctcttttacattgtactaggaatattttttcataataataaaatatacttttaaaaaacctagtctttaaagactagacaaatggtttgccacctatttaatcaatgcagttattctattttgggaaatgtcagttgcttacaatttactattataaaaaatgccacattgatatacatgatatcaaaattttcctgaataatttatyatttgtaaaggttgaattactgaatcagggtacatgtttttcataaggagtatataaatttaatattccactaatttaatgtaaattagtctattaagtaggtataaatgatatatttctttggattttgcatttctttcttttattccaagtaaatgtgaaaattttta

SEQ ID NO: 685682 - DNA, 627 bp, Homo sapiens
tgcctttamacacatatatcctcacgcattcttctgaaagtactttaagtatttcagttcatttaattgggttatgtaaaataattaatgtgtggctaaaatttctagtggctgaaagctattatagttttctagtggctgaaagccattatagttttaattggcctaccctcactaagttttaaaactataagtcagttttaaaacttatttaaagccatcatagctttaaaactaagtgaggataggccatttaaattagtaaggctgtgttttcatcagaaatcaaacaggtgttgaaatcttgattgtataatatacacatttttaaaaagtcttcagtggcttgaaaatttcactttattttaatgttttctataattacaaagtaattaaaataataaaaataattgttataatttgattttttatagctcaccaaattccctaatgatattgtttttttcctctttggaggaaagtttgtattgctatttataataaatgtataacttcacacatcttataattgaaataaatttaaatggattatgactttactagatccttctcaacacaaggaacacatcttagttcacaagggaaaaaagaatagtgaaaacccaa

SEQ ID NO: 685683 - DNA, 602 bp, Homo sapiens
ttccatgaaagccaattataactactgttatatagtcagttattaactcatcagtatgacagggaaatcttttcatgtttatacaagtatttataacctgaccttaattatagctgcataatagtctattattaattacttaattatttaatctatcttccgttgttaaaattttgcaaaaacaaaaagataaagcaagtttgaacactcatcaaattacttatgttagatgaattttatacctttaattatctcatttttaaaatcttttttatgcagtatgagtttctttaaacaaaaaacacacttctatttaacctatacttattagttacaattacatgtgtgattggtattagttttctatcattttcaatatyttatattcattttgctttcttactttttctttcttcctattttttcccaaattgataatttttttccatagtttttctctctttataatttttctgtattgcactcattttcaagcatggtgctagaatttcctgcactgtttttatctaaaagttactctgatagttcattttgtactagagcctgctctggatagtttaatttaacgacatcttgaatca

SEQ ID NO: 685684 - DNA, 1132 bp, Homo sapiens
tcacttccctctccttccctcaagcagagggtatctgtatccatgctgtgcagcctaggattgggtgagggttgaggtgggtaatgtattgctaccatcagctactaggatttctcacatggctttcataactcttctgtaggtacttttgtgtgtgaatagttgttcaaattgatgtttctgtaggaggacaagtgctggaaaatccagccctctaatgtcttgctgatgatgtcagtctccactattccactatggcgcgatctcggctcactgcaacctccgcctcccaggttcaagcaattctcctgccttagcctcccaagtagctgggactacaggygcccgccaccatgcccagctaattttttgtgcttttagtagagatggggtttcaccgtgttagccagggtggtctcgatctcctgacctcatgatctgcctgcctcggcctcccaaagtgctgggattacaggcgtgagccactgcgcctggcctccactatgttttaaaatgattaatctgcatgaaacatgagaagatattttggatgtggaacgtgctgttcaaatattcaaaaaatggcattatcattggtgtatttatatttgaacagcattagctattaccttgtaaccatcacactattatttcactaatctgggtattttattataaacaatttttaaattattacataaaatggttcattctaatgaggaaaattgttcaattttggaacttaaacataactaaagagaaatatttatgttttttaatttatctaaatatcaaagacaaggaagaaaagtctaggaaagacgggtaatatcttggaaatattctatagtaccttaagtttcttggagcttgctgtcttccactttctgcattattcaaaatccttgcacaggcagattcttcagaattaaggcagctggaacctcgagctttacaaattacatttaaaattttcaaattcacgctaataaggaggagtggaacagatagaggaattaaaaagaacttggatctttaatctgcagagatgtcagcattgaatggattctcattggtttggatatttcctgagcaccagccacatgttaacaggtcatgcttccacaaatca

SEQ ID NO: 685685 - DNA, 1132 bp, Homo sapiens
tcacttccctctccttccctcaagcagagggtatctgtatccatgctgtgcagcctaggattgggtgagggttgaggtgggtaatgtattgctaccatcagctactaggatttctcacatggctttcataactcttctgtaggtacttttgtgtgtgaatagttgttcaaattgatgtttctgtaggaggacaagtgctggaaaatccagccctctaatgtcttgctgatgatgtcagtctccactattccactatggcgcgatctcggctcactgcaacctccgcctcccaggttcaagcaattctcctgccttagcctcccaagtagctgggactacaggcgcccgccaccatgcccagctaattttttgtgcttttagtagagatggggtttcaccgtgttagccagggtggtctcgatctcctgacctcatgatctgcctgcctcggcctcccaaagtgctgggattacaggcgtgagccactgcgcctggcctccactatgtyttaaaatgattaatctgcatgaaacatgagaagatattttggatgtggaacgtgctgttcaaatattcaaaaaatggcattatcattggtgtatttatatttgaacagcattagctattaccttgtaaccatcacactattatttcactaatctgggtattttattataaacaatttttaaattattacataaaatggttcattctaatgaggaaaattgttcaattttggaacttaaacataactaaagagaaatatttatgttttttaatttatctaaatatcaaagacaaggaagaaaagtctaggaaagacgggtaatatcttggaaatattctatagtaccttaagtttcttggagcttgctgtcttccactttctgcattattcaaaatccttgcacaggcagattcttcagaattaaggcagctggaacctcgagctttacaaattacatttaaaattttcaaattcacgctaataaggaggagtggaacagatagaggaattaaaaagaacttggatctttaatctgcagagatgtcagcattgaatggattctcattggtttggatatttcctgagcaccagccacatgttaacaggtcatgcttccacaaatca

SEQ ID NO: 685686 - DNA, 1132 bp, Homo sapiens
tcacttccctctccttccctcaagcagagggtatctgtatccatgctgtgcagcctaggattgggtgagggttgaggtgggtaatgtattgctaccatcagctactaggatttctcacatggctttcataactcttctgtaggtacttttgtgtgtgaatagttgttcaaattgatgtttctgtaggaggacaagtgctggaaaatccagccctctaatgtcttgctgatgatgtcagtctccactattccactatggcgcgatctcggctcactgcaacctccgcctcccaggttcaagcaattctcctgccttagcctcccaagtagctgggactacaggcgcccgccaccatgcccagctaattttttgtgcttttagtagagatggggtttcaccgtgttagccagggtggtctcgatctcctgacctcatgatctgcctgcctcggcctcccaaagtgctgggattacaggcgtgagccactgcgcctggcctccactatgttttaaaatgattaatctgcatgaaacatgagaagatattttggatgtggaacgtgctgttcaaatattcaaaaaatggcattatcattggtgtatttatatttgaacagcattagctattaccttgtaaccatcacactattatttcactaatctgggtattttattataaacaatttttaaattattacataaaatggttcattctaatgaggaaaattgttcarttttggaacttaaacataactaaagagaaatatttatgttttttaatttatctaaatatcaaagacaaggaagaaaagtctaggaaagacgggtaatatcttggaaatattctatagtaccttaagtttcttggagcttgctgtcttccactttctgcattattcaaaatccttgcacaggcagattcttcagaattaaggcagctggaacctcgagctttacaaattacatttaaaattttcaaattcacgctaataaggaggagtggaacagatagaggaattaaaaagaacttggatctttaatctgcagagatgtcagcattgaatggattctcattggtttggatatttcctgagcaccagccacatgttaacaggtcatgcttccacaaatca

SEQ ID NO: 685687 - DNA, 1371 bp, Homo sapiens
tgtaggcttggcattcgttactacacattagcctcagagtattcctgggagctaagaaccattcttctcttacaggtgaggaaaccagggccagaaaaaaataagtgacttgacttagatttcacctattaaatgagggagtcagagttaggtacaagttcttcctaaccctaaatcctttcttcttttcatatctcatgatgcctggatgtaaaacagccagtctgactctgaaacatgaggtgtttatgttgcaatgctgaagcaaaacatcaaagttttagcctgaataaaaatgtgattattcttttcttcaacactgagggttatcactaaaaagacactttatatttctaaaggatgggatcattttaatccttgaaaagcctctgaatggattagtagtggatacatagaatcataaaattaagaattataacagcccccaaaatgtatttccatttgtagtcttgaccttttttttaaagaacctagggcaatttaaaataaaaaagacacaagaagttaaaatgagcacgtaatcaatcagctgtgataagtagtaaatatgccaaaccaaatctgactcagaaagggaaacatttacagttattttacacaaagttctccatcaattcttctctatatattctattctatcaactgagtcatcaacatgtcaaaagtggggaaggaaggggaatattttcagttgaaagtgagcacatttactttctaccttctccacttacctaggtatctaatactctgtaaaagttctgagaagctttttttttttttttttttttttttttttttttttttgagacagaatcttgctctgttgcccaggctggagtgcagtggtgtgatctcggctcactgcaacctctgcctcccgggttcaagcaattctcctgcctcagcctcctgagtagctgggactacaggtgtgtgccaccacgcccagctaattttttggatttttagtagagacggggtttcaccgtgttagccggaatggtctcgatctcctgacctcatgatccactgacgtaggcctcccaaagtgctgggattacatagaggacttcttagagctccaccctgaacttccaaaatcctaaactcaaaagtttatacaactagtaaaactagtaaaacttcctactagtaaaactgaggaggaagcccatgatggagaaggttggccttccagttgccttgcttgggagcttaggtagagaatagaagataagagatgaagttttctgtctttgttcattgggtttggacaattttcatgtttttaatatttctaaagttcagttgcaccttraaattggtaatgccttaccttcacttctcccc

SEQ ID NO: 685688 - DNA, 658 bp, Homo sapiens
agggtaagatcctatagaggcaggtatacagggctccattgactgtgtcactttgggtgaaatagttttcaccttagggcctccatttgtattaatctaacatgagaattgtaacaccttgctgtagtcagggttgtagtgaggagtaactgagatgacatgtgtaaactagtataacacggttcacagagagaacattggacaagtgtgggctcttctctaggtgccaggttgagagtcaagctctccaactccacatcacttcgagtcacaggggcacaagggaagcctgcaatgtcatcgaaaggccctggccagggagactgggaggctgcttctggtctctctcacttccatttatgtgttgtggatttgacagacattgtgccttctatgtgtcttcctttgtatttagccttcaatcgtttgtatttattcttcaatacctttgccttctgaaccatttacttgtccttgagtactggctatgttactgaagttttatttttagaagcatatgttttattttagaagtatatgtcttaactctccaaccaggacatcaactgcttgaggttagagactaatcatattcatctctgcatctaccccatctaccccacccccatccagttcataaaatgcasccagcacacat

SEQ ID NO: 685689 - DNA, 660 bp, Homo sapiens
catatatttaggttgacgcattattgcttattttatgcccagcatgaaacaggaaaggaaactcaacaatatttagattgggattatggtttcaattttttaaaggataaaaatggtgcagaagtcttttgggggaaataatgactatttatgataaataaaaaattttgctcttctttttttwaaaaaaaaatatctgttccctggaagccaggtttattaaatgatttagcctcttagttttcaacctcaaatcaccacatgacttgtggtgacctcagaaagtatacatggcaagcctaatgctttgtgaaggttttctttagtgcaaaccacttttggacaacagtttatcccttcacctgaggacaatagattaaaaagtaagaagctgccatgacacttcaccaaacatcttctgccctttctttaaaggatgttgaaggtgactaatggggtctgacatgtttttgttatgtatgaaatatcaaaatggcaaatcctaatgtttgcttcatccgaggacactttcataccttatgctttaccttgtcagcttgaattgatatcaagctgggacaggtcatgactgttcctttgattctctgtcatagctaaaaatgctcagatcagctgcttaaatgtgtggtaaaatgtgtg

SEQ ID NO: 685690 - DNA, 660 bp, Homo sapiens
catatatttaggttgacgcattattgcttattttatgcccagcatgaaacaggaaaggaaactcaacaatatttagattgggattatggtttcaattttttaaaggataaaaatggtgcagaagtcttttgggggaaataatgactatttatgataaataaaaaattttgctcttcttttttttaaaaaaaaawatctgttccctggaagccaggtttattaaatgatttagcctcttagttttcaacctcaaatcaccacatgacttgtggtgacctcagaaagtatacatggcaagcctaatgctttgtgaaggttttctttagtgcaaaccacttttggacaacagtttatcccttcacctgaggacaatagattaaaaagtaagaagctgccatgacacttcaccaaacatcttctgccctttctttaaaggatgttgaaggtgactaatggggtctgacatgtttttgttatgtatgaaatatcaaaatggcaaatcctaatgtttgcttcatccgaggacactttcataccttatgctttaccttgtcagcttgaattgatatcaagctgggacaggtcatgactgttcctttgattctctgtcatagctaaaaatgctcagatcagctgcttaaatgtgtggtaaaatgtgtg

SEQ ID NO: 685691 - DNA, 660 bp, Homo sapiens
catatatttaggttgacgcattattgcttattttatgcccagcatgaaacaggaaaggaaactcaacaatatttagattgggattatggtttcaattttttaaaggataaaaatggtgcagaagtcttttgggggaaataatgactatttatgataaataaaaaattttgctcttcttttttttaaaaaaaaatatctgttccctggaagccaggtttattaaatgatttagcctcttagttttcaacctcaaatcaccacatgacttgtggtgacctcagaaagtatacatggcaagcctaatgctttgtgaaggttttctttagtgcaaaccacttttggacaacagtttatcccttcacctgaggacaayagattaaaaagtaagaagctgccatgacacttcaccaaacatcttctgccctttctttaaaggatgttgaaggtgactaatggggtctgacatgtttttgttatgtatgaaatatcaaaatggcaaatcctaatgtttgcttcatccgaggacactttcataccttatgctttaccttgtcagcttgaattgatatcaagctgggacaggtcatgactgttcctttgattctctgtcatagctaaaaatgctcagatcagctgcttaaatgtgtggtaaaatgtgtg

SEQ ID NO: 685692 - DNA, 642 bp, Homo sapiens
cactgtggtgtcaaccatctggggttgacaggagttgactaacatgccagaaggctatgccagctgtcaatctgatgagagtggttcatcactggtggtatctaaaagctcacacagttggaggcttggagaaggaagccatgyctagagagtaggaactccagggaccagagctttgggttgatgagagaaaacagaatgtaccagctccgaaagtcactgtgaatttatctgctttcattagaaaaataagctgaccaacaccggagctctaacttctaagattagcaggctgccttcctttatgccatcaatgtattcttgaaaaggtgtatggaaatgcagtgcatgctaatcagagcatactccccggagactttagctttcatctcagagttgctttatcttcatctctgactgatgctcagtggacagtgattccaacaatgcaaccttaagtttttctgccctttgccctcaggctctcagccaaggggttaaccatgtgtaaacaagcctttacatgcacctgattaaaaacagctctgggatggaaccctttgtaaagaatcatctgttcaaagagaaaactaccccaacttacatctggtgagctaggaagttcatatatcatgttttctt

SEQ ID NO: 685693 - DNA, 1189 bp, Homo sapiens
caaaaggacagatacgaacttgaattatcattatcatcctagtgtccaaaattcaggagcatttgaagactcccaaataatgtaataagagctaatactttcagtgttatagataaggacgccagagcttcaggtgaaagaaaaggaaggcactgcccatgaaacctctaaagagaaatsttcaaacttgctatcaaaacattgccccctctctgtgctcaaaaatggttctgttccttgtggactgtggattggtagggttttgtaaaaaaaaaaaaaaaaaaaaaaaaaagagaaagaaagaaagaaaagagaaagaaaatggagctgagaggaggttaaagaagatattgcaagagatctagcttatatggttgtccaatacttgtataagtttttcattcaacttgatacatcaaatggcctaattcctttttatgggtggacactatgaggtcaattatttaaatgaaatatactcaaactaggtactagcctctttcttttctatagtatcccagtacttcagaaaataaaatcaaaatggtgagagaggagaagggaaaaggtggaaggtcctgttccttcacattgtaacatctgtgattttattttcagctccatcatttattagatgtgcaattttaggcattgtaacccatctcttgcagtttgggggttattttcagataaaaaaggaactagttgtagttatctttctctcacaagattcttgtgaataaacaacataataaaatgctttcatgtaaccagaaaatgctctacaaacacaatgattagattgttataatagacctatggtatgttcccaggaacacaagcttttagaagtgtattcactgacaaattatgctgttgatccataaattcccatcctaatgattgcgtggggcactgaaatttgccgatgtagcttcaactatgcacagaaggaagggctagaggcaatacataatatgagaaggagaagcagaaaatgatggccacagctatagaacagaaacatcttcagccacaggggatgaatgacaggtgaatatagctgcttagagaataattaattttattgacatgttcaaaatacattaaatatcctgaaagggcaaggcaaacaaaatcattcattttctagagaattagggacgcttctttggggcatgggatttct

SEQ ID NO: 685694 - DNA, 1504 bp, Homo sapiens
ttgatttttcccacctacagagataaaaatgacattgcaatgcagaggatagggcaaatcttggtttaggttaaaaaaagagtagttaagtcctaagagaaaggtcatattttaaaataggttgaagaataaaagaaagactgaaaaaaatggaaatatggcaagtacttgggcaggtgaacatgttaagaatacaatttgtggagagggcacactacttctttcttgctcctcattagcacattgtgggatcaactgtcctgaagagtgacatatttttacagaccaattttccaggaaagcatttggtttccgtgcaaataaattaacgaataaattactggaaatacttaaaaggaaatctcatgtgattcagagtgaacttagagattcttaaatgaagaaacatcaccattgtgcccatgccaagagggtgataaggattattcctctttcttcaacaatttmtctttcacttcctgatttcagtggtcattggcagggtgcagtctttgcctgttgctcttctctcttaacacactttatttatttattcatttttggtttattttattttatttttttttgtaaagacagggtctcactatgttcccagtgatggtctcaaacccctggcctcaagtgattctcccgcctcggcctcccaaagcactgggattacaggcatgaaccaccatgcccagatcacacttaattttagaaggctcactgttgcccataaactttagcacccaccccctctgtatagatgacacccaagtcattaactctagtcaagactcactgtcaccacttccatccccatcactggataattccacttcaacattgtgccatgacctcagactcctccaccaaagtcaccatgtgctcacagcacatcctaccatgtgagcttgctctctggcaggtaggggagacatctagaagtaaattggtacacaagggacagagagaagactttgccagttgcaggcagggatgtatgtgacacatgcaagaatcttcctttctgcctgggaacaactgcctgttctggcctctaatcctgagccttggtgcaatttcaccttcctgactctgatctactggtttcccttcttactttgaggactgaactctggcctgtgtccctagaattagcccattagtctggctcctaatccacattttgctcataaatcagtaagctaccatttgtatgaaaaaaagagtgtacatgactataattataagacacttctagaaggatacatgagacattagtaaaagttgttgcttctgaagaaataaattaggtagctgggggcaaggggagagagacttacctgtcaagtaaaccttactctttctctctctctctctccatatatacatatgtatatatatacatatatatatacacatatatatatacacatatatatacatatacacacataaacatacatatatacacacacgtatatatataaattttaaa

SEQ ID NO: 685695 - DNA, 1504 bp, Homo sapiens
ttgatttttcccacctacagagataaaaatgacattgcaatgcagaggatagggcaaatcttggtttaggttaaaaaaagagtagttaagtcctaagagaaaggtcatattttaaaataggttgaagaataaaagaaagactgaaaaaaatggaaatatggcaagtacttgggcaggtgaacatgttaagaatacaatttgtggagagggcacactacttctttcttgctcctcattagcacattgtgggatcaactgtcctgaagagtgacatatttttacagaccaattttccaggaaagcatttggtttccgtgcaaataaattaacgaataaattactggaaatacttaaaaggaaatctcatgtgattcagagtgaacttagagattcttaaatgaagaaacatcaccattgtgcccatgccaagagggtgataaggattattcctctttcttcaacaatttctctttcacttcctgatttcagtggtcattggcagggtgcagtctttgcytgttgctcttctctcttaacacactttatttatttattcatttttggtttattttattttatttttttttgtaaagacagggtctcactatgttcccagtgatggtctcaaacccctggcctcaagtgattctcccgcctcggcctcccaaagcactgggattacaggcatgaaccaccatgcccagatcacacttaattttagaaggctcactgttgcccataaactttagcacccaccccctctgtatagatgacacccaagtcattaactctagtcaagactcactgtcaccacttccatccccatcactggataattccacttcaacattgtgccatgacctcagactcctccaccaaagtcaccatgtgctcacagcacatcctaccatgtgagcttgctctctggcaggtaggggagacatctagaagtaaattggtacacaagggacagagagaagactttgccagttgcaggcagggatgtatgtgacacatgcaagaatcttcctttctgcctgggaacaactgcctgttctggcctctaatcctgagccttggtgcaatttcaccttcctgactctgatctactggtttcccttcttactttgaggactgaactctggcctgtgtccctagaattagcccattagtctggctcctaatccacattttgctcataaatcagtaagctaccatttgtatgaaaaaaagagtgtacatgactataattataagacacttctagaaggatacatgagacattagtaaaagttgttgcttctgaagaaataaattaggtagctgggggcaaggggagagagacttacctgtcaagtaaaccttactctttctctctctctctctccatatatacatatgtatatatatacatatatatatacacatatatatatacacatatatatacatatacacacataaacatacatatatacacacacgtatatatataaattttaaa

SEQ ID NO: 685696 - DNA, 1504 bp, Homo sapiens
ttgatttttcccacctacagagataaaaatgacattgcaatgcagaggatagggcaaatcttggtttaggttaaaaaaagagtagttaagtcctaagagaaaggtcatattttaaaataggttgaagaataaaagaaagactgaaaaaaatggaaatatggcaagtacttgggcaggtgaacatgttaagaatacaatttgtggagagggcacactacttctttcttgctcctcattagcacattgtgggatcaactgtcctgaagagtgacatatttttacagaccaattttccaggaaagcatttggtttccgtgcaaataaattaacgaataaattactggaaatacttaaaaggaaatctcatgtgattcagagtgaacttagagattcttaaatgaagaaacatcaccattgtgcccatgccaagagggtgataaggattattcctctttcttcaacaatttctctttcacttcctgatttcagtggtcattggcagggtgcagtctttgcctgttgctcttctctcttaacacactttatttatttattyatttttggtttattttattttatttttttttgtaaagacagggtctcactatgttcccagtgatggtctcaaacccctggcctcaagtgattctcccgcctcggcctcccaaagcactgggattacaggcatgaaccaccatgcccagatcacacttaattttagaaggctcactgttgcccataaactttagcacccaccccctctgtatagatgacacccaagtcattaactctagtcaagactcactgtcaccacttccatccccatcactggataattccacttcaacattgtgccatgacctcagactcctccaccaaagtcaccatgtgctcacagcacatcctaccatgtgagcttgctctctggcaggtaggggagacatctagaagtaaattggtacacaagggacagagagaagactttgccagttgcaggcagggatgtatgtgacacatgcaagaatcttcctttctgcctgggaacaactgcctgttctggcctctaatcctgagccttggtgcaatttcaccttcctgactctgatctactggtttcccttcttactttgaggactgaactctggcctgtgtccctagaattagcccattagtctggctcctaatccacattttgctcataaatcagtaagctaccatttgtatgaaaaaaagagtgtacatgactataattataagacacttctagaaggatacatgagacattagtaaaagttgttgcttctgaagaaataaattaggtagctgggggcaaggggagagagacttacctgtcaagtaaaccttactctttctctctctctctctccatatatacatatgtatatatatacatatatatatacacatatatatatacacatatatatacatatacacacataaacatacatatatacacacacgtatatatataaattttaaa

SEQ ID NO: 685697 - DNA, 1504 bp, Homo sapiens
ttgatttttcccacctacagagataaaaatgacattgcaatgcagaggatagggcaaatcttggtttaggttaaaaaaagagtagttaagtcctaagagaaaggtcatattttaaaataggttgaagaataaaagaaagactgaaaaaaatggaaatatggcaagtacttgggcaggtgaacatgttaagaatacaatttgtggagagggcacactacttctttcttgctcctcattagcacattgtgggatcaactgtcctgaagagtgacatatttttacagaccaattttccaggaaagcatttggtttccgtgcaaataaattaacgaataaattactggaaatacttaaaaggaaatctcatgtgattcagagtgaacttagagattcttaaatgaagaaacatcaccattgtgcccatgccaagagggtgataaggattattcctctttcttcaacaatttctctttcacttcctgatttcagtggtcattggcagggtgcagtctttgcctgttgctcttctctcttaacacactttatttatttattcatttttggtttattttattttatttttttttgtaaagacagggtctcactatgttcccagtgatggtctcaaacccctggcctcaagtgattctcccgcctcggcctcccaaagcactgggattacaggcatgaaccaccatgcccagatcacacttaattttagaaggctcactgttgcccataaactttagcacccaccccctctgtatagatgacacccaagtcattaactctagtcaagactcactgtcaccacttccatccccatcactggataattccacttcaacattgtgccatgacctcagactcctccaccaaagtcaccatgtgctcacagcacatcctaccatgtgagcttgctctctggcaggtaggggagacatctagaagtaaattggtacacaagggacagagagaagactttgccagttgcaggcagggatgtatgtgacacatgcaagaatcttcctttctgcctgggaacaactgcctgttctggcctctaatcctgagccttggtgcaatttcaccttcctgactctgatctactggtttcccttcttactttgaggactgaactctggcctgtgtccctagaattagcccattagtctggctcctaatccacattttgytcataaatcagtaagctaccatttgtatgaaaaaaagagtgtacatgactataattataagacacttctagaaggatacatgagacattagtaaaagttgttgcttctgaagaaataaattaggtagctgggggcaaggggagagagacttacctgtcaagtaaaccttactctttctctctctctctctccatatatacatatgtatatatatacatatatatatacacatatatatatacacatatatatacatatacacacataaacatacatatatacacacacgtatatatataaattttaaa

SEQ ID NO: 685698 - DNA, 1504 bp, Homo sapiens
ttgatttttcccacctacagagataaaaatgacattgcaatgcagaggatagggcaaatcttggtttaggttaaaaaaagagtagttaagtcctaagagaaaggtcatattttaaaataggttgaagaataaaagaaagactgaaaaaaatggaaatatggcaagtacttgggcaggtgaacatgttaagaatacaatttgtggagagggcacactacttctttcttgctcctcattagcacattgtgggatcaactgtcctgaagagtgacatatttttacagaccaattttccaggaaagcatttggtttccgtgcaaataaattaacgaataaattactggaaatacttaaaaggaaatctcatgtgattcagagtgaacttagagattcttaaatgaagaaacatcaccattgtgcccatgccaagagggtgataaggattattcctctttcttcaacaatttctctttcacttcctgatttcagtggtcattggcagggtgcagtctttgcctgttgctcttctctcttaacacactttatttatttattcatttttggtttattttattttatttttttttgtaaagacagggtctcactatgttcccagtgatggtctcaaacccctggcctcaagtgattctcccgcctcggcctcccaaagcactgggattacaggcatgaaccaccatgcccagatcacacttaattttagaaggctcactgttgcccataaactttagcacccaccccctctgtatagatgacacccaagtcattaactctagtcaagactcactgtcaccacttccatccccatcactggataattccacttcaacattgtgccatgacctcagactcctccaccaaagtcaccatgtgctcacagcacatcctaccatgtgagcttgctctctggcaggtaggggagacatctagaagtaaattggtacacaagggacagagagaagactttgccagttgcaggcagggatgtatgtgacacatgcaagaatcttcctttctgcctgggaacaactgcctgttctggcctctaatcctgagccttggtgcaatttcaccttcctgactctgatctactggtttcccttcttactttgaggactgaactctggcctgtgtccctagaattagcccattagtctggctcctaatccacattttgctcataaatcagtaagctaccatttgtatgaaaaaaagagtgtacatgactataattataagacacttctagaaggatacatgagacattagtaaaagttgttgcttctgaagaaataaattaggtagctgggggcaaggggagagagacttacctgtcaagtaaaccttactctttctctctctctctctccatatatacatatgtatatatatacatatatatatacacatatatatatacacatatatatacatatacacacataaacatacatatatacacayacgtatatatataaattttaaa

SEQ ID NO: 685699 - DNA, 1929 bp, Homo sapiens
atgtggtgtgtgtataaggggtggtgggtactgatggagaagagagagaagaggggactagaaagggggacagcaaaaaacaagggaaagaaattaagtgaaacataagaacaggaatacttagacaggttgccattaactgaggcctcttaatcttgggtccatgaatctaggcagaattgtagtgttgtaagttctttaaacstttcacaaacatggatattttgacgtggtatggccaagacagccacattttcaagtttccttagctccatagtaattctgatgccaggctgtcttgtccataccttcagaattcctgagctgttttgtccataaatgggctttaagggttgataaacttccccaattgtaaaatttgggagtgtatctgtttttatttttttctcggaagaagttagtagcttgtgcagagttgcacagtattttactacctctccagtatgctaaaaaatactgcatcaaaagaagtcagtttctggttgcaatgaaccgaatatttttgttccccacaaaaatttacatgttgaaatcctaacccctagtgtaatggtattaggaggtggggccattgagatgtgattatgtcctgagagcagagcccaaatgaatgagattcgtgcccttataaaagaaaccccagagagttctctcgtttcttctgcaatgtgaggacacagcaagaggacagtcatctatgaatcacaaagagggtctgcaccaggcacagaatttactgatgccttgatcttggacttcccagcctttagaattgtgagaattaaatttctattgtttataagccacccagtctatggtattttgttaaaccagcccggacattctttgtggttttctgttcatccaatctgcaggtacaaaggtagctattcattaggaggagttggggaaggtcaagccactagtccaaactaactgataatagatactcttgctgaagaaacatctaaattttaaagatgatattaatgaattatgagaatttaacaactaatataccagacagatgtcagctctctttttgttttacactacagtgaccaaataatttgcaattgtgtaagtggagaaacaattatttgctctttgccagccaggtgccagttagcattttgaaggcagtatgtcttaaggattaaagcagctgcttagtcattgtttcttaatttctttaaaataaacaaccagtcccaaatcatattttcctagagagaatttaagagaaagcatgagaaaggtcccatggttaaattggctctaggcaggcaagctgggctttctgacaagaaacatttttgtgtaaaaataaatgaataaaataacttcgcttcacagcggtgaagacttctactattttcttgacatttgactatttatagtaggcctgtataaaactgtttcatcatatatagtatctatagttcatagaggtaaagtatagctctgcccaaaacttgggaacccccaaatctgcagctgagagtctagatcctattcctgctgcctgtgatttcattttctaaccagcatctcacacaatcaactttcattttttgtctaggcaggaagaataaaataaaatcacttggctcatttatctagcgatccttctcttatttttctccttcttgaaggcctccctccctccctcttaaccccctttcttccatcttctttgcttccttcctctttaaaaatatttaatgagcatctattatgtacatgctcaatgccaggaacatgacatgtgctcagaacaagtgtaaatgtcatcagtaacctcaatgataaacccgatggtgatgtctctatccacatcttccttgacctctcagcagaacctaaagttttaacctctccttctttcttgaaacattatcttttccc

SEQ ID NO: 685700 - DNA, 646 bp, Homo sapiens
ttgacaatttttaagaagtgtctgttacctatctatgttgttcatttcatcctaactagaggtgattattttgacatctgaaggtacagctaaacccaggattcatgttcttttattcagtaacttattggatatttacagatcactgacagtgtgctatactagacactgtggtaaaatataagatgattataacaactatattaacaaaatataaatttgtcgaatgttactacttgccagaagctatcctaagatttttccatttatttactcatttactttttgtaaagatgttatgagatctggaaacttttatctccatcttagagataaaaatacagaaagagagcaattaaataattttcccaagaatacacagctagaaaggtaatccaggttatctgtcaccagagcccatctatggtcaaagatgaaaaataatgaactatattggagcagtacagataaatgtcttgagagtacaaaggaagcaaaggtcaccttgatatcaggcartctgaaaagtcaccagggaaggtgctatttgcaatacatctggtctgctttatgcctttgagctggccggttcacccctatatatgtggctagcactatgtcatcagggtaagttattggtgtcttc

SEQ ID NO: 685701 - DNA, 652 bp, Homo sapiens
tggctgaaactcaataaaaacagcatctctgccgggtgtggtggctcgcgcctgtaatcccagcactttgggaggccgaggcaggcggatcacgaggtcaggagatggacaccatgctggctaacacggtgaaaccccgtctctactgaaaaaaaaaacaaaaaaccaaaaaaatttagccaggcgtggtggcgggcccctgtagttccagctacttgggaggctgaggcaggagaatggcgttcaggaggcagagcttgcagtgagccgagatcacgccactgcactccagcctggtgacagagcaagactccgtctcaaaaaaaaaaaaaaaaamaaaaaaaaaaacccagcatctcctaccactttcctgctgtggctactgccataaatgacataattaagaattcacggcccggcgcggtggctcacgcctgtaatcccagcactttgggaggccgaggcgggcggatcacgaggtcaggagatcgagaccatcccggctaaaacggtgaaaccccgtctctactaaaaatacaaaaaattagccgggcgtagtggcgggcgcctgtagtcccagctacttgggaggctgaggcaggagaatggcgtgaacccgggaggcggagcttgcagtgagccgagatcccgc

SEQ ID NO: 685702 - DNA, 613 bp, Homo sapiens
tttcatcattgatggactggagtaatgggatgccaacctactggagtccagtatatgtaattacaaacttgttgaaactattctctctgactgtgcctattaggttcagctcctaggtgcataactgtcttaaaattgtgtaatctgaaggctccaattcagcagaggcagttttccccttcaaaatactctcattgattgtagttttaaagacagcttaaagatttcaaggtctgtyatatatatatacacatacaaatgagatgctttaggacatactgaagtgtatcagtgtattacactaaacaacaacaattaagcatccaataataccctgcttaaatttttgcttcattttcctcatattcttcatcctctattccaaaagacctggcagctcactctctttaaaatggtatttatatctgctgttttctcttttatactgaaggacttgatactgtgagatggatagctgaactctaaggaaatggaaaattggaaggtgagatataacaggaggaaaaaattcaaagaataaaactcttctttttattgagtctttaagggataggaccaattttttgaattatatatagagaccaatagacca

SEQ ID NO: 685703 - DNA, 1040 bp, Homo sapiens
cccgagtccccacactgctccaagaagaatttgttttatagtagcacagagctgtccaatagaaacagaatgtgagcctcatatgtaatttgaatttttcttttaaccacattttttaatgaacagttgaaattaatggtaataatagatattaactaaatatattaaaaagattcaatatgtaattcatcaaaattgagattttaaaatcttttttatactaaatctttaaaatttgatgtgcatcttacatgtagagtgcatctctatttggatgttaaatttttgctagaattacttgatatgtatttagatctcctaaaatttacaggtgtaaatgcagatttacatactcaacttatttcaaatatacttagaagcyttctaataactaaatgaggtattagtttgtaaatttaaattttaaattgtaattttaaacttttaagttaattaaaattaaataaaattacaaattcagtttctcagtcttcctcaccacattttaagttccactagccacatgcatagctatattggacagactagctctaacctgtaggactaagaaattgtccaaatccacccatctttcctctctgagattcctatggtcatctgattgaaatcaaactaaaaatgtgtagaatggctttgccagacaaaggtagccccacagaggtacctccagcaaaaaatgtgggttgaccagcaaggtcaaggccatctgacgacaagactctcatctgatttatacactcagccacctacttcttaaacctctcaactgcctgttatagctctggtccaacaatacacaaagctggggagaatgcctcaaggctccgtacctttgggttgactttgtgtgtctggaatgtctgttttaaatgagatttccaagggatgcattgtgagccgttcaactttataaaacaccagctcctttccaagtgtggtgcttgggtgtcctctgggactccttggtaacttctacatcggataattaaacccaagaatctgaaggaactagcctgaga

SEQ ID NO: 685704 - DNA, 1061 bp, Homo sapiens
gtttcgaccacccatctacagcatattacacagaatcagctcaggaatcacacttggacatgacctgagaatcttcctctagcaccatgagctttactgggtaacaggccctgtgtggccgccatccatctctgtaggacctaccagtaagccccagtctttgccaaagaaaggagtcagaagttctccacctttagtctctctcatccccaaaacattgatggtagtatttataactaatatctgtgccrtgctttgtagtttaaatctaacttaaattccttgaaaatcctcccaaattctcctacactgctataagaatctttccaaaacacaaatctgatcatatcatgttactgctggctcctagtggcatgggagatgaaagacatgctaagcttgtcatttaggggtgtccactatcaaattgtctttgagctgtatctccccttaattctaatcacattaagttatgatgtcttatttcctaaattcacaaagatctcttgtacctctttctatgcctgccattcctttttcttgaattttcaggttggagcaaatgtaattgtggttaatggcaaaaaaaaatgcaattacatttgcaccaaccaaacaacattccccttaccttttcacagtaattgcttcagtttagcttcaaaggacaccaacctcctaaaacagtaaacatcttccttctctacatttagtatcttccagttttgatttgctcattaggctccttgttcttcccagtaaccttctttaggaaagagacaaagtctctttcattcctgtctccagcatttggcatgcactatgtgctcactaataatactgctatgaggaggacagaggggagttctgttgactctctataataacacagaaaaggagactctcatcagatcactgcgcacgatgtgttcactctaaagacacattatatttgtgtcttaagagtgtccaatcactctctaacagcacacgagagggggatagcctcactctgaggttcataatatacaactgtgctacctgagattcctttgatgtgt

SEQ ID NO: 685705 - DNA, 1061 bp, Homo sapiens
gtttcgaccacccatctacagcatattacacagaatcagctcaggaatcacacttggacatgacctgagaatcttcctctagcaccatgagctttactgggtaacaggccctgtgtggccgccatccatctctgtaggacctaccagtaagccccagtctttgccaaagaaaggagtcagaagttctccacctttagtctctctcatccccaaaacattgatggtagtatttataactaatatctgtgccgtgctttgtagtttaaatctaacttaaattccttgaaaatcctcccaaattctcctacactgctataagaatctttccaaaacacaaatctgatcatatcatgttactgctggctcctagtggcatgggagatgaaagacatgctaagcttgtcatttaggggtgtccactatcaaattgtctttgagctgtatctccccttaattctaatcacattaarttatgatgtcttatttcctaaattcacaaagatctcttgtacctctttctatgcctgccattcctttttcttgaattttcaggttggagcaaatgtaattgtggttaatggcaaaaaaaaatgcaattacatttgcaccaaccaaacaacattccccttaccttttcacagtaattgcttcagtttagcttcaaaggacaccaacctcctaaaacagtaaacatcttccttctctacatttagtatcttccagttttgatttgctcattaggctccttgttcttcccagtaaccttctttaggaaagagacaaagtctctttcattcctgtctccagcatttggcatgcactatgtgctcactaataatactgctatgaggaggacagaggggagttctgttgactctctataataacacagaaaaggagactctcatcagatcactgcgcacgatgtgttcactctaaagacacattatatttgtgtcttaagagtgtccaatcactctctaacagcacacgagagggggatagcctcactctgaggttcataatatacaactgtgctacctgagattcctttgatgtgt

SEQ ID NO: 685706 - DNA, 1064 bp, Homo sapiens
tggaattgacttatttgtgtgactccagaggactgagcaagatcaatgagtaaagtcacacagtggaagcagatcttagctcagggtagagaattttctaacatgagcactgtccaatgaaagggtgtgggccattagaggaaataagtgccttgcccctggaggcctcaattagatgtcagacatcatttcctgggagggctgatcagcagattcctatatctaaggaraaagttgggggagatcaccttagagttctttacaactctaaagtttctttggttctatctatgatgtagggctgagtgatccatctcagatgagctactccttcttaggccccatttttcaaataaggaaactgagatgtttgaaaattaacaaaaaggtcacagagcatgttagttgtggaggtgagacagaagaaactcagatcttctccagccctgctagtttcactccctctctatcttggtgcttcttaaaatgactccaatcaatggccccacttattttttaatgggctgagccaccttgaaaataagcctatatattttaaatgtgtttaaacattcatttaaccacatttcccagataaatggttaacaaaatatgtttctactgggaaataaatttaaaaactcttctgttgcaacaaccttcaggctgtctttgttcacattccttcaaccctcaaccaatatctatgtgtcatgccctgacttaatctgagaaataaaaataaataaattagacacttccaaggtgcttgtagtcccagagtgtgggagatggacaaaaaaaaaaaagtcccactacaatgcaatgaataaattatcagcagaggcataagcttaatacaatgttatggaagataaaaaagaaatttctacgtctgtgtgagaaacttaaagaaggctccacagaggaggtgacatttgatctgcaactgaggtatgtagaaactaagacaaaggaaacagcaagtgcactgatctcaagatgtgaaatcatatatgagacctacggagctcaccgggtctgaaataccaagtgtttgaaca

SEQ ID NO: 685707 - DNA, 1064 bp, Homo sapiens
tggaattgacttatttgtgtgactccagaggactgagcaagatcaatgagtaaagtcacacagtggaagcagatcttagctcagggtagagaattttctaacatgagcactgtccaatgaaagggtgtgggccattagaggaaataagtgccttgcccctggaggcctcaattagatgtcagacatcatttcctgggagggctgatcagcagattcctatatctaaggaaaaagttgggggagatcaccttagagttctttacaactctaaagtttctttggttctatctatgatgtagggctgagtgatccatctcagatgagctactccttcttaggccccatttttcaaataaggaaactgagatgtttgaaaattaacaaaaaggtcacagagcatgttagttgtggaggtgagacagaagaaactcagatcttctccagccctgctagtttcactccctctctatcttggtgcttcttaaaatgactccaatcaatggccccacttattttttaatgggctgagccaccttgaaaataagcctatatattttaaatgtgtttaaacattcatttaaccacatttcccagataaatggttaacaaaatatgtttctactgggaaataaatttaaaaactcttctgttgcaacaaccttcaggctgtctttgttcacattccttcaaccctcaaccaatatctatgtgtcatgccctgacttaatctgagaaataaaaataaataaattagacacttccaaggtgcttgtagtcccagagtgtgggagatggacaaaaaaaaaaaagycccactacaatgcaatgaataaattatcagcagaggcataagcttaatacaatgttatggaagataaaaaagaaatttctacgtctgtgtgagaaacttaaagaaggctccacagaggaggtgacatttgatctgcaactgaggtatgtagaaactaagacaaaggaaacagcaagtgcactgatctcaagatgtgaaatcatatatgagacctacggagctcaccgggtctgaaataccaagtgtttgaaca

SEQ ID NO: 685708 - DNA, 879 bp, Homo sapiens
cagatgagaaaattgtatcagaagatgtaatgaaattcttcaactttacatacctaataactgctaagattgrcatttgaatatactttgtctgattttagagattgtgaccttaaccactatgtcatacttccttcctgaagtgttactgattcacatagacacacaaatctgggcttggctaggttccttttcccaaagagagagatgggaaaatctactccttaaatggactatcaaaccaaactttagatatcttagtcacagaatactataagttagtatattttatttcttagtaggttattaatgaaaaattttaggaagaaacttaaagcataacaacacattgttacaatagggagttagagatgaaatatttttaataaaggaaggactatgtaatagtagccatatcaaggaggtcttttggaatggactagcatgagtctgcattagtacaggaggaaccacagaggattaacagcttaaagctgatagagaatatttgatgctagagataaaaggaattgattgaatttaaagttctagtggaaaagttagtctggacaatgggcactgaaaattcaagaatgggtgatttcaaatgtaggaaaatgtgagctaggatgatttataggtacataaaggagctctttatagatggtcactgatggtttcaataaagtagaaatgagttcatttgtcaagaataaagaaattgggaccattgggagcttaaggtgattaggcaaagcttggcatagatgctgacagaagtgtatcagaaacgtaacaggtccaatcttactgatctacctttattgattcatttgtttacttgttcattcactttttatttaacaaagaatttagtca

SEQ ID NO: 685709 - DNA, 515 bp, Homo sapiens
tgtcctgtttttcaatcattactaggagtaatctttatagaaatacaagtagcaaccattaccacaaatgaattytcataagaaacagttattcaagtctttttctctctctctttgtcaaacgcatgtgcacacacacacacacacacacacactttgtatgcctgtggattgtgtgagagagagaatgagcctgtaaatacagaattatatcagaattcttgtagcaaataagctatcaggaaaattgagccaacttagtcttggtcttgtgaaggacattttctcttttctgacctagtcttttctattaagtgaaagatgtcacacaatgaccactcatctatttttgatggatacatgaattgtacattacatggaaagaagagagaaaataatcctaattttatataatgtacaggttagaaagcctgatacagactaatataaaattaatgctttgaataaatttgtttatactattgctctgttagtgttgctacttttggtttgtt

SEQ ID NO: 685710 - DNA, 2767 bp, Homo sapiens
gcatatctatatgaaggtccaactttgattctgctttgttttggctttcttttttgtattacttttctccaaagagtaaaatacacacttgttttattctcttattcctacagcacctaacataattcttactaaaaaatattatttaatgaagaaaattattatataatacattttgttgatacattattttctacatattatgtgtcaattttgttccttactatcctcagctggaatccatttgaagagacagaactgtattgtgtagattcaagcaatacatagtaggataccatacatactgtagggtttggctctgtgtccccacccaaatatcaccttgaattgtaatctccataatcctcatgtgtcaagagcaggaccagatggaagtaagtagatcatgaaggtggtttcccccatgctgttctcattatagtgagcgagttatcttgagatttgatggttttataagcatctgacatttcccctggttgcactcattgagtcttgccaccctgtgaagaaggtacctgcttctcttgcattctgccatgattgtaagttttctgaggcctccccagaactgtgagtcaattaaacctattttctttatagattactcagtctccagtcttgsgtatgtcttcatggcagtgtgagaatgaactaatactcatataatggatactaacaagtaaatctttatttaccacttattagaagcttgacttaaccaattatcaaattttatataagctttaatgttattgggaaatatccttttcctgtaaaaataaatgagattacctacctgaagtaccttaggcctttctaatattttcaattttcattaaatgtttatttttatgtatctatagatatcttgaatatgtattgtaaatattatatgtatgtagaatatatgtattctagtatttcttccagatagcacttaaaaaccagtgtttgcatttttgcatgtgagtaagcaattcctacttacaatgatggaagaaatagataccctggaagaaggaaaattaaattcatgctttcaaagcatccttcccaacaaatccaattcatcttttgcacagaaggaataattagatgaagatatattttaagtcagattgttagtattttggccacatggctacatcataagtgtagtttaaaattctgttcatttttatttttttaaatcaaaacactcattgaactgtacttaatttttaaatgcaaaatacataaaactcttgcatttcttggaaataaattctctttattctactaataaataaacattgttaccaccattgaggcaaatgacagaaattcttacaattgattatcctatatgggtatgaaaactttaacatgctcctctaagtaactgaatactacagagtgattttggatcaatgtggccttattttgaatataacatacaaaatcattgagtgttttatgatttatcttcattttaaatcaagctttgggatatatgaagacagaagataaatcaaaatgtgtcacgtattatattttctgaagttattaacatatatctagcaaaaggtaaaatagcacagatataccaaccaaattttcatgtgaagaaaatattttatataaataatgtttcttcttttatatgaaatcactgcaaaaatgagaaagctactttttatattccccaatgaatattccccagtcctgtgattccaagttcagtaaaatttagaaaatcatggccaagaaatttagtagaccgaatgtaccttcactttctggaatgtacttgtaaccctacattcacagttagaaatttgcttgaatgaaaaagtgttcaaagtaattattatcttgtatttggcttctctgggtacctgtttggcttttatttctaaataaaaaaacaaaacatgcacaatgtaaatatttttagtttgtaaaattttctttccaattacatattttgagatgttgtatatactgtaaacattttgaagtaattttgcccaaattaagaaaaaaaattcattcatctttttatcttatttttattttggttcacttttcatctgggtattaatatggatgttgcagaaagaatagctcctataaatgataggttgctgtatggatatgcaacaaaaccatctttattttacagaaaggtctcattactctaaaagaaggccagtgaagaaatttatattgaccttttggcatgacctttctaaaccaactgttccctagtacctaaactagtgagtttactgcatagagacacccaaaggagtaaaacatgaagtgggagactttggccctattagaaaccttagggccaggttctgttccttatcacctatgagatttcccttgttaatgatgctgagttgggcatatttattttttagccatttcatcaacaagttttgcttatgactaaggatgtcatttcttgttcccatcacatggtgttttaggacattcctgctgctttaacaaaatatcttacttagagtaattcataatttataaaaattccttatacattctttatagattctgacaattccataagtgtcatgaatttcagtagggaagtgacttttcaaagtgagctctggacaggtagccataagtaagactacggtggcacggatatgctgtgctttgatcagttgtgtggtatgcaatttttattataaatatcactgaactccatatgacaaaaattactcatcaactt

SEQ ID NO: 685711 - DNA, 1137 bp, Homo sapiens
aaaaaaagaaataccgaagtggttccccaaggcaccaatttaaagtgtatatgtgcagtgcagggttactggaccaaggcacagtgtaaacagcgaaattttattttttgttttctttttcctaagatgttccttactcccagttacataaaaatgtgtattacaagcaaacaaaaattaacaggaatagaaataactataaagtatattcacattaaaatcagctttgctttatctattaaaggatgtaacacagttgtggttttcaggaccttgtaactcctggtgaattggaaagcacagaaattcttcagagcctcaagagttgtgtttaatgcattatttaaatagtgtccaaccactagttagatagcttaacactcaaatagcttttgaaatctctgtagactcacctcaattgaagagtcctgataatttacagaagtgtgtagtgcactaagagatccctgctgtacgatgcctgcctgtggagtgttttatgtgttgatccactggagtgtgtgtgtgtgtctgtgtgtacgtgggtgagtatgggtgggcacggattgtgtgtgtgtgtatgtgtttacattgtggtatgtgtctgttrgggtgccgccattagggatttggaagagtgaggaccataaacttgtcaacattcctacatgcctgcttcataacaagtgtactgaacatggccaaaataactaaaccaagtaaacaaattagacattaattaaatttaatgctgggcaggaaagaagtagtcaaggccaggtaaaatgaagaaatataaccaagtgaatgaaatttttacattgattcgtagaatgagacatgaatattttttaaaatttgtaatttctaatgactatcagtatataaaactaagaattatatggctgtcaactgactaaaaactgtacataagattagagatagtgaaacaaccatatatgaacttctatttccacttttctgtctcaagaatgacttgtgaaaatgatgttttttttgaaattttacattctcattttgaaagagcttcacaaaacttacgtgagaatctggatgctcataagaggtctgattttttaatggcatgtttgtatttctgttatgtacatcaatgtc

SEQ ID NO: 685712 - DNA, 770 bp, Homo sapiens
acccatctctcgccatcaatgcaacccgaccccgagcagttgttcactcttctcttccctcgttctcggcacaccgtgtgcctccataccccagcctcaggcctttctataccacttcccatttgaggcactgtgtttttattcaactttggtactgtcctttgagaatcttcaacgtgatttggatatggcactttttatcaggatgttacgtcagagttgataaattcaaagtaatatcgttctttttcctgccaaagtcagctcctcctttccactgcactttcctgccgatgccaccactctttctcctgaatgttctcagaggacacccttgtacctggactggtcattacataggtgtaagttttattctctaaaaggggtgagtgagagtttatactaaggttgtaagcatccctcagggcagactctggatgtatattacagaactgctgaacttgtggaatgtgcatgtttaatactgaaaatatttaatgccacatgtgtaagacttttgccaactggaatctgaacatcaacaactttgaagggcttattctaccttctcggcacaaaaatactttctaygaatgcacatatttatgtgcaaacgtatagaaaattgactttaaagtgtacaacaaatttattttagcaattgggcctgggggacctagaaggagaatgagattggagtggtaggggtggaacattagctaataatgatttattttattaaaagtaattactgaaaaccaatgcaataa

SEQ ID NO: 685713 - DNA, 645 bp, Homo sapiens
ccctccatgattaaatcaccttcaacttggccccacttttaagatttccaattaaaattccagataagtttctgtaacacacarccaaatcttatcattctgtccctgcctacccagatttcatgtccttctcactttgcaaaatgaaatgatgcattacctgccatttccccaagccactatgctttttttacagcctgcagaactataagccaattaaacccctttttgttatgaacacacaaaaaattagtactgtgaagttaagctatgaaatgccttcagtgacttttccccatcgtcttggataagacccccaaggtcttaactcattccagcatttactcaaatgtctgaagcccaaagtctcaactgagacaaagctgcagtctcttctgcccctgagcctctgaaatacaaagcaggttaaccacttccaaggtacgattgtccaggcatttagtaagaatctccacccaaaaggaagatttttgccagagagaagaacaaaacacaaacaggacttacaagtcccacaaaattctgaaactcagcaggccacttattcaaacctacagctccaaagtcatcctttttaaatccttgtcccacatccagggcacaagggcatgagggtgggctccc

SEQ ID NO: 685714 - DNA, 981 bp, Homo sapiens
gttgttctgcagtggttattccaaccacaaattaaggagttatttttctgtggttcagtagtgcacaaggattatattgcaaaagttgctggagcccaagttctgtaaacagtttttttggaagaagtctttgtctaacagactgactagattgttggtattcaaaacaggagaggacagaatttagatgagcaaaacataacttcttgatgataaaattgttgaacattgtcctataaaatgtcaggtaaggagtttaccaactatcctctgtgttggtatatggcagcagccctttcagtaggacagaattgctcaaatagctagagaattttctacatgtagagcactgatttttaaaaaaattmttcttggggtcttggggccctggagaatacagtataggcatgcagtattaaggagttcacagatttcccccaatatacccattaacctttaggtatccttgaatctaggtaaaaaaaacccgtgatctggaggtcagatgctatggaagcaaaatagatttactcttctggagtcactaatggtgataatttgcaggtggagccatatgcaccttatgtcagtataaaaggtatacaaagtatcatggaacttgttggaatatcgatgttgttcacatgataagtactgtaggaatggcatcacacttgaatgactcttttgtttattgctatatccaagcatgtataatattagttgctcaataaacacttgagtgaatgaatgcgtccaaggagaaatgtgttctgcagaagagctgactcctgttaccagatttcactatattttgtttcaatagctaatatttccaaagcaaaataagaaaaacggaaaattacagaagatgctcactttatatctgagcaccaatttagttttcctgtttacttcttaccttacataaccgtaatttgctttcctttattatttttaatttatttttttattttataa

SEQ ID NO: 685715 - DNA, 598 bp, Homo sapiens
atgtgtaaaatttcagctaactaaaataccctctacaatcaacaaatgcttggtgcattagggacccctgttcagccataaggctgcaatatcccttctaaggaccatttgctttctgaagcacctgccatctgtactctakgatcttgaatcctttccttctgaggttgcttttctgcttacttgtcattatttccaatagcccaaaaattaaaacttgaaggatggatataggatattttggaggcaggacaaaagtgaatagcgtgataggaagccaagctccttggataaagacccagcttattatctattttagaagcaagacaaatgcttcagacatttcaagggcacacagatatactgaaatatggaatcttgctaataaatgaaagcagctgaatgaccatgctggctggcaagcaaccaccagaggtaaagtgattttctttgagctaaattgtgagtcaggtgctcttgctctctgtcagcttacacacagacacagacacacacacacagagatgcacaatacacagacacacacaaacacacagaccacacaaatgtgcactcttggagtacgcacactaagatc

SEQ ID NO: 685716 - DNA, 1427 bp, Homo sapiens
tgcagactgttttctggtatggcaagaaaaattcacataattcctaatgatatagtgccagtgaagccacatagagactctaaatataatttcccctctaagtaagaaaacactcagcaagtcctatttttaaaaggtaaccagcttatttctaaattactttaaaggttgactgtttaaatgttaacctgggtgctagctctctcagggaaagaaataggaagatgaaacacaggaacattcctagaaatgagtgtgtgacctatgtggtccttacagtaagttatactaattctaaatttatgtttatgtgttgtggccctattaagctgatctaacttttccattaagtgggcaggtagatttcctgtagtactcctgattgcctgaagaggtatactgttttcttgtgtttccattacaacatagagactaagagggaatcctctgtggtattttcacataggytgtgaatcttttatctgtaggttgtatttgtatctgagaggtgaatattaatagtctcttggcagcagaatgactttcttaaaaaaggggtttccctgtgtatgggtggattaacctttcaaaatacatgtttctacttaaaccacttagttactgtttgattcaaagagtcttaaagacaggtctccgtattagaccttgtaatacgcttacctagatctgagaaggactttcaggatagaacatggtgagtaacataatgtcttgtgcctttactttcatttcgcttacttaccagggttggttgtaacttaatttcttttttaaaatgcataaagttctcatattaaaaagacatatataactgatcaggaactcagtaatattaacaattaagataaggttttatgtgttcccggtgagaaataagatagaacttgttgtaaatgtaataatgcatggtgtttcctttacattttttattttacagcttttgttagttagcccctttgtgcacatcagataaaataagctttggaaatgacacatttaactaagtgaatgttaccctatttgctttattacttctaaaaatcctataaataataactaaatgtaagtacttatatgaataattatgctttccctcttgggatattacagggttgaacaatcttgattaagcaatgagcagagccagcatccatttagtgtgttcctctgcaggggacatttttcaccgtgttcttcatggtgctatagaatcacatcaatggggagcataaaacattctaaaagaatgtatttctgaatataaagttactggactgttttatttaaacagtcaaatttcccaaacgagattgcaaaataaacttccctaggaataatttaagtgtgagcagttaaactatcctgcaaggaaggttcattttaaaagccagcagtagacaaaggta

SEQ ID NO: 685717 - DNA, 612 bp, Homo sapiens
ttttaacccgtcctagattgcacagcaaaaacccagtcttataattttaagatgggcatgtttatcacctctccagactgtggaatgatctgtgttttaataaagtttattgtaagacgcttcaatgcaataatatacctggctcaatattaaagtgctaaattaatgatgcagaaaagcagcaattaatgctcacaggaataagatcaaataatctaaaactaaaaatacctctaacagagaaaaatggagtttgaatcyccggaataaagattttatttttttcatttcaaatttccccagtgttcatctgcaacattaaaccaaagatgttttaaataaagagcatggcctcctagactctctccagtggaatcctcagaagaaataaaaatatacatcctggattgctcaggatattgactaaatttcagcatttgacattatgctttctaaaattacattgaaaaatagcagttaaattctgaggcaagatttaacagaaaaataaagaaccttgctcaatcatcgtagggttctgaagactggtcatagcttaatagacaattgcaataatccaaagagccagagagctgatgcaaaaacaatgat

SEQ ID NO: 685718 - DNA, 769 bp, Homo sapiens
gctccagagggggctgtctggagaatattcctttggcctcagcttttcagatagtgttatcttataactgtccttgaagtgaactggctaagtagaggaaaacttgtgtttctcacttaacccttgctttattctgtttctctcttttaatttctgcatcaatatgattgccaaagaggatggaaagctgttttagtgagaaataaaaataagtttgggtcagaacatatttagataagcgttggaataatagaatgtatatttgatagaaaactgaatctgggtgatggaattgctgaaagagctcagcagcatagactgcttctttcttggggcaagtyatcttctgccaatctgcttttgatttgtggtatggttagacttgtcattgttgggtttctattgatgttaaaggggctttgttgtttcttttgttttggtagaaagtaattaaaccagtgaaaaatgattagctggaatttttttttcacagagaatatgattttctaaaaagtacaattatgctcaagttaagctttttataaaaggtatttggtgttctataaagggtaaagacattagactttttttaaacttaaaggtcacatttaaaggggaaaaggtgggaacatgagcaatgcttgcaagaaccacagcaaaggaattattatttttaaatttttatttttatttgagacagggtcttgctctgtcacccaggctggagtgtagtggcatgatcttggctcactgcagacttgacctcctg

SEQ ID NO: 685719 - DNA, 1558 bp, Homo sapiens
atctgcaaacctatttgcatccacaaattctctccaacagtcactattctgtcccttctatttaaggtagtcgtgggtttttgactccatctcattttaccatctcattctgtcattctgtggaaccacttactaagtacaaaatttagttcatgtgtgacataccttacaaaacttaaatatctttaaaattgaaatttatccggtttcattgtttattcatttaaaattaaaaatcaagaagtaaaacactctatcatcaatatgatttagtagaaacaaattatatcttgtagatgttattgaaattcacttattagttgctggacaattgtttacataaaatgactttttaacaaagggtcaaagttaaaactcctaggcagatctcaaaactatcaagtagtatagattttttctttttggttttgtaatatttgtgtggctttttttttttaacttttaaattttgactgccttgattaaagtttcagttaaaaaattttgctgtcaatttcttttctaaccattactattattgttgttctattgttactgaaactatagaggaatgggatgttaaaaaattatctactctgagtgtcaaatacacttcaccactggcagggctcagggctcttcattttttaataagttctagggggaattctaatacaaggaatggctttgagaaacaagactaaatttttaaaaatcctcacagtcctgctcaatcttctttctgtcaatagatgtcgcccctcccttgaaataagctcctcagaaaaatcctaatctacacacaaagctttctatgtgtttgtatgcttattatggattaatttgaactcatataattctcagatgtgccttaatttttaaaatatgtgtatatagtttatacacatacatcataagttggctgcattaaggagttggaaaatctgggacttcatttggatttggaaaatcagttaacatctataaattcaagttcctcattttgaaactgtgttggcaatatctactttagctacctcacattgttctataggttagaatgaaaaattgcatgtaaaatatactgtagctctgacatttgtacggtccctacagaaattttacattagccaatcaacactttttgaaaaatctaactccagtggtttttaaaatgtatgaagtgcttgtattttagtacaaacatctagttacatttaaaacattttgtgaaaagaattgccataaaatatttttaaagttcacatctttcttaccgtttacattcatgttataggctttttgtctcctctcctttcatttttttctactcccagagttctggaagctgaccaaagagatacttgtgtgaaatgcttgtattttccctaccatatttaaggctctcaagagcaattttatgctcctgttttaagatttttttaaaaaaaaattcaatatcaccaagaaatgaactgaaaatgacaggttttctggaagaaggttcagctaggctttattaagaagttaggaggccaggtgtgktggctcacgcctg

SEQ ID NO: 685720 - DNA, 651 bp, Homo sapiens
tcgtgggattctactacttttattttgtttaatttgaaccagaagactgtcagtccctgatctgtgtggtttcytgtgccctgatctgtgtggtttcttgtgcctgccttcttataactaattctaatcaatactttgcctctcttttcctttctagaacacaagcagacattcccaaacattctaaagaagggttacctggagattagaaaggaccatgacagttactggcaaagctgttatgcagaactttcaccttacaacttatacttctacagcctcgacagcagtgggaatcaaaacctttatgccacgtaccagctttcacacttccagagcatatctgttttaggcaacctggaggccaggatggtggatactgttttgtatgacaacactcagctacagctaaaggcagagtcaccatgggaggctttggactggggacagaagctttgggaagtagtgcatgctgctgtgcccggttacatggggcggcagaatgagctgacaatctcaccagggcttggccatcatgatgactatacacagaatcatagtttccagaagaaaaccagtgggctgctgccaccgtcccctgtcctggacagctccaaacagtaccaaaacatcctcaaatcagggactctc

SEQ ID NO: 685721 - DNA, 1178 bp, Homo sapiens
aaaataaaccaagaggtgtgctgtttgtttctgtttcctgctttctgcagcccttcttgatcatctaatattttcaaatacattgtcgatcaccaaaaggagcataaggggtatattgatttgtagcagatgtattaatagcccagcccctattccttacctgtagctgctgggaagaaaaccactcttaacactctacaaggtctcatctccagaatttgcagctgtttctagctgaggactttctctagcagcatgggagcttgatactgggcaagtgggaagaaaaggtgagggyaactaaaaagaatctccctggattcagtgatgtaattctgaggcatgttccacatagcttcccatagaattaagcccagatatctaacacaggaacttgcctcttaacacgtgtggtactggcttttctatctttcctgttttattttgttctctcttccttgtctcactttcgctgtgtcctcactcctgttttaagaatacccaaacaaaaacactcaattttttaagagtctcagaatacagttgatagtgtaacttgtaatctatgataatcagcttggatgctgtactgacaggaagatggtgaactcacaatgtctaattaagataaaattaaaaagtatattgattcatgtcaaaagatttaaaaaacctaagtggcagtgtcacaatttcttctttttagtttacatggtttcttaaacgcctacaattattttaaaggaagccttgaatctaggaaaaattgagacatatggaataaattactaacccatttctccttgaaatccattagatgcttgatgatttctcacatatatttctgaattgaaaagctagctgtgaattatttttatatgcatatccttaggtaatattttgtttttaacagtgaattgaaggtttaaagattaaattattctatccagagaataaaaagcaattatttcacaaggagaacatgtgtacgttgacacgacattttaaagtctagaatttaaaaaaggacccatatacttttgtgtcaaatagaatatgtttgtatcagtctgtctacagttttacacctgtcaaaatgtacttgaactacaacaacaaccttgaacaattttgaaatttatgattcctctgaaactgattaaaagaattatggtaga

SEQ ID NO: 685722 - DNA, 1178 bp, Homo sapiens
aaaataaaccaagaggtgtgctgtttgtttctgtttcctgctttctgcagcccttcttgatcatctaatattttcaaatacattgtcgatcaccaaaaggagcataaggggtatattgatttgtagcagatgtattaatagcccagcccctattccttacctgtagctgctgggaagaaaaccactcttaacactctacaaggtctcatctccagaatttgcagctgtttctagctgaggactttctctagcagcatgggagcttgatactgggcaagtgggaagaaaaggtgagggtaactaaraagaatctccctggattcagtgatgtaattctgaggcatgttccacatagcttcccatagaattaagcccagatatctaacacaggaacttgcctcttaacacgtgtggtactggcttttctatctttcctgttttattttgttctctcttccttgtctcactttcgctgtgtcctcactcctgttttaagaatacccaaacaaaaacactcaattttttaagagtctcagaatacagttgatagtgtaacttgtaatctatgataatcagcttggatgctgtactgacaggaagatggtgaactcacaatgtctaattaagataaaattaaaaagtatattgattcatgtcaaaagatttaaaaaacctaagtggcagtgtcacaatttcttctttttagtttacatggtttcttaaacgcctacaattattttaaaggaagccttgaatctaggaaaaattgagacatatggaataaattactaacccatttctccttgaaatccattagatgcttgatgatttctcacatatatttctgaattgaaaagctagctgtgaattatttttatatgcatatccttaggtaatattttgtttttaacagtgaattgaaggtttaaagattaaattattctatccagagaataaaaagcaattatttcacaaggagaacatgtgtacgttgacacgacattttaaagtctagaatttaaaaaaggacccatatacttttgtgtcaaatagaatatgtttgtatcagtctgtctacagttttacacctgtcaaaatgtacttgaactacaacaacaaccttgaacaattttgaaatttatgattcctctgaaactgattaaaagaattatggtaga

SEQ ID NO: 685723 - DNA, 1178 bp, Homo sapiens
aaaataaaccaagaggtgtgctgtttgtttctgtttcctgctttctgcagcccttcttgatcatctaatattttcaaatacattgtcgatcaccaaaaggagcataaggggtatattgatttgtagcagatgtattaatagcccagcccctattccttacctgtagctgctgggaagaaaaccactcttaacactctacaaggtctcatctccagaatttgcagctgtttctagctgaggactttctctagcagcatgggagcttgatactgggcaagtgggaagaaaaggtgagggtaactaaaaagaatctccctggattcagtgatgtaattctgaggcatgttccacatagcttcccatagaattaagcccagatatctaacacaggaacttgcctcttaacacgtgtggtactggcttttctatctttcctgttttattttgttctctcttccttgtctcactttcgctgtgtcctcactcctgytttaagaatacccaaacaaaaacactcaattttttaagagtctcagaatacagttgatagtgtaacttgtaatctatgataatcagcttggatgctgtactgacaggaagatggtgaactcacaatgtctaattaagataaaattaaaaagtatattgattcatgtcaaaagatttaaaaaacctaagtggcagtgtcacaatttcttctttttagtttacatggtttcttaaacgcctacaattattttaaaggaagccttgaatctaggaaaaattgagacatatggaataaattactaacccatttctccttgaaatccattagatgcttgatgatttctcacatatatttctgaattgaaaagctagctgtgaattatttttatatgcatatccttaggtaatattttgtttttaacagtgaattgaaggtttaaagattaaattattctatccagagaataaaaagcaattatttcacaaggagaacatgtgtacgttgacacgacattttaaagtctagaatttaaaaaaggacccatatacttttgtgtcaaatagaatatgtttgtatcagtctgtctacagttttacacctgtcaaaatgtacttgaactacaacaacaaccttgaacaattttgaaatttatgattcctctgaaactgattaaaagaattatggtaga

SEQ ID NO: 685724 - DNA, 1178 bp, Homo sapiens
aaaataaaccaagaggtgtgctgtttgtttctgtttcctgctttctgcagcccttcttgatcatctaatattttcaaatacattgtcgatcaccaaaaggagcataaggggtatattgatttgtagcagatgtattaatagcccagcccctattccttacctgtagctgctgggaagaaaaccactcttaacactctacaaggtctcatctccagaatttgcagctgtttctagctgaggactttctctagcagcatgggagcttgatactgggcaagtgggaagaaaaggtgagggtaactaaaaagaatctccctggattcagtgatgtaattctgaggcatgttccacatagcttcccatagaattaagcccagatatctaacacaggaacttgcctcttaacacgtgtggtactggcttttctatctttcctgttttattttgttctctcttccttgtctcactttcgctgtgtcctcactcctgttttaagaatacccaaacaaaaacactcawttttttaagagtctcagaatacagttgatagtgtaacttgtaatctatgataatcagcttggatgctgtactgacaggaagatggtgaactcacaatgtctaattaagataaaattaaaaagtatattgattcatgtcaaaagatttaaaaaacctaagtggcagtgtcacaatttcttctttttagtttacatggtttcttaaacgcctacaattattttaaaggaagccttgaatctaggaaaaattgagacatatggaataaattactaacccatttctccttgaaatccattagatgcttgatgatttctcacatatatttctgaattgaaaagctagctgtgaattatttttatatgcatatccttaggtaatattttgtttttaacagtgaattgaaggtttaaagattaaattattctatccagagaataaaaagcaattatttcacaaggagaacatgtgtacgttgacacgacattttaaagtctagaatttaaaaaaggacccatatacttttgtgtcaaatagaatatgtttgtatcagtctgtctacagttttacacctgtcaaaatgtacttgaactacaacaacaaccttgaacaattttgaaatttatgattcctctgaaactgattaaaagaattatggtaga

SEQ ID NO: 685725 - DNA, 643 bp, Homo sapiens
cccctcgccctgcccagccttcctggccttcttgtggggctgggctgagcagcccaaggaggtctcctgttacaggtcagggagctgaatccctgtttgcaaaacacagcctgagctccgttcacttcctgctgtccctgcccctaggaatgtaggctcagggagcactccccaggcgacctgtggttacagagtgktcagctgggggagaggaggtggagggtgtctgaccctgggctgggaggcaggtgcacttcggtgtcggatggggctcctgccctgatggcatcttctgtgctggtggtgggacgcctagacacttcccaaagaagaggcccctacgaacccagagttgtgaatgtgagggtgttggagagctgccacagctgtggggcccgctgaggggagcagaggaggagggggtgaggagctgacaaaggaggcgcagggcagcagggtggtgcacccaggtgggagcagcaagtgcaccatgcacaggccctggcacacaatagactctcagcacagctgccaaaagaagcattgagattgagctgggcacagaggcttgtatccatcatcccagcacattgggaagccaaggtggacgaatcacttgaggtcagaagaccagcctggccaa

SEQ ID NO: 685726 - DNA, 643 bp, Homo sapiens
cccctcgccctgcccagccttcctggccttcttgtggggctgggctgagcagcccaaggaggtctcctgttacaggtcagggagctgaatccctgtttgcaaaacacagcctgagctccgttcacttcctgctgtccctgcccctaggaatgtaggctcagggagcactccccaggcgacctgtggttacagagtggtcagctgggggagaggaggtggagggtgtctgaccctgggctgggaggcaggtgcacttcggtgtcggatggggctcctgccctgatggcatcttctgtgctggtggtgggacgcctagacacttcccaaagaagaggcccctacgaacccagagttgtgaatgtgagggtgttggagagctgccacagctgtggggcccgctgaggggagcagaggaggagggggtgaggagstgacaaaggaggcgcagggcagcagggtggtgcacccaggtgggagcagcaagtgcaccatgcacaggccctggcacacaatagactctcagcacagctgccaaaagaagcattgagattgagctgggcacagaggcttgtatccatcatcccagcacattgggaagccaaggtggacgaatcacttgaggtcagaagaccagcctggccaa

SEQ ID NO: 685727 - DNA, 631 bp, Homo sapiens
ttttcccaaccaacaaaaattataattcattaattttaattttatttaacaatactcttaagagttgaaggaaaaatattatctacattatgggttacaatctaagtataaataatacataaatatattaaaacttacaaagaatatgttttggaatcgaatataccatgcttctgtgatgacagttatttcatgctggttgtcacaattttacgtgaaaaactaatgaaaaartgtttttaactgtttctaaaaataagtttccaaaacagttttacattcgaaatatgaaaaagatgtctttgtgttccttaatctgatgagattttcacactctgcacatgataattgttagatttttattgtgttgataaattgtatatcaaataaaaaatgttattacctcttaaattaggatttttaggtgatataggcagaaaggaaggcaagtttttataactttgtctaaatgaactttctaaatgcctgagtatgaaaagatagcatgtctataaatcacaatgtatatattactgtatgacctaggaccaatcaaaactgttatctctgataacattatattgtgcccaatataaaatagatatgataatacctcaaacttcaatctagg

SEQ ID NO: 685728 - DNA, 631 bp, Homo sapiens
ttttcccaaccaacaaaaattataattcattaattttaattttatttaacaatactcttaagagttgaaggaaaaatattatctacattatgggttacaatctaagtataaataatacataaatatattaaaacttacaaagaatatgttttggaatcgaatataccatgcttctgtgatgacagttatttcatgctggttgtcacaattttacgtgaaaaactaatgaaaaagtgtttttaactgtttctaaaaataagtttccaaaacagttttacattcgaaatatgaaaaagatgtctttgtgttccttaatctgatgagattttcacactctgcacatgataattgwtagatttttattgtgttgataaattgtatatcaaataaaaaatgttattacctcttaaattaggatttttaggtgatataggcagaaaggaaggcaagtttttataactttgtctaaatgaactttctaaatgcctgagtatgaaaagatagcatgtctataaatcacaatgtatatattactgtatgacctaggaccaatcaaaactgttatctctgataacattatattgtgcccaatataaaatagatatgataatacctcaaacttcaatctagg

SEQ ID NO: 685729 - DNA, 2672 bp, Homo sapiens
ctgaagttgaaagattaaggggcatgtgcatggtcagcaacacattgagagaaaaacaggcaacataagagtaaagggacggctgggtcagtggytcacccctataatacaagcattttgggaggccctggtgcatggatcacgaggtcaggtgttcaagatgagcctggccatgacggtgaaaccccatctctactaaaagtacaaaaactagctgggtgtggtggcgggcagccgtaatcccagctacttgggaggctgaggcggagaattacctgagcctgggaggtggcggaggttgcagtgagctgagatcacgccactgcactccagcctgggtgacagagcaagactccgtctcaaaaaaaaaaaaaaaggaataaagaaattgcagaatatttgttgtcctgcaatcataaaaacaagataagccaagaactcagctggaagatggacagatagaaaggtctggtcaaagtcatgtttgtatagcactcattataaagagggccttgctcccaaggtaatggtataatgagaaaaagtacaagtaaatgaggctgacagcaattggcacagattaatacctggcacagccaattccaccttgggaaaaattctgaagagaaatttcagagaaatttggtagtgataaagtataaattcatgatgggacgattttacattggaaataagagagattctgtcaagtttgcttgctggaacaatttccagtaatggaaaaagttatatcttctctttaactgtgtataaataccacaaaccaaagtttcatgtgatcaaattatttccgtttattatcagatggccagttctgcacaaagaatgtctcaggacagaaatgatagaattcattcttgtgagttggtgttggtgattagcaactctgacagtttactaccttcactgtttttttctaagccttacagttacacccccaaaaaaaagaaaaaaaagaaaaaacaacaaagaaacaacaacaaaaatcaagaagaaatacaaaggggttcagatacatagacagggatgtcaatactaaattttacaaaggacttgcacagtcaaaacctccttgatccttacaaatttctgagaaagaaatgttagtatgcatgtttgatacatgaggaaacaggagctagagaaagagagagacttgtccaggcttacacagctactaagcagtaaaggtgagactggaacggagctgctgattctcagtcctgggagttattacgccactctgctttcttaccgagtgaacaatgtcatcagaactatggatgtctcaaagaagtaagaaataagtgtatgaagtagattagttgatttaattactattcatctccctttctcctctcaaggaaatgagttaaggggttgaattaagacaattgtgaggtgtgggaggagcagttttatcttcctgatggtgtcctttcttcattctctaatggttgaggtggtcttcatctctatggtcacctctcaactaggcatgaaggcttcagctgacctaagcaacatcaatcttttatttcttgactttcagggaactctctctctgatgctgatttgcactctgctggaattctgcctagctgtgctcactgctgtgctgcggtggaaacaggcttactctgacttccctggggtgagtgtgctggccggcttcacttaaccttgcctagtgtatcttatccctgcactgtgttgagtatgtcaccaagagtggtagaaggaacaatcagtcagtcatgagatacacatgggagggcatttgcattgtgatggaagacagagaagaaaagcagatggcaattgagtagctgataagctgaaaattcactggatatgaaaatagttaatcatgagaaatcaactgagtcaatcttcctattttgtcagcgaagggaatgagactctgggaagttaaatgactggcctggcattatgctatgagtgtgtgcctttgctgaggacactagaacctggcttgcctcccttataagcagaaacaatttctgccacaaccactagtctctttaatagtattgacttggtaaagggcatttacacacgtaactggatccagtgaatgtcttatgctctgcatttgcccctggtgatcttaaaattcgtttgcctttttaaagctatattaaaaatgtattgttgaatcaaacccctatggacttatggctttatttaactgaattaaaaagccttgatttatccaaaattgtattatagagtgtagaatgaatactagggtgataaattgcaattatttgaagaacctggtgatatgctctacttatcttggattagctaagaattctatgtatacagttggaaaaatggcatatatacatctatcttgaacctgattgaagtctgaagacctaacatattttgtttcttctagagtgtacttttcctgcctcacagttacattggtaattctggcatgtcctcaaaaatgactcatgactgtggatatgaagaactattgacttcttaagaaaaaagggagaaatattaatcagaaagttgattcttatgataatatggaaaagttaaccattatagaaaagcaaagcttgagtttcctaaatgtaagcttttaaagtaatgaacattaaaaaaaa

SEQ ID NO: 685730 - DNA, 2672 bp, Homo sapiens
ctgaagttgaaagattaaggggcatgtgcatggtcagcaacacattgagagaaaaacaggcaacataagagtaaagggacggctgggtcagtggctcacccctataatacaagcattttgggaggccctggtgcatggatcacgaggtcaggtgttcaagatgagcctggccatgacggtgaaaccccatctctactaaaagtacaaaaactagctgggtgtggtggcgggcagccgtaatcccagctacttgggaggctgaggcggagaattacctgagcctgggaggtggcggaggttgcagtgagctgagatcacgccactgcactccagcctgggtgacagagcaagactccgtctcaaaaaaaaaaaaaaaggaataaagaaattgcagaatatttgttgtcctgcaatcataaaaacaagataagccaagaactcagctggaagatggacagatagaaaggtctggtcaaagtcatgtttgtatagcactcattataaagagggccttgctcccaaggtaatggtataatgagaaaaagtacaagtaaatgaggctgacagcaattggcacagattaatacctggcacagccaattccaccttgggaaaaattctgaagagaaatttcagagaaatttggtagtgataaagtataaattcatgatgggacgattttacattggaaataagagagattctgtcaagtttgcttgctggaacaatttccagtaatggaaaaagttatatcttctctttaactgtgtataaataccacaaaccaaagtttcatgtgatcaaattatttccgtttattatcagatggccagttctgcacaaagaatgtctcaggacagaaatgatagaattcattcttgtgagttggtgttggtgattagcaactctgacagtttactaccttcactgtttttttctaagccttacagttacacccccaaaaaaaagaaaaaaaagaaaaaacaacaaagaaacaacaacaaaaatcaagaagaaatacaaaggggttcagatacatagacagggatgtcaatactaaattttacaaaggacttgcacagtcaaaacctccttgatccttacaaatttctgagaaagaaatgttagtatgcatgtttgatacatgaggaaacaggagctagagaaagagagagacttgtccaggcttacacagctactaagcagtaaaggtgagactggaacggagctgctgattctcagtcctgggagttattacgccactctgctttcttaccgagtgaacaatgtcatcagaactatggatgtctcaaagaagtaagaaataagtgtatgaagtagattagttgatttaattactattcatctccctttctcctctcaaggaaatgagttaaggggttgaattaagacaattgtgaggtgtgggaggagcagttttatcttcctgatggtgtcctttcttcattctctaatggttgaggtggtcttcatctctatggtcacctctcaactaggcatgaaggcttcagctgacctaagcaacatcaatcttttatttcttgactttcagggaactctctctctgatgctgatttgcactctgctggaattctgcctagctgtgctcactgctgtgctgcggtggaaacaggcttactctgacttccctggggtgagtgtgctggccggcttcacttaaccttgcctagtgtatcttatccctgcactgtgttgagtatgtcaccaagagtggtagaaggaacaaycagtcagtcatgagatacacatgggagggcatttgcattgtgatggaagacagagaagaaaagcagatggcaattgagtagctgataagctgaaaattcactggatatgaaaatagttaatcatgagaaatcaactgagtcaatcttcctattttgtcagcgaagggaatgagactctgggaagttaaatgactggcctggcattatgctatgagtgtgtgcctttgctgaggacactagaacctggcttgcctcccttataagcagaaacaatttctgccacaaccactagtctctttaatagtattgacttggtaaagggcatttacacacgtaactggatccagtgaatgtcttatgctctgcatttgcccctggtgatcttaaaattcgtttgcctttttaaagctatattaaaaatgtattgttgaatcaaacccctatggacttatggctttatttaactgaattaaaaagccttgatttatccaaaattgtattatagagtgtagaatgaatactagggtgataaattgcaattatttgaagaacctggtgatatgctctacttatcttggattagctaagaattctatgtatacagttggaaaaatggcatatatacatctatcttgaacctgattgaagtctgaagacctaacatattttgtttcttctagagtgtacttttcctgcctcacagttacattggtaattctggcatgtcctcaaaaatgactcatgactgtggatatgaagaactattgacttcttaagaaaaaagggagaaatattaatcagaaagttgattcttatgataatatggaaaagttaaccattatagaaaagcaaagcttgagtttcctaaatgtaagcttttaaagtaatgaacattaaaaaaaa

SEQ ID NO: 685731 - DNA, 2672 bp, Homo sapiens
ctgaagttgaaagattaaggggcatgtgcatggtcagcaacacattgagagaaaaacaggcaacataagagtaaagggacggctgggtcagtggctcacccctataatacaagcattttgggaggccctggtgcatggatcacgaggtcaggtgttcaagatgagcctggccatgacggtgaaaccccatctctactaaaagtacaaaaactagctgggtgtggtggcgggcagccgtaatcccagctacttgggaggctgaggcggagaattacctgagcctgggaggtggcggaggttgcagtgagctgagatcacgccactgcactccagcctgggtgacagagcaagactccgtctcaaaaaaaaaaaaaaaggaataaagaaattgcagaatatttgttgtcctgcaatcataaaaacaagataagccaagaactcagctggaagatggacagatagaaaggtctggtcaaagtcatgtttgtatagcactcattataaagagggccttgctcccaaggtaatggtataatgagaaaaagtacaagtaaatgaggctgacagcaattggcacagattaatacctggcacagccaattccaccttgggaaaaattctgaagagaaatttcagagaaatttggtagtgataaagtataaattcatgatgggacgattttacattggaaataagagagattctgtcaagtttgcttgctggaacaatttccagtaatggaaaaagttatatcttctctttaactgtgtataaataccacaaaccaaagtttcatgtgatcaaattatttccgtttattatcagatggccagttctgcacaaagaatgtctcaggacagaaatgatagaattcattcttgtgagttggtgttggtgattagcaactctgacagtttactaccttcactgtttttttctaagccttacagttacacccccaaaaaaaagaaaaaaaagaaaaaacaacaaagaaacaacaacaaaaatcaagaagaaatacaaaggggttcagatacatagacagggatgtcaatactaaattttacaaaggacttgcacagtcaaaacctccttgatccttacaaatttctgagaaagaaatgttagtatgcatgtttgatacatgaggaaacaggagctagagaaagagagagacttgtccaggcttacacagctactaagcagtaaaggtgagactggaacggagctgctgattctcagtcctgggagttattacgccactctgctttcttaccgagtgaacaatgtcatcagaactatggatgtctcaaagaagtaagaaataagtgtatgaagtagattagttgatttaattactattcatctccctttctcctctcaaggaaatgagttaaggggttgaattaagacaattgtgaggtgtgggaggagcagttttatcttcctgatggtgtcctttcttcattctctaatggttgaggtggtcttcatctctatggtcacctctcaactaggcatgaaggcttcagctgacctaagcaacatcaatcttttatttcttgactttcagggaactctctctctgatgctgatttgcactctgctggaattctgcctagctgtgctcactgctgtgctgcggtggaaacaggcttactctgacttccctggggtgagtgtgctggccggcttcacttaaccttgcctagtgtatcttatccctgcactgtgttgagtatgtcaccaagagtggtagaaggaacaatcagycagtcatgagatacacatgggagggcatttgcattgtgatggaagacagagaagaaaagcagatggcaattgagtagctgataagctgaaaattcactggatatgaaaatagttaatcatgagaaatcaactgagtcaatcttcctattttgtcagcgaagggaatgagactctgggaagttaaatgactggcctggcattatgctatgagtgtgtgcctttgctgaggacactagaacctggcttgcctcccttataagcagaaacaatttctgccacaaccactagtctctttaatagtattgacttggtaaagggcatttacacacgtaactggatccagtgaatgtcttatgctctgcatttgcccctggtgatcttaaaattcgtttgcctttttaaagctatattaaaaatgtattgttgaatcaaacccctatggacttatggctttatttaactgaattaaaaagccttgatttatccaaaattgtattatagagtgtagaatgaatactagggtgataaattgcaattatttgaagaacctggtgatatgctctacttatcttggattagctaagaattctatgtatacagttggaaaaatggcatatatacatctatcttgaacctgattgaagtctgaagacctaacatattttgtttcttctagagtgtacttttcctgcctcacagttacattggtaattctggcatgtcctcaaaaatgactcatgactgtggatatgaagaactattgacttcttaagaaaaaagggagaaatattaatcagaaagttgattcttatgataatatggaaaagttaaccattatagaaaagcaaagcttgagtttcctaaatgtaagcttttaaagtaatgaacattaaaaaaaa

SEQ ID NO: 685732 - DNA, 2672 bp, Homo sapiens
ctgaagttgaaagattaaggggcatgtgcatggtcagcaacacattgagagaaaaacaggcaacataagagtaaagggacggctgggtcagtggctcacccctataatacaagcattttgggaggccctggtgcatggatcacgaggtcaggtgttcaagatgagcctggccatgacggtgaaaccccatctctactaaaagtacaaaaactagctgggtgtggtggcgggcagccgtaatcccagctacttgggaggctgaggcggagaattacctgagcctgggaggtggcggaggttgcagtgagctgagatcacgccactgcactccagcctgggtgacagagcaagactccgtctcaaaaaaaaaaaaaaaggaataaagaaattgcagaatatttgttgtcctgcaatcataaaaacaagataagccaagaactcagctggaagatggacagatagaaaggtctggtcaaagtcatgtttgtatagcactcattataaagagggccttgctcccaaggtaatggtataatgagaaaaagtacaagtaaatgaggctgacagcaattggcacagattaatacctggcacagccaattccaccttgggaaaaattctgaagagaaatttcagagaaatttggtagtgataaagtataaattcatgatgggacgattttacattggaaataagagagattctgtcaagtttgcttgctggaacaatttccagtaatggaaaaagttatatcttctctttaactgtgtataaataccacaaaccaaagtttcatgtgatcaaattatttccgtttattatcagatggccagttctgcacaaagaatgtctcaggacagaaatgatagaattcattcttgtgagttggtgttggtgattagcaactctgacagtttactaccttcactgtttttttctaagccttacagttacacccccaaaaaaaagaaaaaaaagaaaaaacaacaaagaaacaacaacaaaaatcaagaagaaatacaaaggggttcagatacatagacagggatgtcaatactaaattttacaaaggacttgcacagtcaaaacctccttgatccttacaaatttctgagaaagaaatgttagtatgcatgtttgatacatgaggaaacaggagctagagaaagagagagacttgtccaggcttacacagctactaagcagtaaaggtgagactggaacggagctgctgattctcagtcctgggagttattacgccactctgctttcttaccgagtgaacaatgtcatcagaactatggatgtctcaaagaagtaagaaataagtgtatgaagtagattagttgatttaattactattcatctccctttctcctctcaaggaaatgagttaaggggttgaattaagacaattgtgaggtgtgggaggagcagttttatcttcctgatggtgtcctttcttcattctctaatggttgaggtggtcttcatctctatggtcacctctcaactaggcatgaaggcttcagctgacctaagcaacatcaatcttttatttcttgactttcagggaactctctctctgatgctgatttgcactctgctggaattctgcctagctgtgctcactgctgtgctgcggtggaaacaggcttactctgacttccctggggtgagtgtgctggccggcttcacttaaccttgcctagtgtatcttatccctgcactgtgttgagtatgtcaccaagagtggtagaaggaacaatcagtcartcatgagatacacatgggagggcatttgcattgtgatggaagacagagaagaaaagcagatggcaattgagtagctgataagctgaaaattcactggatatgaaaatagttaatcatgagaaatcaactgagtcaatcttcctattttgtcagcgaagggaatgagactctgggaagttaaatgactggcctggcattatgctatgagtgtgtgcctttgctgaggacactagaacctggcttgcctcccttataagcagaaacaatttctgccacaaccactagtctctttaatagtattgacttggtaaagggcatttacacacgtaactggatccagtgaatgtcttatgctctgcatttgcccctggtgatcttaaaattcgtttgcctttttaaagctatattaaaaatgtattgttgaatcaaacccctatggacttatggctttatttaactgaattaaaaagccttgatttatccaaaattgtattatagagtgtagaatgaatactagggtgataaattgcaattatttgaagaacctggtgatatgctctacttatcttggattagctaagaattctatgtatacagttggaaaaatggcatatatacatctatcttgaacctgattgaagtctgaagacctaacatattttgtttcttctagagtgtacttttcctgcctcacagttacattggtaattctggcatgtcctcaaaaatgactcatgactgtggatatgaagaactattgacttcttaagaaaaaagggagaaatattaatcagaaagttgattcttatgataatatggaaaagttaaccattatagaaaagcaaagcttgagtttcctaaatgtaagcttttaaagtaatgaacattaaaaaaaa

SEQ ID NO: 685733 - DNA, 2672 bp, Homo sapiens
ctgaagttgaaagattaaggggcatgtgcatggtcagcaacacattgagagaaaaacaggcaacataagagtaaagggacggctgggtcagtggctcacccctataatacaagcattttgggaggccctggtgcatggatcacgaggtcaggtgttcaagatgagcctggccatgacggtgaaaccccatctctactaaaagtacaaaaactagctgggtgtggtggcgggcagccgtaatcccagctacttgggaggctgaggcggagaattacctgagcctgggaggtggcggaggttgcagtgagctgagatcacgccactgcactccagcctgggtgacagagcaagactccgtctcaaaaaaaaaaaaaaaggaataaagaaattgcagaatatttgttgtcctgcaatcataaaaacaagataagccaagaactcagctggaagatggacagatagaaaggtctggtcaaagtcatgtttgtatagcactcattataaagagggccttgctcccaaggtaatggtataatgagaaaaagtacaagtaaatgaggctgacagcaattggcacagattaatacctggcacagccaattccaccttgggaaaaattctgaagagaaatttcagagaaatttggtagtgataaagtataaattcatgatgggacgattttacattggaaataagagagattctgtcaagtttgcttgctggaacaatttccagtaatggaaaaagttatatcttctctttaactgtgtataaataccacaaaccaaagtttcatgtgatcaaattatttccgtttattatcagatggccagttctgcacaaagaatgtctcaggacagaaatgatagaattcattcttgtgagttggtgttggtgattagcaactctgacagtttactaccttcactgtttttttctaagccttacagttacacccccaaaaaaaagaaaaaaaagaaaaaacaacaaagaaacaacaacaaaaatcaagaagaaatacaaaggggttcagatacatagacagggatgtcaatactaaattttacaaaggacttgcacagtcaaaacctccttgatccttacaaatttctgagaaagaaatgttagtatgcatgtttgatacatgaggaaacaggagctagagaaagagagagacttgtccaggcttacacagctactaagcagtaaaggtgagactggaacggagctgctgattctcagtcctgggagttattacgccactctgctttcttaccgagtgaacaatgtcatcagaactatggatgtctcaaagaagtaagaaataagtgtatgaagtagattagttgatttaattactattcatctccctttctcctctcaaggaaatgagttaaggggttgaattaagacaattgtgaggtgtgggaggagcagttttatcttcctgatggtgtcctttcttcattctctaatggttgaggtggtcttcatctctatggtcacctctcaactaggcatgaaggcttcagctgacctaagcaacatcaatcttttatttcttgactttcagggaactctctctctgatgctgatttgcactctgctggaattctgcctagctgtgctcactgctgtgctgcggtggaaacaggcttactctgacttccctggggtgagtgtgctggccggcttcacttaaccttgcctagtgtatcttatccctgcactgtgttgagtatgtcaccaagagtggtagaaggaacaatcagtcagtcaygagatacacatgggagggcatttgcattgtgatggaagacagagaagaaaagcagatggcaattgagtagctgataagctgaaaattcactggatatgaaaatagttaatcatgagaaatcaactgagtcaatcttcctattttgtcagcgaagggaatgagactctgggaagttaaatgactggcctggcattatgctatgagtgtgtgcctttgctgaggacactagaacctggcttgcctcccttataagcagaaacaatttctgccacaaccactagtctctttaatagtattgacttggtaaagggcatttacacacgtaactggatccagtgaatgtcttatgctctgcatttgcccctggtgatcttaaaattcgtttgcctttttaaagctatattaaaaatgtattgttgaatcaaacccctatggacttatggctttatttaactgaattaaaaagccttgatttatccaaaattgtattatagagtgtagaatgaatactagggtgataaattgcaattatttgaagaacctggtgatatgctctacttatcttggattagctaagaattctatgtatacagttggaaaaatggcatatatacatctatcttgaacctgattgaagtctgaagacctaacatattttgtttcttctagagtgtacttttcctgcctcacagttacattggtaattctggcatgtcctcaaaaatgactcatgactgtggatatgaagaactattgacttcttaagaaaaaagggagaaatattaatcagaaagttgattcttatgataatatggaaaagttaaccattatagaaaagcaaagcttgagtttcctaaatgtaagcttttaaagtaatgaacattaaaaaaaa

SEQ ID NO: 685734 - DNA, 1081 bp, Homo sapiens
tattttatgagaaataactatatttccccccctccagaaaatgaataatgtgaaaaaaggatccagaatatccacagtgacattttcccgtggtttgaagcttgggctagtgataaacctatatttaatatcctttcacctgccctattctgtcattcttttaatccttcatttcttttgggcatgctcatctgagactccagatggaaatgctcagaggatagatttttcatcctctgagcagggggctaagaaaaggtgccagaaagaaatagtagcaatatgtgcctgtcagctatcaggaaggcctgtaaagggggcgtcagctagtagtgcataggtggccttttattttgctgcttttccacactgagtttaaatacaattatcatggatgacccacaaccctagaatagatctgaactcaatatattttaaatataactcaactggaagcatgttgtgacagaatrctatatagtttttcagatgaagagcctgaaaagtaattactgacgtcgtgagggttggctgttgtattatgaggctagtgggacagtgtatttggcattaggtcttatgaaatatgagtttgcaacaccattggtcttcccctagatttgcaacttaccccaaggactttgggttctcccttcaagaacttctcttgcaatcctttccacagatgtgaatgtatgacagccatgtttcccagctggggcacaccagggccagcccctggcatggcctgttccattccttgcatggttgtcatggcagcagaaaaggtgctacaataagaaatgtaatttagtatgatgtcctggaaatggcaaaagaggacatgacactttggggcaggttcctccctaaggacagaatctggtctacattctcttcccatatcataatagctgttagagctggggaagtggaataggcaacacattaagtgtgtgtgtggggcgggggcaggtgggagagaaactaaatgtcatatgatatcaagatgctagaaaatcctgcagagagggacatgttgacagaagcgaggtaaacctgttggacctctaaaattaga

SEQ ID NO: 685735 - DNA, 1398 bp, Homo sapiens
atctgaaattacgattctcaaaattaaaatagattatatttcagaaatattgtcctggtttcaracaacaggaataaataataataaaatcagagaattaggctcaaggtagaggcagttctctagggaagggatgatggttactgaactacctgtgatgctagtgaagttggagagaatgaatggatttgaaagatgcttaggaacaagaaatgacagtacttgttggtataatggatgtgtaaatcaggagaaaaaacaggaaaggatgacactcagattctgggttaggaaactgaatgagtgatagagccattcagtaaggcaatagacatggaccaggacagaactgcaggaacaaatagtaaaattttgaacgtatttgatcagagttgtgtagggaccttcaaataaagttgacaagaagtggataactggcaggagctagggaatgagaacatggctatagaggtaaacccaacagctcttcgcccagagggatgaggtcacccaggcttgtgggtggaggcagaaaacgtcaaaccctttttctagaggatagagacagtataatcagaaataagatttcccagaggattatgaaaaagagggtaaggaagatagcaggcaaactcggaaaatgtggcattgcagaagacaagggtacagagtttcatgacttcctaagagaggttgaaattctggactaaggacaggcatcagtctctcctcccactccatatggtatgaaatgagacagtatcaggttattattagcagataacaatttcaagagaacaataacatgaaatttgacagagaaatatatatattctatatatatagaatatatatcctattatatataatagaatatctatatattatatataattatatatcatatacagatatattatatataatagatataatatataatatatattatataatagaatatatattatattataatagaatatattatatatataatagaatgtatctctatataatatgttatattatatattaacagagactgggtttcaccattttggccaggctgttctcgaactccagatctcaagtaatataccctcctcagcctcccaaagtgctgggattacaggcgtgagccactgcacccggccttgagctggattttgaatcctatgccctatgtgagctggagcaagttgcttaggctttctgcacctcagtttactcatctgtaaaatatagatagtaatatgtcatagcgttgttgaaagggttatattaggtaatataaataaattacttatcattttttgagcacagaaatatttcagtaggaagaaatcattcaattattattaaatacttcagagagacaagctaacaacagtaaaa

SEQ ID NO: 685736 - DNA, 1398 bp, Homo sapiens
atctgaaattacgattctcaaaattaaaatagattatatttcagaaatattgtcctggtttcagacaacaggaataaataataataaaatcagagaattaggctcaaggtagaggcagttctctagggaagggatgatggttactgaactacctgtgatgctagtgaagttggagagaatgaatggatttgaaagatgcttaggaacaagaaatgacagtacttgttggtataatggatgtgtaaatcaggagaaaaaacaggaaaggatgacactcagattctgggttaggaaactgaatgagtgatagagccattcagtaaggcaatagacatggaccaggacagaactgcaggaacaaatagtaaaattttgaacgtatttgatcagagttgtgtagggaccttcaaataaagttgacaagaagtggataactggcaggagctagggaatgagaacatggctatagaggtaaacccaacagctcttcgcccagagggatgaggtcacccaggcttgtgggtggaggcagaaaacgtcaaaccctttttctagaggatagagacagtataatcagaaataagatttcccagaggattatgaaaaagagggtaaggaagatagcaggcaaactcggaaaatgtggcattgcagaagacaagggtacagagtttcatgacttcctaagagaggttgaaattctggactaaggacaggcatcagtctctcctcccactccatatggtatgaaatgagacagtatcaggttattattagcagataacaatttcaagagaacaataacatgaaatttgacagagaaatatatatattctatatatatagaatatatatcctattatatataatagaatatctatatattatatataattatatatcatatacagatatattatatataatagatataatatataatatatattatataatagaatatatattatattataatagaatatattatatatataatagaatgtatctctatataatatgttatattatatattaacagagactgggtttcaccattttggccaggctgttctcgaactccagatctcaagtaatataccctcctcagcctcccaaagtgctgggattacaggcgtgagccactgcacccggccttgagctggrttttgaatcctatgccctatgtgagctggagcaagttgcttaggctttctgcacctcagtttactcatctgtaaaatatagatagtaatatgtcatagcgttgttgaaagggttatattaggtaatataaataaattacttatcattttttgagcacagaaatatttcagtaggaagaaatcattcaattattattaaatacttcagagagacaagctaacaacagtaaaa

SEQ ID NO: 685737 - DNA, 1434 bp, Homo sapiens
agttgttagagctagggaagtggaagaggcaacacattaagtggggggtggagagagagagagagagacttaaatgttatatgatatcaataatatgctaggagagaggacatgttgacagaagtgaggtaaattagagaaatttcttcaacttcaaatcccaagtctgctcagattttatttctatcccttttaatgcctagtctcttgattacagccacttccccatgaaggattacttttataatagtaataagctacacaaattcatctgccttccaatttattgtacagtattgtatagttcctccttttataaccaaagcacagctaaattctcagggctgaaaatcttcccatgtaaccttgtattttgtcccataagctctgaactctgggaatgaaacttacagctctgagtcatattcttggcaccacaaatttaaatctcttttcctattacagtgctttaaattctaacttgctggtgcatagcaagaatacataaagccattttttgaaattccaagcacaaagatattacttttatgcctctgtctctcctcagtataatgattccaaccaagtaatgtggagataggctaaagccacatggaaatttttacctatgtatttgaattgatattcagatgtttcatggcccacttccataaaattttagggaagtgaagcttgctaatatccttcaagtcatagttgatttcagtggagcatatatgctaaaaactgtcaggtttggagatgtgtgcccttttattggtaacataaatgaaaaaaaaagttattgtagtccaaatttgctatgtacagaaaaaattcagatttctgtggaaataattgtcatcgtgtatttatctctgatagatcaatgaaaatacattattagctatctagcaataaaattgattaaagttgggagaaggagggtgaatttcagagaaagctagaggggaaaagttaaaatgaaaataaaagattaatcatttagagcattaattttagtaatgtatacattcaaaattatgaaaagcagtaaaataaaaagtacaaaattacaaattataaaataagaagttaagtatttttaaaagaaagataaatataattaataataagaaataaataatgtaaatgtgattgaagtagttaagataaggacttaaatgtaagaatgtaaccaaaaagtcaatgttcttattcttatctcatctagaaaagttccaaaaacaatttggacaaacagaattagaactccattttgttatgaaagtgggaaacaactaaaatctctataagtcaggtgaaatgagtgttaaaaacaaagattgcataaggataaatttgggggaaaatgtagaaacagtatcaaagaaacaggacactatggycacagatttcagattatacttatca

SEQ ID NO: 685738 - DNA, 595 bp, Homo sapiens
aattagctcagttgtctgtgttaaatgtctggtagtttgtcattgataccttccgttacataccttctatgctccatcaatcatattctaattctacgcaaccattttttaactctgtatttctcccatctcctcgtgccaagccatcatcctatttttatcaggagtattgcttacagcctctgaatgttccccggtgtccatttgtagccttggatgttcaacccacccctgactttgtagccaaatgatcaaatgcaaagacaactgtgtcaccctcccctttaaagtcctttctttgcatttcaccacctttagtataaagataaaaatttaatgttgttgatattgctgctacttcaacccatatctattatcgtagccttaccttgaatttctcctttttattttttaaagccccaagtatattggacttatttaagttgttctaaagtaatttcaytcctatattgagacatttgcatatgttgagcccgtttgcaggaatgttccactcccccggccatgaccaccttacaagaatagcaacaaacccaccacagcatctaatcttctcacacactaacagttttgc

SEQ ID NO: 685739 - DNA, 612 bp, Homo sapiens
gagaaaatttattttggtgagcaggtaacagtttctgcaccactcctgttatgtaaaatatcgtatagatccaattgacatattttctatctttctaatataaaaaaaccataatcttctgtttttcaagtgtcaaaacttatgccaccttactgtctcctccattcccctggcttcttttgatttctttataatatacgtatttgttttcatttatctgcgcttgagatgctttgattcattccaagtcatcccaggctcaaaactccacacacagttgtaggtcagtctttgagatgtcggccaaatccttcccttctgtattcrtccattttcacactgctgataaagacatacccacgactgggtaatttataaagaaaaagaggtttaatggactcatggttccatgtaactaactggcctcacaatcatggtggagggtgaaaggcacatcttacatggtgacagacaagaaagaatgatagccaagaaaaaggggaaacccgttataaaaccatcagatctcgtgagacttattcactaccatgtgaacattatggggggaaccacccccctgattccattatctcccacttggtccctcccaca

SEQ ID NO: 685740 - DNA, 1520 bp, Homo sapiens
tgagaaattgatctcacaaagagagagaaattaaaaccaaacacaataaagctaagtaaatgctttcagagtgactttgcactgggttctaaacgtttccactgagatgttcctacactgaaatatgctgtagaattggatatagttcaaaactgataactttttcagtaaaaacacatagttgaggtggcattgaatcatttaccctgtagctcttcacagtgctctgaactgaataatctgtcatttcacattaacttggacatgaagcctgacagtatttcttaatgctgactaaaaaggaaaaggacaaatattcgtaaagaattgtaaccttcattatttcttgaatttgtgtgagatttttgcgtgttctttttaatctgttgtctgcataaatatctaaatctcataggaactaggggtacattaagtgctcttctgaaaccactaaggtcacagagatagcatccggggcaagattataaatatttgatatccccacctgggatggttcttagtccattttaaattatgctgacctaattagaaagcttgaccgtggctaagctttttaatattaaaagaactcattttatttattgtttcaattcattcacagctcttccacaatttagctcaagttatttttttgaacagagtcaaatcaacatcaatcaacttttatgtgtggcattgtaaaatacagtggcagtcagtacaataacatcacttgtaatctcatgtgtaattgacctccctttaattccctgcctcatccccctcatgtataaaaagaagagtgtgggcaagatttctagcacatttcacctatttacccataaataaaaagttttttttttgtttttgtttcaggataccttctataatttcttttctatcttaaagttaacagtaagcatcagagaatcagtgtattctttttttttcctttctctgaagttgccttgaagtttaagtttctttctcatcaagatcagtctcagagcaaagaaaagatgccatttctgacttccaatttgtactccaccatagacagcatggaactrtccttgtctatggatgacacgcaagaatataaaacatgctcagtgcgtttgagataatcactgatccctttttcacttatgtgaaacaacctgcttactgacaacactcaagagctaatttctgtggtaggggataactgtaagtacaaaaagaattttaagtcattgttgactagagtatatgaggaaatcaagaataagttaaaatgttggttgagtgtagggcttagccagtgccataaatagaaaggttttggagaaatatgatagtattgtttggataacccaatctaaaatcataatagcctgactatcttatgaagtgttaagcccaaaataactgcatcatttgtgcattttatttcttgtaatgaaaattgacatagtgcaaacaaaatcatacacagattttatatttagacagactgtcacaagcttttgggcatgcca

SEQ ID NO: 685741 - DNA, 596 bp, Homo sapiens
ctcaggagttagataaatatggcttaaaatccttccttagttatgtcctagcttatgatgcaggcaagttctttaacttgtcagagcccccatttttctgtatgtaataataatatttatctcaaggattgctttaggggttaacaaaatagaatgcaaggcgatcagcactgtgcctaacaaacaccaaacaagcatcaaataaacattaggtatcattcctaatggcactgtagaatcttaaaattgcatgagaccttattcattcactctcccgctctcagtagtaattattttggttatgtgatggaagatgattcaacttcyatgtttaaactttcagagatagggaattcactattttgaaggtaacccaattaatttttgaagagctttattggaactttcttactaagaaacctaaaaatacttcctgtaagttagtaataacattttcctatatgtcattatttacaattaacagagctcttttgatacattagtcacttttcaatacattatcttatttgacacaataaccctgtgacctattcattaatttattcatttctttgctcagtaaatacttattgagc

SEQ ID NO: 685742 - DNA, 645 bp, Homo sapiens
gggcaattgataaagaatgaaaaaataacacacatcaagtattcaattggagatgcattttgagagaatgaaggaaaagtagtctgcaaataattagtggctgataattttatataaattgcatatgcacaattgagaacatatataataaagcatgtatgtaataatatgtatgatgtagatattgatatatttcccagctatgtccaatataaaggtctagaaaaaaatcatcagacctccagtagcaaaataaatcttcagtattaaaattgtrgttttgattgcgaatgagaatctttagcatcaaagttgtggttttgtcattttcccactaaaagaatccaaacatctttgagaaatgcatgggtccaagtgtggatcaagaaatgtagaatatcagtctggaacatcttacattagatagtaaagaagctctcatgactaattatagggtcttgtgattgattcctgcctatcaaaccaattttaaaaggccactattaatgggacaatttgagcaggataataactgcaataaatggaaatccatcaaatatttaaatgcatgagttcatgatgataagaaaataattagagactcaaggaactcctctttaaaaacgatagttaaatggaaatgga

SEQ ID NO: 685743 - DNA, 645 bp, Homo sapiens
gggcaattgataaagaatgaaaaaataacacacatcaagtattcaattggagatgcattttgagagaatgaaggaaaagtagtctgcaaataattagtggctgataattttatataaattgcatatgcacaattgagaacatatataataaagcatgtatgtaataatatgtatgatgtagatattgatatatttcccagctatgtccaatataaaggtctagaaaaaaatcatcagacctccagtagcaaaataaatcttcagtattaaaattgtagttttgattgcgaatgagaatctttagcatcaaagttgtggttttgtcattttcccactaaaagaatccaaacatctttgagaaatgcatgggtccaagtgtggatcaagaaatgtagaatatcagtctggaacatcttacattagatagtaaagaagctctcatgactaattatagggtcttgtgattgrttcctgcctatcaaaccaattttaaaaggccactattaatgggacaatttgagcaggataataactgcaataaatggaaatccatcaaatatttaaatgcatgagttcatgatgataagaaaataattagagactcaaggaactcctctttaaaaacgatagttaaatggaaatgga

SEQ ID NO: 685744 - DNA, 645 bp, Homo sapiens
gggcaattgataaagaatgaaaaaataacacacatcaagtattcaattggagatgcattttgagagaatgaaggaaaagtagtctgcaaataattagtggctgataattttatataaattgcatatgcacaattgagaacatatataataaagcatgtatgtaataatatgtatgatgtagatattgatatatttcccagctatgtccaatataaaggtctagaaaaaaatcatcagacctccagtagcaaaataaatcttcagtattaaaattgtagttttgattgcgaatgagaatctttagcatcaaagttgtggttttgtcattttcccactaaaagaatccaaacatctttgagaaatgcatgggtccaagtgtggatcaagaaatgtagaatatcagtctggaacatcttacattagatagtaaagaagctctcatgactaattatagggtcttgtgattgattcctgcctatcaaaccaattttaaaaggccactattaatgggacaatttgagcaggataayaactgcaataaatggaaatccatcaaatatttaaatgcatgagttcatgatgataagaaaataattagagactcaaggaactcctctttaaaaacgatagttaaatggaaatgga

SEQ ID NO: 685745 - DNA, 565 bp, Homo sapiens
aaaaaaacaaaaacaaaaacaaaaaattagctgggtgcagtggcgggcgcctgtagtcccagcttactcctgaggctgaggcaggagaatggcgtgaacccaggaggctgagcttgcagtgagccgagatcgtgccactgaactccagcctgggcgacagagcgagactccgtctcaaaaaacaaacaaacaaacaaaaaccaaaaaaaaaaaccacataaaaaacaaaaaagatgaacagagttaaaggcaactttgggactatccaaattgtgaggcaacaactattcttatcaatagaataaccgttggtagtccaatatgaaacccaatactggtgttggggtgtaatttgtctgggtctttgtactattaattatgtccctgtatgagctgctggaggaatctaatttcatttctgaatgtgacaattttcctttgcaaactaaaattcaaagagaactgtaatcctgcttgttgctgttcatcraaagatgaccttgtaatatttgagataatgatttttaaggattatgcatatcttgggttattcctaaatgcatat

SEQ ID NO: 685746 - DNA, 1022 bp, Homo sapiens
taagtatttcatctttcagttggatgactttgcatgtaattatggaaaaaagaatgaaaatcataatttttgttatggttatcatgaatgatattgagagctgcaaacaatttacagttaatcatgagcttagttggagaattaattctttctatgtgggctacatagaagatggatttcaacacgtccctataaaatatcagctcatattttataagtaaaacaaaacaggcatgtacacataggcaaacatatctcacatctaaagcactaaacctttaatatataaaaatcattgtaggactgactttttagtttttaattatttatatttaaaaccattgtaatcacatcaattgggtcataatttagagtgtaaatattcataatatttcatattaagactgtttgacatggtctgagtgtctattaggttttttaaactctattttagccctgtcacttgtttttgttttggttttttttgtgcatgtcatatgttgtagtagaattaaagaccttgttttayttgcaaaatccagtcagcagttttgccactgcctgttcaaactccagcttcatgacccaggctagatacttgtgacaatggatctatgggaatgaatgatggatctgtgtagcaacgatagctttaacctctaactagctttcatttttcatctttacaatttccatttcctctttctattgaaacaagttcagttgaaataaatggatattcctgcacatgttgatgatcctgagagctcttctgagaatagcattggcctgttaatgatactgttaataatttttttcatacttttctctttttttttttagtctcgacctattccttcccaccttacttcagcagttgcagagagtatcttggcttcagcttgtgagagtgagagtagaaatgccgccaagaggatgcgtctggagagacagcaggtactgaggcatcttgaagtctggtgaacaccagctatagcaaatgtagttcatttaatttgatt

SEQ ID NO: 685747 - DNA, 624 bp, Homo sapiens
tgctaggcagtttggtcatttcttagtctggccaaaccctttctttgaggtttccaagcttcctttggaataytataactgtgtatcatcagcagaattttcagttttctttcccccaactatttgttaatgtttgctgaaaggaacctttaacaggaagtaaacttgcttggcatggcccagctgtgagtgaagcttgagtgagaggtatttatgacctgacaggaagataaagataaagataaagatgaagctgacttggtggctgttagcaaggggagaaggaaatgtttatgaccccatctgctggcgtttcaataggatagaactgcctttatggcgtcaatctcccctgtgacttccttccatttggggagtgttatcttatttcaagatgttcccaccgaacacactgttgtcccctttgtttaggggcaaaggaggaaggaaggactttgttactggaatgtggggatggggcagtatttatggttatgactcaagctggagaaaaggcttcattggagttgactgtatagtccaggaaagctgccatgcattctgctacttccttaaacattatccacactgaaagcagaaccacattagctctggtcattatca

SEQ ID NO: 685748 - DNA, 1306 bp, Homo sapiens
gaatgtacttttttgggacttacataaaataccaattttcttaataactcaaaatttataaaaggtaaacttttgaaccttgctcactcattatttatctgtttgtaaagactaaaaaccgaatctctgccttgtgcataccactttggtaaatttatttctagaattgcaactggtatataatttgggctaaatttgcccaattttgccttcrtaaaaaatgcattctttccctttaatgatctgctacaacactcttgctcccccaaatacaaaaacaatttcagaaaaaaaaactttctggagaaaatgcttaggacagaaattttatacaatttttacttaggaaccaaaaatatgaggaatgcagactttctaacttatggcagaatggaaagtttggaattcagattactgtacctcctcattgaataagaaagagggacatccatcttgagagctgtcagtctaagtactttcccaaacatgacattcacttttttaaatgaacaaaagtgttgaaatagctccatcgagtaatatgcatatgagtttctgcattataactcactgaaatagaggttttgattaattgctttctatgttagcagctgtctttgctattagacactgtttggtttcctgagtcacagtgaacaggttaaaataatatctaccagactaaagatctaagtccccaaacaagaataaactacataatagatgaacaaatcatacaataactcaggctgcaaattcaagaagctcaatttggcatactggagttatgtagttttcatagtgattttcagctcagttttaaactctcaaggtgctctgaaggaaaactactgcaatgcttggaatatctttagcttagctttctgaatgcagaacaaaaatttcctttctgaaaaattatttttatcagatagtgaatatgctgtaatttccacagtcttaacaaaagccctcttcctctataccacttccctcttccaatggctgttcatttttttctgctccccttcataacaaaattccttgacgttgctgtccctacagtttatctctgtgttctctccacccagcctcttgaagcattacaaagaggctttcacccgcattgctctattgaaacttatcttgctaaggttgccaaaggcttcaacattacaaaaccctagagtcaactcttaattgtcatcatacctctctgttgacagcatttagttgatctgcattccttcttggctttcctcaacttctgagttgtctgcctattgaaatcactctttctctgttc

SEQ ID NO: 685749 - DNA, 2095 bp, Homo sapiens
gaaggcacaaacgttaacttaaaaattatgattcaatctctggacaagcagtcttatgatacaagacaccagaattagtcacaattacctacccggtaataagcaggactggaaaagtgtagggtttcctgagtgggaagcctgcccttgtcatgaaggcacagaccagaacatatgcgtactgtgggcagaagaaggataaatgcaccagactacagatttcaaatttctctctctaatcttactagtcaggataagtcactcctctaccccgggggaggaatgagtagaaggcagagggcgtcccccttatagtgcattagataattgttcttgtcatttgtgtataacaatattttagtcaatcagtctaaggagacaagcagtttatcagaatacattttgggacctttgcataacattttattttcttcgttatagaatattaaacaagtcaggagaaaaacttgattacatcattctgcacccaaggttgataacttatattctattttcagtcaaaaattataaccagttacatcattctagagagcgtaagaaattctgcaataagattacattttgacaagatgcttccataataaaatgtcaaaatagagatgcccaaawtttgaatgtaattccctcttccattatcaaattctcaggtaaaattaaaatttgaatattatatcttctcacaaattaaatttctaagacatttaattccaaagaaattaaatccaaaagcaaaatatcttgaccatgtgagtaaaatctccaaaattatttccccattgttttgttattcttttcaatctctgttagaagtattgccagtgactgaatttagttggtatgcattcaacagttccagtgtcttctattttatagtggactgagtatacatttttaaggttctaaaattatattattttagtaccaagccttgacttcacttttaaggatttttttcccctttgttctttaaatctgtatttctttgacaatccacttctaacagataacagcatcatctacacaaatgtataaagacaatatatctggcttttttctttatttaccccgacaaccattcattatccaatacctgcaactgtactaactcctcgcacctgatcaaggacagattattgtgcctctttcactctttatatccaatcagtatcttaacttcaactatttctcaaatctccagggctatatccgttagttcatactataattatccctcatttggattactgtgagagtaaccctttctttcagaacagataaaatgctctatgtctttccaaggcaccattctttaccttgggttataaaacatccagtctcttactcaagcacttcgaaatacatggaaatgtatctatttattttccaacttcttctgcacagggaaacacaaaagaaaatgggaatatgcagacaaatttaattagctgtattccttatctatgctttctttgctatttgcccattacagtataaataacatgcccattttcttctgtgtgataatattcgcagcagaaaatacagtatcttaagtgtaattttcttaataacaaaataaatcatgatttttgctcagagtaaaatattgtactcaatatttgttaagttgcagagattagcaatttgaaaatcatgctttatctgtcttagcagaatggtcacaaatatgatgaggcagccagaagccaacagttctcattggctatctgagcaggtctcttaagtgtggtctggttccagttaactaaatctggatatcaggatgacattgcagaaatgatggagagaaaaacttaattgactttacttgtagtagcatgttgctatggatgtttcttagctgttagagaatcatttccaggacccagtggaactgctttgtcttgataattctcttggagtctttttgcttagtcattacaatctttgagtttcttgaaaatgcagtccagtgtttaaggaaatgttaggacaacttataaccatttaggtacaaatttgtacccaaaagaatcctgaaaatatcagattaattgttacaagattcagccca

SEQ ID NO: 685750 - DNA, 662 bp, Homo sapiens
aaatgctattgctgtgaatgggggaaggagcaaatacatcacgttacctatgggcaccatttactagtatcccattattgaaaaagtgagaaattccaaaaatgaaatgatggaaaacactactatgtacaacaaaattgtttaaacaaatagcaacagaatgtcaaccaaataaaacactgcatcttcattagcatctaccatgtggtcaggggctctgagcatcagcttatgttccctkttgctttgtttgtttcacaaatgttagagttgtttctctcacacctctaagcttagtggagtgcttcaaatgcaactggtattaaataaacatttattgaatgttacatgaatgaacaactaattgaaagaaggcctatgtccattgtatttattctacatttttttctcacaagtcttatggtgacgaagaacttattttgtggtaggtattaaagaaaagtttaaaagaaatatttgttccacttaaagttcttaattacaagcaaaagaggttaaaaatgacaaacttaagtaaaagaagaattattagaatacatcatggactcagaattaatagaaaccttcagagcttcagagggccagaaaaaatattagataaacataaaaagcaggaacccagaggcatggtaagcagtcta

SEQ ID NO: 685751 - DNA, 662 bp, Homo sapiens
aaatgctattgctgtgaatgggggaaggagcaaatacatcacgttacctatgggcaccatttactagtatcccattattgaaaaagtgagaaattccaaaaatgaaatgatggaaaacactactatgtacaacaaaattgtttaaacaaatagcaacagaatgtcaaccaaataaaacactgcatcttcattagcatctaccatgtggtcaggggctctgagcatcagcttatgttccctgttgctttgtttgtttcacaaatgttagagttgtttctctcacacctctaagcttagtggagtgcttcaaatgcaactggtattaaataaacawttattgaatgttacatgaatgaacaactaattgaaagaaggcctatgtccattgtatttattctacatttttttctcacaagtcttatggtgacgaagaacttattttgtggtaggtattaaagaaaagtttaaaagaaatatttgttccacttaaagttcttaattacaagcaaaagaggttaaaaatgacaaacttaagtaaaagaagaattattagaatacatcatggactcagaattaatagaaaccttcagagcttcagagggccagaaaaaatattagataaacataaaaagcaggaacccagaggcatggtaagcagtcta

SEQ ID NO: 685752 - DNA, 662 bp, Homo sapiens
aaatgctattgctgtgaatgggggaaggagcaaatacatcacgttacctatgggcaccatttactagtatcccattattgaaaaagtgagaaattccaaaaatgaaatgatggaaaacactactatgtacaacaaaattgtttaaacaaatagcaacagaatgtcaaccaaataaaacactgcatcttcattagcatctaccatgtggtcaggggctctgagcatcagcttatgttccctgttgctttgtttgtttcacaaatgttagagttgtttctctcacacctctaagcttagtggagtgcttcaaatgcaactggtattaaataaacatttattgaatgttacatgaatgaacaactaattgaaagaaggcytatgtccattgtatttattctacatttttttctcacaagtcttatggtgacgaagaacttattttgtggtaggtattaaagaaaagtttaaaagaaatatttgttccacttaaagttcttaattacaagcaaaagaggttaaaaatgacaaacttaagtaaaagaagaattattagaatacatcatggactcagaattaatagaaaccttcagagcttcagagggccagaaaaaatattagataaacataaaaagcaggaacccagaggcatggtaagcagtcta

SEQ ID NO: 685753 - DNA, 1009 bp, Homo sapiens
tcctgtaatcctagcactttgggaggccgaggcgggcggatcacctgaggtcaggagtttgagaccacctggccaacatggtgaaaccccatctgtgataaaaatacaaaaattagtcaggtttggtggtgggtgcctgtaatcccagctacttgagaggctgaggcaggagaatcatttgaacatgggaggcggaagttgcagtgagccgagatcgcgccattgcactccagcctggacaataagagcaaaactctgtctcaaaagaaaaaagaaaaagaaaaagaaaaaaaattatattcttaaatttaaacaacctcttagctaaataagcttttctaataactttgaattgttttctatttagattaaaaaatgcattctagtgtaatcctcccaatacccaccaatggtagctatgattattttactttatttttaactctattaacataggtgggagtttccaatccataatcagaatatattagtaacttcacttacacagttgtgttgattacttctgcctctgtcaggtaggtagtgattaggggcactgctatgtcttaagtgtgcgtaagcaaaaagggaaagaacagggaatataaaaggcagggaaaaatcctgggaaggcaaatacacatagtgtatgtaaattctaaattatgttaacaaatacacactaatgatttatattaatatatacattaatgtacctatagtttgggagtaagacttcagttaggatgagacactgctacttactagctatgtaactttgaacaagcrccttaatctccattggcctcaattttccaatctttaaaatagaacagtagtgacaacctctaggactattgtaagtaaagacataccacaaagttgtttttcaaatttgtctgcataataaaattcttgtatgtataatacaatttttacacaggttgggtaaaatcataattatgactgaaaattatcatgagtaataacgataaatttcccgggaaga

SEQ ID NO: 685754 - DNA, 593 bp, Homo sapiens
cagggcattcagagtcaggagacttctgctttgtctattcacggattgtatcacccaaaccaagtcatttacctgtcaggtaagaaattatcttttgagacagggtagttgcccaggctggagtgcagtggcactatcctggctcactgcagcctcgacctcccaagctgaagcaatccttccacctcagcctcctgagtagctgggattgcaggtgcacaccactgcgcctggctaatttttgtattttctgtaaagacagggtttcatcatgttgcccaggaggctggtcttgaactcctgggctcaggcaatccgtccgcctcagcctcctagtgctgggattacaggcatgagccactgcacctggccaagaaatcttcttttaaccaatcatcttcctcttaccatcaagtttatcatcacttatgcccaccccctgcatgtactcaagcaggagcacatgagtgcacgtgcacgcgtgcgcgcgcrcgcgcgcgcacacacacacacacacacacacacacaatctctagcccggcactggcaaaaggaagttggaggaaagtaggacatcaaggatcccttagtta

SEQ ID NO: 685755 - DNA, 593 bp, Homo sapiens
cagggcattcagagtcaggagacttctgctttgtctattcacggattgtatcacccaaaccaagtcatttacctgtcaggtaagaaattatcttttgagacagggtagttgcccaggctggagtgcagtggcactatcctggctcactgcagcctcgacctcccaagctgaagcaatccttccacctcagcctcctgagtagctgggattgcaggtgcacaccactgcgcctggctaatttttgtattttctgtaaagacagggtttcatcatgttgcccaggaggctggtcttgaactcctgggctcaggcaatccgtccgcctcagcctcctagtgctgggattacaggcatgagccactgcacctggccaagaaatcttcttttaaccaatcatcttcctcttaccatcaagtttatcatcacttatgcccaccccctgcatgtactcaagcaggagcacatgagtgcacgtgcacgcgtgcgcgcgcgcrcgcgcgcacacacacacacacacacacacacacaatctctagcccggcactggcaaaaggaagttggaggaaagtaggacatcaaggatcccttagtta

SEQ ID NO: 685756 - DNA, 593 bp, Homo sapiens
cagggcattcagagtcaggagacttctgctttgtctattcacggattgtatcacccaaaccaagtcatttacctgtcaggtaagaaattatcttttgagacagggtagttgcccaggctggagtgcagtggcactatcctggctcactgcagcctcgacctcccaagctgaagcaatccttccacctcagcctcctgagtagctgggattgcaggtgcacaccactgcgcctggctaatttttgtattttctgtaaagacagggtttcatcatgttgcccaggaggctggtcttgaactcctgggctcaggcaatccgtccgcctcagcctcctagtgctgggattacaggcatgagccactgcacctggccaagaaatcttcttttaaccaatcatcttcctcttaccatcaagtttatcatcacttatgcccaccccctgcatgtactcaagcaggagcacatgagtgcacgtgcacgcgtgcgcgcgcgcgcrcgcgcacacacacacacacacacacacacacaatctctagcccggcactggcaaaaggaagttggaggaaagtaggacatcaaggatcccttagtta

SEQ ID NO: 685757 - DNA, 593 bp, Homo sapiens
cagggcattcagagtcaggagacttctgctttgtctattcacggattgtatcacccaaaccaagtcatttacctgtcaggtaagaaattatcttttgagacagggtagttgcccaggctggagtgcagtggcactatcctggctcactgcagcctcgacctcccaagctgaagcaatccttccacctcagcctcctgagtagctgggattgcaggtgcacaccactgcgcctggctaatttttgtattttctgtaaagacagggtttcatcatgttgcccaggaggctggtcttgaactcctgggctcaggcaatccgtccgcctcagcctcctagtgctgggattacaggcatgagccactgcacctggccaagaaatcttcttttaaccaatcatcttcctcttaccatcaagtttatcatcacttatgcccaccccctgcatgtactcaagcaggagcacatgagtgcacgtgcacgcgtgcgcgcgcgcgcgcrcgcacacacacacacacacacacacacacaatctctagcccggcactggcaaaaggaagttggaggaaagtaggacatcaaggatcccttagtta

SEQ ID NO: 685758 - DNA, 593 bp, Homo sapiens
cagggcattcagagtcaggagacttctgctttgtctattcacggattgtatcacccaaaccaagtcatttacctgtcaggtaagaaattatcttttgagacagggtagttgcccaggctggagtgcagtggcactatcctggctcactgcagcctcgacctcccaagctgaagcaatccttccacctcagcctcctgagtagctgggattgcaggtgcacaccactgcgcctggctaatttttgtattttctgtaaagacagggtttcatcatgttgcccaggaggctggtcttgaactcctgggctcaggcaatccgtccgcctcagcctcctagtgctgggattacaggcatgagccactgcacctggccaagaaatcttcttttaaccaatcatcttcctcttaccatcaagtttatcatcacttatgcccaccccctgcatgtactcaagcaggagcacatgagtgcacgtgcacgcgtgcgcgcgcgcgcgcgcrcacacacacacacacacacacacacacaatctctagcccggcactggcaaaaggaagttggaggaaagtaggacatcaaggatcccttagtta

SEQ ID NO: 685759 - DNA, 656 bp, Homo sapiens
ttttaccatgtggtggaggagacagacaaactacagttattaaccatctgataagtgttttagcagtgccaagtacaagagattattggagtaaagaaagagcatctcaacttggcaggaagaggtgtttagtaagttgatgcatatgttgaatcttggaagaagaggaagtattcttcaaatgaatggcagggatggggatgsagactatttcaaggctagagagcaaccaaagtgatcctcaaatagtttaacataggagaaccttaggtgagggttgctggccagcaaggcatgaggttataaagctagtcatggttggatcacaatgggcctcggattctacactgaggtatctgcatgaggatgggagactactggcagattttaagcaaaggaatagcattattaaatttccccgtagaactgtttttagggaagctggttttggcacaatgctatggtttggatatggcacgttcatgccaagtctcatgttgaaatttgatccccgctgttggaggtggggcctactgggaggtgttttggtcatggggatggatccctcatgaatggcttggtgccatcctcatggtaatgagtgagctctcattttattagtttttgcgagagcttgcccaagtgctggtgttaaa

SEQ ID NO: 685760 - DNA, 1321 bp, Homo sapiens
tatacacacattttttggcgttggcatgacaggcaagaatattgagtgaactccttctctgaagattagaaagcagcctccaaagcacacctagtagagcatctatattccttgaatagagaaaaacaaatgttaataaataaacttaaagatgactccatgcattgtggagggtgaatgaagagacctccgttattctccttccctatacattctgcttactgataatcagtgatttatacgactgccacaatttgaattttaagtcaagcaaacatttgccactgtgccctacarcctaataaacacagcagcgttcaaaagggtgatacacccaatgtcaaggacgtctctaagatctgctttgtaagtgtatatctcaaagacctctgttcctcagacctctgacttaatgcagttctaagaaaaccttagttattatgactgctatgagagagagatgagaaagcagaaatctgtggtgagaaaccagaaatctggtgagaaaccagaaatctgcggtgccttaggtcacaatggaacctgtaatacagattgaaggcctgacagcaggcaggtctaccttgcacaacattcacagagggcaaggcttgcaaaaggaaggaggagccaagaactgaagatagaggattagagtcaggtgttggtgacgtaaacaacattatcgaggtcaatcctcagccctttccacagttgtattgtaatgcgtgcagaagattatgtaggttacaaatacaaaattaaatttaattatggtacatatgtgataaacatcctaattttctgctttcccagaacagtcactgagcaaaagacttaccctaaaattctcagtggcaaaggaaagataattctcagtggcaaaggaaaaatgtggaatgaacctcagatggaaattgccatgacatcttggagtttagaaagtaatatatagcacacatatcagataatcaattggctcattgatagccagtcagttggcttatagactctattcaaggttctaccagttttctgaaaataaatattgatttaaaattttaattcaagactactaattccatgtatttgtctttttgttgtctttttctgcagtgatgaatctaacctttcaagcatgaagttgtgtatataagggtccatttttaatatttatagttgaaaactgaattgcagattttacaagtctgagatatgtttacatagggctgcttcttcctgctggcagtagtatacatgtccatttttactccacttacatctgaaattgggcaatttgtgaaaccagtgagaatcctgc

SEQ ID NO: 685761 - DNA, 736 bp, Homo sapiens
aatcccagctacttgggaggctgaggcaggagaatcacttgaaccagggagtcggaggttgcagtgagtcgagatcgcactactcaactccagtctgggcaacagagcaagacttcgtctcaaaaaaaaaaaaaaaaaatttcaggccaggtgtggtggctggggcctgtaatcccagcactttgggaggctgaagtgggcagatcacctgatgtcaggagtttgagaccagcctgaccaacatggtgaaaccctgtctctactaaaaatacaaaaaatcagtcaggcatggagacacacacctgtaatgccagctattcgggaggcagaggaaggagaattgcttgaacccacaaggtagaggttgcagtgagccgagatcgcgccactgcactccagcctgggtgatagagtgagactccatctaaaaatatatatatttatatttaatatatatttatataaaytaaattaaatatttaaagtatatatatttatataacataaatatacaaatttataaataaatatatactttaaataaataaatatatatatattttcaattagctttggttattttgaggaaactgtgccttgtcactttatggataagtgtgttactgatttttctttttgctatgaacaacaaggaactcagagccatgctggttgtttgatttaatgatactatgtacttttatattctctatcttttcattataactttctttgt

SEQ ID NO: 685762 - DNA, 1049 bp, Homo sapiens
cagtgcctcaggtgcaaggaacattccagattatccctayggctcctaccaagataaatgactaattaagttggcacctcccctcctgtctctctgggggtcaggctgcccctggttgctccaggcaacaggatgggccagagagtcccataacagggaagcaaaagcaatagcttagtgaaacagggatggtgactcatctctcatttcagagattgatgtatttgttcacttagcaaatatcagtggaggtcaaaaatatgcccaacactgtgctaggcaccaggcacacaacagtgctgcatggaccctacctccctggagctcaacgtccacactagtcaaacaaccttccaaatatacaactacacactgtgggaaattaatatgtttgcaacattcaactggccgagtccattaccaagaaaaacaataataggagagataatgaatagtctcaatgtcagacaattgcaaatgcacacagaatccagataaggggccaattggccatgactcctcccattagtccttttcatgtgcctttgaggctgcctccaaggaagtccagactctttccttctcaacgtgttttgagtggtagtcttttgccatagctcatttgcaaatatctcttttcatagctgcataagtacgtgataaagtaagtgttgtaaaatcttgatggtagaatcagagttaagggtcagcaaaccttttcttaaaaggccagatagtaagtatctcccacattttgcaggccgtatggtctctgttgcaaccacacaactctgcagttgcatcatgaaagccgccgtagacaattcataaacaaataggcctggctgtttccagtgagattctatttatggacacttctatttgaatttcatataatattcacatgccacaaaatatcattcttctatagatttctcttcttcaaccacttaaaaaccatttaagaatcattcttggtttgcagaccatacaaaagtaggaggtgggcgggatttggccgatggaccatagtttgcctgtccatgatc

SEQ ID NO: 685763 - DNA, 1049 bp, Homo sapiens
cagtgcctcaggtgcaaggaacattccagattatccctatggctcctaccaagataaatgactaattaagttggcacctcccctcctgtctctctgggggtcaggctgcccctggttgctccaggcaacaggatgggccagagagtcccataacagggaagcaaaagcaatagcttagtgaaacagggatggtgactcatctctcatttcagagattgatgtatttgttcacttagcaaatatcagtggaggtcaaaaatatgcccaacactgtgctaggcaccaggcacacaacagtgctgcatggaccctacctccctggagctcaacgtccacactagtcaaacaaccttccaaatatacaactacacactgtgggaaattaatatgtttgcaacattcaactggccgagtccattaccaagaaaaacaataataggagagataatgaatagtctcaatgtcagacaattgcaaatgcacacagaatccagataaggggccaattggccatgactcctcccattagtccttttcatgtgcctttgaggctgcctccaaggaagtccagactctttccttctcaacgtgttttgagtggtagtcttttgccatagctcatttgcaaatatctcttttcatagctgcataagtacgtgataaagtaagtgttgtaaaatcttgatggtagaatcagagttaagggtcagcaaaccttttcttaaaaggccagayagtaagtatctcccacattttgcaggccgtatggtctctgttgcaaccacacaactctgcagttgcatcatgaaagccgccgtagacaattcataaacaaataggcctggctgtttccagtgagattctatttatggacacttctatttgaatttcatataatattcacatgccacaaaatatcattcttctatagatttctcttcttcaaccacttaaaaaccatttaagaatcattcttggtttgcagaccatacaaaagtaggaggtgggcgggatttggccgatggaccatagtttgcctgtccatgatc

SEQ ID NO: 685764 - DNA, 1049 bp, Homo sapiens
cagtgcctcaggtgcaaggaacattccagattatccctatggctcctaccaagataaatgactaattaagttggcacctcccctcctgtctctctgggggtcaggctgcccctggttgctccaggcaacaggatgggccagagagtcccataacagggaagcaaaagcaatagcttagtgaaacagggatggtgactcatctctcatttcagagattgatgtatttgttcacttagcaaatatcagtggaggtcaaaaatatgcccaacactgtgctaggcaccaggcacacaacagtgctgcatggaccctacctccctggagctcaacgtccacactagtcaaacaaccttccaaatatacaactacacactgtgggaaattaatatgtttgcaacattcaactggccgagtccattaccaagaaaaacaataataggagagataatgaatagtctcaatgtcagacaattgcaaatgcacacagaatccagataaggggccaattggccatgactcctcccattagtccttttcatgtgcctttgaggctgcctccaaggaagtccagactctttccttctcaacgtgttttgagtggtagtcttttgccatagctcatttgcaaatatctcttttcatagctgcataagtacgtgataaagtaagtgttgtaaaatcttgatggtagaatcagagttaagggtcagcaaaccttttcttaaaaggccagatagtaagtatctcccacattttgcaggccgtatggtctctgttgcaaccacacaactctgcagttgcatcatgaaagccgccgtagacaattcataaacaaataggcctggctgtttccagtgagattctatttatggacacttctatttgaatttcatataatattcacatgccacaaaatatcattcttctatagatttctyttcttcaaccacttaaaaaccatttaagaatcattcttggtttgcagaccatacaaaagtaggaggtgggcgggatttggccgatggaccatagtttgcctgtccatgatc

SEQ ID NO: 685765 - DNA, 1957 bp, Homo sapiens
tttaccactaattaagcctaattaaaataattaaatggctgtggagtcaccatgtgaattaaaatcacttctcctctgtactaagctgtttctcactagccaggccccggtttggaagacaaatacatatctctctgtcgatttttcccgtcgccctgctcagcttcatgcggggtatttgcatggccaaggatatttgataattaagataatgctgtgatttgacggtgcggtttttcaatttcaggaccccaggagattttcctttatctcggtgaagtatagacaatttgacaaatctgttgcttggagcagtcgctagcgtttgcatattcattactcattggatttttaatcaaagtagctgatggaccccttgcaccacaaataacttggtcatgaataatttatccgtgcttactggctgggccatgcagcctcccggcgccccggggcccctgattggctcgccagggctggcctgccctgcgcagcacatggccactccagatgtttgggtatccatatgtgcacagctcatcaaaaacggcaacggcccgcacccgagggcctcggcggtccccagataggccatctggagttggagggaaaacaaacctcggcgaattgtgggatgcgtagttatcttcagtggcgcccggaggtggccacggaggggtgcgcagggggcgcgggaatgcgacggaaacccagagtcaaggcccgcatctggggcttcaggaaagcttgctgtgtccaaagctacaggcagggccgtcatggggacattgtctggcccttttcagatcatgtgggtggtcagcagctgcctctcctgcttctacggcccctgtgggtacaacccccgactcccagcccccacccaccatatacacacatcttcccgctgggccctctcctgcctaggaacccagcctgatgtgctgctccccagctctctgactttgcacatgctrcccctttacgtgccatgtccctcctcctctgtgctaccccagcagggctggtttagaattttcctggggaggcctggcccctaatcatgtcaaacccattcaatttacccacatgccacattaaatatattttatatataagtgtggaggagttgagtggagatgcagttgactagttgacataatagcacgttttgtaggcatttaatggaccatttactcattttgattttgcagttgtcttttcctatggagcccgtggcgctgggctccccaggcctcaggcgtttctgcagtctcctgacaaggctgtctgcctggcattggcctccatgccatgtggtctcaaggccgtggtctgcacgttagcctttgccagttctgtaaggcccagcctgtagtacctcagccagcgagccttcctctgtgacccccatggcttaaagctgagggttgcccctccctggtgcttctggaacacccctatctccattccagcccatcacccatatggtggttgctagttggcatgatttcctctccactagacagtgagcttgggaaggcaggacggtgatgtgctcatctctgtccctcccacctctctcagtgcctggcccataccatgtgcacaataaatgtttgatgaataaatgaactttgggcttcatgtttcaaagaacaggaacaatgaccctgaaaagaaaattaaggcagagcagcaatctgaaggggtgtgcaggaggcagctggggacaatccttctggcctggcaccagagcttttgtgcaaggtgaggaggagagcacttcttctgcccctcctgctgttcccctcgctcacttctcagctgacagcctcttgggtgttgatgcagggagggtcccgtggaccccagatctgctgcatcacacagggtgttctcccccaccatgaggactctgagatcaaaggaacagaccctctgcaggagactgatc

SEQ ID NO: 685766 - DNA, 639 bp, Homo sapiens
aaaaagccactggtcatgtgttcacrcatgacagatacccataccaactgtccctaatgaacaaataatttactaccaaaagaaaaatctatattttaaaaattaaaaaaaaaagaattgagttttcatagacatttaaaatgccagtagaacacaagagatatttctctctactgttgtgggacatcaaaagcaggcatatagttaaaaacagagcaaccacaaaggttattaagaaatggaagacaactcttgtgcttacatagactgagtggcaatcctacttctttaaagttacccattctcacacaaaaatattgagtttatggctaccctcaattaataccttcaaagaaactgcttgcattttccctggcgtggtggattttctacccaagaattgttctcagctctagagcatccgtaaattaggaagctttctgggaatggatttctatgacctctgtcttcacggctttcatgctcttttgtcgttgttatttctccttaaattccacatacccctgccatatttgcacctgttttactctggtttcatgttttaccaagcattttaactgcatttcttcatttccaagaacccctaaagcaaattgtaagtcaagggataaaattagc

SEQ ID NO: 685767 - DNA, 639 bp, Homo sapiens
aaaaagccactggtcatgtgttcacgcatgacagatacccataccaactgtccctaatgaacaaataatttactaccaaaagaaaaatctatattttaaaaattaaaaaaaaaagaattgarttttcatagacatttaaaatgccagtagaacacaagagatatttctctctactgttgtgggacatcaaaagcaggcatatagttaaaaacagagcaaccacaaaggttattaagaaatggaagacaactcttgtgcttacatagactgagtggcaatcctacttctttaaagttacccattctcacacaaaaatattgagtttatggctaccctcaattaataccttcaaagaaactgcttgcattttccctggcgtggtggattttctacccaagaattgttctcagctctagagcatccgtaaattaggaagctttctgggaatggatttctatgacctctgtcttcacggctttcatgctcttttgtcgttgttatttctccttaaattccacatacccctgccatatttgcacctgttttactctggtttcatgttttaccaagcattttaactgcatttcttcatttccaagaacccctaaagcaaattgtaagtcaagggataaaattagc

SEQ ID NO: 685768 - DNA, 639 bp, Homo sapiens
aaaaagccactggtcatgtgttcacgcatgacagatacccataccaactgtccctaatgaacaaataatttactaccaaaagaaaaatctatattttaaaaattaaaaaaaaaagaattgagttttcatagacatttaaaatgccagtagaacacaagagatatttctctctactgttgtgggacatcaaaagcaggcatatagttaaaaacagagcaaccacaaaggttattaagaaatggaagacaactcttgtgcttacatagactgagtggcaatcctacttctttaaagttacccattctcacacaaaaatattgagtttatggctaccctcaattaataccttcaaagaaactgcttgcattttccctggcrtggtggattttctacccaagaattgttctcagctctagagcatccgtaaattaggaagctttctgggaatggatttctatgacctctgtcttcacggctttcatgctcttttgtcgttgttatttctccttaaattccacatacccctgccatatttgcacctgttttactctggtttcatgttttaccaagcattttaactgcatttcttcatttccaagaacccctaaagcaaattgtaagtcaagggataaaattagc

SEQ ID NO: 685769 - DNA, 1813 bp, Homo sapiens
agcatcagacctatccaaattgacttacattagacaaaacacatgatcgacatattttgaaagtatcaagattgtgaaagactaggaaagcctgaggaactatttccagattacaggagactaaggagaagtaactagttgcaatgcagaatcctgaacttgatcctggaccaaaaagagacaaatagtgggagaaaatggtaagatttgagcaaaatctctagttatatagtatgctactaatgttaatgggctttggttctgactgccatgctaaggttatataaaatggtaataaagaaagctgggaaagaaatccatgaaaactctctgtagaattctgcaactattctccatgtctaactttagttaaagaaagaaaaactttaaaaagatctctaagtttccttggatttgaatattttgttaaaaattatcgaaagtgtgcttagcttaaaatatctttcatgccaaaatttggagtagattcctgctctcttgattccaagttcaataatctttccaatactcyatgtccttccaaatcttttagtgatatttttactcaaagcacaattgagttggtaatgcattaaacctcaaatctattgtttggttatatgaaatataaaacatatttttaaaaatctgtgcatatccctattcctggctctcctaaaaataacctataagctcatccacttaattttgtggttactcaattagttctactctacaaaagagatgagaaatccaagatttatttttaagactgcagtaggttggcttcttttatagatcttagaattggaggacagagaaaaggcatttagaacacttttatattcgtttttcctatcctaagctttttctttaaatttgttgtgcaaattatctctgcagttctataatgccctttctgcttctttaggagcactaaaatttatctttaataagacaagatatatttttaaaatagtaccagtagagaacaaatagtaattatcaatgtgtacaagacatgatatttctccttaccctcaaaatcaacattgtcactcctaaagtctaattaaaataatacttcctgatgctagattattaaataatactattaggaattactggctatgtcagtgatttttttttattttattgtattttccagcaccatacagttatctgactggtaaatcattatttaaatgccaccaacgactatctgaatatgcagaaaattaagttcccaaacttacaggctgaattatacaaatggtcccggagtgctattgctgatagtattgagcaattgatgtttcatagcatttaataaaaatagaactgtaaaactggcatatacataaaagtcattggcaacaaaaggaaacattgttattttggaacatattagtaaaatacagattttattaaattgtcattccagattctgaaataataagctggctgtgaaaccatgacatgtttccctgtccccataaatttaatttatttctaaaattcaaatttatatcatttccttacatcttgcactatggcaatattattatttaaatcattgatttttgcataagttacatttctattttgattagctaattgagaagattataatcatcgttttaacttggaatttgaagtgcatttgtttataagaaagatcctggacagaaactcccagagacaaagccatttaaacatcacattgctttgagaatcccacagagctgaacttgataggagttgctggtaatgcaaaccctggggacatccttattagtctgcccactgagtg

SEQ ID NO: 685770 - DNA, 1813 bp, Homo sapiens
agcatcagacctatccaaattgacttacattagacaaaacacatgatcgacatattttgaaagtatcaagattgtgaaagactaggaaagcctgaggaactatttccagattacaggagactaaggagaagtaactagttgcaatgcagaatcctgaacttgatcctggaccaaaaagagacaaatagtgggagaaaatggtaagatttgagcaaaatctctagttatatagtatgctactaatgttaatgggctttggttctgactgccatgctaaggttatataaaatggtaataaagaaagctgggaaagaaatccatgaaaactctctgtagaattctgcaactattctccatgtctaactttagttaaagaaagaaaaactttaaaaagatctctaagtttccttggatttgaatattttgttaaaaattatcgaaagtgtgcttagcttaaaatatctttcatgccaaaatttggagtagattcctgctctcttgattccaagttcaataatctttccaatactctatgtccttccaaatcttttagtgatatttttactcaaagcacaattgagttggtaatgcattaaacctcaaatctattgtttggttatatgaaatataaaacatatttttaaaaatctgtgcatatccctattcctggctctcctaaaaataacctataagctcatccacttaattttgtggttactcaattagttctactctacaaaagagatgagaaatccaagatttatttttaagactgcagtaggttggcttcttttatagatcttagaattggaggacagagaaaaggcatttagaacacttttatattcgtttttcctatcctaagctttttctttaaatttgttgtgcaaattatctctgcagttctataatgccctttctgcttctttaggagcactaaaatttatctttaataagacaagatatatttttaaaatagtaccagtagagaacaaatagtaattatcaatgtgtacaagacatgatatttctccttaccctcaaaatcaacattgtcactcctaaagtctaattaaaataatacttcctgatgctagattattaaataatactattaggaattactggctatgtcagtgatttttttttattttattgtattttccagcaccatacagttatctgactggtaaatcattatttaaatgccaccaacgactatctgaatatgcagaaaattaagttcccaaacttacaggctgaattatacaaatggtcccggagtgctattgctgatagtattgagcaattgatgtttcatagcatttaataaaaatagaactgtaaaactggcatatacataaaagtcattggcaacaaaaggaaacattgttattttggaacatattagtaaaatacagattttattaaattgtcattccagattctgaaataataagctggctgtgaaaccatgacatgtttccctgtccccataaatttaatttatttctaaaattcaaatttatatcatttccttacatcttgcactatggcaatattattatttaaatcattgatttttgcataagttacatttctattttgattagctaattgagaagattataatcatygttttaacttggaatttgaagtgcatttgtttataagaaagatcctggacagaaactcccagagacaaagccatttaaacatcacattgctttgagaatcccacagagctgaacttgataggagttgctggtaatgcaaaccctggggacatccttattagtctgcccactgagtg

SEQ ID NO: 685771 - DNA, 1340 bp, Homo sapiens
aatatttaaaatgtaaataccaaaaaaatacaaatagcagaagagatctattaagataggatatagttgtcagagttcaaaacaggtggactctgaagactcctgctcttatttatgacctcaaatttgtttttctcctctcttcatctgagttagggtgtgttaatagtgctttaatgaaatcacttctactaacttccactaactaaaaagagagcaaggccaaattgagctttctttcaatctgttcctatttgttctatagatagcagagtttctaaatttaaaaagtcacatagaatttaaatttgtagtgctttagagatcaaccccaaattactcactatttttattctctcagttgtttcattggagatcttggaaagcataagtaaacctaagttttccaggttactatatttcttgaaaacctatgcattaaagtyccccatcctccacaatggaagattactataacatattgtaagtctaggaatctcataagatatgaattacataggatcttccagtccaatttgcacaaaattcacatctcttaatcaagaacaattaagaaaagtctgacagtggtgcctatattagtctgctctcatgctacttataaagacatacccaacactgggtaatttataaagaaaaagatgtttaatggactcacagttccaaataactgggaggcctcaaaatcatggtggaaggtgaaggaggagcaaagtcatgtcttacatgacaacaggcaagagagagagtgcagggtaactgccctttgtaaaaccatcagatctcatgagacttattcactatcatgagaacagcacaggaaaaacccacccgcatgattcaattacctcccaccagctcccttccatgacatgtgggagctatgattcaagaagagatttgggtggggacatctccaaaccatatcagtgccattagaagaagcataaggcaaaaactcattcacatcccaggtttgtttacaagatataggcacagagactgctggaatcaaataagattttggtcccatgttgttatagtttaatatagtgcatagctgtggaaacacaattagttaccaataaactatgtgatacttttcttaacattgaagaaaacatcttgtgcatgtttttaagcttcaccttcaagtgaacctaatattttagtgttgttacccccaatttcatgctagtctttgcatttttaagccttagtggatttaaaagttggtgaaaaaatagcatcataaaaaattggctttgctttagtttgtcattatcagaaataaaatttagtatcaattccttgtggtt

SEQ ID NO: 685772 - DNA, 2473 bp, Homo sapiens
ctttccattagaatttttgtgtgtaacaatagactgtggtcactaacttaatattctatttccaaatccaaatttaaacgctctacctatgagttttgtattatcatattttaaaaggcagttctgctgataaataattctcagcgagttatttctctttatattagtagataattactccattattttcacactgcacatttgatgtttttattagaaaactgattttcacttaattagcaataatggtaatatggcttaaatatatttcagattactttgcaacaaactgtatttatttaaaataatttatatttgcttagcccctagaaaaatgcctagcaccaaaaaggcagacagtgtataaattttatttaaaagagtgaatgaattaatatagaaacaatatgcctttgtatcagcaaaaacaaataaaagttaacatttaattaataaattaaataaatacatataatactaaaagacctcaattcaggtaagaaatatttaaaatactagtgtaatattaaaatatatgacttacacaatttttacaagtaaaacaatgacatgaatttgaagtcaatttttttaaatgtgcctataacttcaaaaacatttatctgtatttgaatataatttcaatttaaaagtcaaaagcacatattgtattcttatcatgcaggttttatttttctgttctttagttgtctctatcaccagtttgtgggactttaaaaatagggattataacattaattttggaccctttagtttttagagtgatgtaaagtaggaaacaggcactcagtatgtatttagagattaaatcaattagcaattatagatactgcttcataatcttttcttattgcaaagctgcactggtataatcccatttttaaatattctatatcaattattaataacaattgtcttgtggtcagaatatagcttatatatgcatttctyaaacacattgcatttattgactcttctttcagctttctgcccactcatcacaatatcttcttagtattcatacagttcatttagtattttttttgaaaagagtacactgaatatccttcttccttattatttggttttacacattttttgaatagaaggaaatgcctgtccctggatagttctcctttttacacttttcttacctttctttctaattttattacttgaccacaagttgattttttatctatataatttttatgccaatcccagagatctgttttccaccccaggtagtctgttgctgaagctttttgttttaaaatacaggttttattgatattcaagtatggccaggccaacagatcaggagactactgccattgaaaaggtagttgggtatatgcacagatcccaaaaggggcatgtcaccatgccacagggaagcaccatggttggccaggaggcacagggagcaacgggaaaacctggacatttttttttttttaagagttgagttttcactctatcacccaggctagagtgcagtgacatgattgttgctcatggcaacttcaaactcctaggctaaggggatcctcctgcttccacctcccaaagcactggaattagagatgtgagtcactgcacctagcatggcaagattctgttttgtggttttcacagaaaggaattgttagggtaagcacaattaggattttctagttagaataatttcagtggcttctgggacataggtgctgttcctagttgcctgatacctggccctggcataactaaggcaagggaataatatccctgagtatgagagcctgctaaagtagttgtgggtgagggtctggcttgggacctgtcagtatccatatgaaagtcacatttgctggcaagcattttgccatctgtaataattagctaaccgtgtgtgggaggaaattggggaacggaggatggtgggcagtatctccagggtatgcaaggctgcagacatcagagcatcaaaaatatagatcataaaaagacatgcttattataaactttcataattatttttaaactatgcatttttgatccttattgtgatccattagattattacatatcaaaccaagtactcacgagatgttaggcaaactttcagaaatcttgttgacttttacttaccagattacagcagtttaaggattcaatgaacctgtcttttattaattccaacatgctgccaaccataggcttccacatctgtttttagctctctaggtgctttctggatgctacatagagataagcatagcacagttgaaaaatcatctaattacagattagtagtagaaaaagtatacgttttaaacaatggaagtttcttatttttggtttgctttacatctagtaaatgtcaccttattttctttatattttaattaacaaaattgtatatttttgtgtacaacatgttttgaaatatgtatacacagaagaatgc

SEQ ID NO: 685773 - DNA, 1477 bp, Homo sapiens
aacctataacattatttatgctgctttcagtggaaaaaaatttgaacaaaatttgaaggatgtagtatactctaaataatttgcatagaatatgtatttatgcttttaatgattttaacktattttattttctatcatatttaccatcaaaaaaataaaattaacttttaatattatttttacattaataataatcatagtaattatgttaataactctactctttcttctgctgtcaactatggagaaatctgacttctacagaccatattctagtcaaatggtttaagactcttctctaaagaatttaggtttctaatctggtaagtgaggattatactttcatacagtcttccccagacagctgagtgtagtgtttaaaggcttagtgcctgagtaatgcatctactacttgttaagtgcaagatactccccttggggctttaacattttcagctgtaaaatggatgcaatactgcaatattaataatacctagcacaaaaattgccaggaatatgaaatcagatattatatatagcacttcacattgtaactgccccatattaaatgttaataaatattgttatttttattatctttacctttaagcacttctgtgaatgttacatattaatatttgttaaatattaatttcaaaattaattaaaatttaattaaatttaataattttaatttatttataaataaatataaattaattttaaaattcatattaatgttttagaaatattttaaattaaaatttacatattaataaaaagctattaatatataggcaaaagaaatctcagtaagtcagtttaaggtagttgatttctacatattatattgaacaaaaataatagtgcaaggtaattttgtagatcaggcaacaatgtctcttccaaatttttaacatggaagaaaatgatcagattcatgtatagtgtcccataatttatttatgaattgacaatatgctgattatcttagctatcttttgctctggctctatattttaagtgtggacacacatttgggattttcttgctacggatgtgagtaactatatcaaataaggtagctatgtgtgaagattctaaaatttgatgcaagataaacatactaagattagaataaggtatgccagtggggtggtcgggttgttgcagtctccttactccttagtttaacaaggttcgagttcttgtcccacaaccaagaagaataaggcacgtggacaccagagagtgagtaatgcagagtaggctttattaagcaacagaaaagctctcagtaacgacaggggacttgaagagggctgccaaaaatggggctgagttctgggtttttatgtgacagaaacaaggaaatctactgtaggaactgacttagtgggaagggtaaagttcccccttgggggtgttgcatctgtgtatgcctgggcttggccatagggactccatcttgattatt

SEQ ID NO: 685774 - DNA, 1509 bp, Homo sapiens
gatattttaacttagcttaacccagaatttcccaaactaatgggactttccctttctcaccataagtagtaataagctctaggtaaagataccagtttggaaattgctgattaagtgttaaaagttactaaataaagacattttcaagaattaactatgaacacaaaaccatgcctcaagaggcaaatgccacactgcaatagtaacaggatttatcattttgcacgttcaggtccactgttcacagctgacaacatcccatgagcaaagcctagaccttaccctactatatattttcatggcatccagtgtgatgactttctctcagcaaataggcagtgattaatccatattttaggaaaattaccaatacacctttctgttattttattaaggttttagctattacttttaaaagcacattttttaggctgggcatggtggctcatgcctgtaatcccagcactttgggaggccgaggcaggaagatcacttaaggtcaggtgttcaagaccagcctgagcaacatagcgagacccccatctctacaaaaaaattttaaaaattagccaggcatggtggtgtgcacctgtagtcctagctactagagaggccaaggaaggaggatcctgtgagcccaggagtttgaggttacagtgagctatgactgccactacatccagtctgggcaaaagagtgagaccttgcttcaaaaaaaaaaaaaaagttaaattgataaagaataaaaattgaaattgcacatttatactaggatttcagataatgcaataatctgggattagcaggggctatgtaacattgcatgcatattaagttacttggctttcaaatcttccattacttcaccttattgtatatggttcacataattgtagtgtaaaattgtggtaattcccaagacatcgattcagcaaatatttactgaatgcctactatttgccagtattataacaggcactggacatattaatttccttgcttcctaactttgtcatagagcagtttttttattacatttaattcagcaaatattggcagagtactaggcttrtggaataggtttgaactagggcttgaagatttagaattctataaaccagaaaaggtccagaagggtattatagacatttcattccacaattgtgagtcagtacttgggatatttgatatcaattgaatacattggttatgtcattaaattacttctttcaagaaccaaataagtgtgatagaagaatttaaatataaattttgattattatttttattgggtaaaatagaaatgtatttttatactttttctttatactgtgttataaattgtgtgctttgcaaaaaacatagttatatctaaaaggggaagagagaaatgagactgatgcttttagtaatagagacgataatgattgcagtaaaatatctttatacttttaatttatatattacttaaaaagcatatttgttttaaaattgaggatatatacaacc

SEQ ID NO: 685775 - DNA, 1485 bp, Homo sapiens
tatgaaataacatatgcacttgtaagttttatgttttaactaagattaagatttaatggtgtaatcaatatcttgggtatacttcaagcaagatgtctgcatgttacagatgcatatataatatgtgcctatgaaatggataaagcagaatacacgtaagtaaagatttcggtctacatgtggcatacagacatgttacataagattttagtgcactgtttcccctcaccccattcttggattgttatatagaaatgtttggctcaactatgctcaggaacagagaccagtaacaaataaaaatgtctctctctgtgtctgtttactatactcctagagagaaggaccaaacattgtgagcaagtgtgcaactcaggagggcatgtagattagcagggagccctgtttacgttctgtaaacttctgtcatgcaccatagtacagtccagtactccagggccccactttggacagaactcaacaatgtctttaaatgctctctctatgcttgtactcatttcagaatacagaaagactcccatagtccaaatctacattgttgattgaaaccagagttgggtgaatggaatgttttgcttctccagagactaatcctcaccagggagcaaaggttttaaggcatgaaggggagtctggagcctatagtcacagttgttggactatgcaacactgcagacagtatcagagagccatctgttatctcacctaaaaacaaacacactcagataattgctaatttagcccaaacacttttttttttttttgagatggagtttcactcttattgcccaggctggagtgcaatggcacgatctcagctctctgcaacctttgcttccttygttcaagtgattctcctgcctcagcctccgaagtagctgggattacaggtgcatgccaccacgcccagctaataatgtatttttggtagaggcagggtttttccatgttggtcaggctggtctcgaaatcctgacctcaggtgatctgcccaccttggcctctcagactgctgggattacacgtgtgagccactgcccccagccacccaaatacatttctaagtgaattacttagaggccctcttggctggtagagactctgtttaccaatttagatggcctataatggtaagaagtggttttaatctagttgttttaacctggcactgagatatacatgccatcctctaacccccaaaaagcaacaccaccacatcaaaaacaagaagttcctgctgccctgtctcctattttctccattaaatagcgtctgtttaaaattcattcaggtaactaataaaaagtatgtaatatgcacccagcattttcctactactgggaggagaataaaaacaggtaaagtctgttttctgctcctgggaaaactttcaatcaaattgggaaggtaaatcgtgcatgcaaatactcatacccacaaaagagttgagggagtggtggggaa

SEQ ID NO: 685776 - DNA, 656 bp, Homo sapiens
attcaaatgtaaattatcatgtctcactgccccgttagctatccaaaggcaaaactccattatttcattccccttctcacatctattacttattytcctttctcaattagttttaattaattgtttcttaaagtgtacttacacatttaacagtggttactgtgggctgtgccgccctctgattattagtcttgaagccatcttatgttattgttccattcctcacactcaaaaggtccccaaagaacaacctcctgaagttaggaccaatggtccctttagtttgtcataaaaccaaagtgatacatgtgtttaataacacagaatgtgtgccataaaaccctgatttgaatagttcttggaaatgtaggccaaagacgtcagatgaaacgtgccaagttgagaggtgcagataaaaggtaaaggtttattttgtaaatgtgtaatattttgatagtcaccagggaagaaataatgttactgcatgtggacgggcaaggtggctcatacctgtaatcccagcactttgggaggccaaggtgggcagatcacctgaggtcaggcatttgagactagcctaaccaacatggtgaaacgccatctctactaaaaatacaaaaattagccgggcgtggtggcgtgtgccagtaatccca

SEQ ID NO: 685777 - DNA, 611 bp, Homo sapiens
taactctattactttcttgtataagaaatcttgatattaattgtctagttggatctactccttagggtgtgtactgtaatcatgtctttcgaccattttattcatgcagtcaagaaaggacattttattttactgcctttggaaagggcagtattttggggcaaaagctgaatatagttcttcatggaactgaaatgtgagtacaaaaatactagtgaagtaaatattgccttggcagctcaggcttatctagtttaaccatgttatgttcattgtattgtagattacatatacattccaaaaacaggaaattcaatttgtgcttgcaaagaacatctcaaagtagatggaggaagagcaagagcgaaggtatgctgaagctggttcccactggattgtgagactagactgttaacatgtcttcccaattccttgttcagtratactaagttgatagcttgcaactgaccatggtaggagtatttacaccatggatataggcaaccactcaaatcagaatttattttccagggggctggtttactagtataccagagccaggacttggacttttgtgtaagtttctttatctttcttatgattgtcaaatt

SEQ ID NO: 685778 - DNA, 620 bp, Homo sapiens
catttccatgtgaactttggccaatagcacccacacagaaacatccagaataatgtttgtcacctatcagggcactgaggcccagccaagtcaccacatgcaattaatcatcccctatgcttctaagtccccacactcctgactcaggcattctggcctctttgctgctccttgaacatcccaggcaggctyggcctcaggaccttggcagtggccatgagctctgctagaacacacttcctgcagataatctcatggctcagccaacgtgtctatcaaatccttgaccagaagtcccattctcatggtggctaccctgaggatctgttgatgggcagcctgccctgacaccctgaatgccaatttgccttactccatttcatttttctacattttcccatagcagttaccagctacttcactatgtgaggtatgatttgacatttcttgttaattttatgtctctccacggaaggaagcatctttgtttgttccctaatggacaagcacctagaatcatcatgaaacagaatgggagctcaatagatagtttcaaagtggcaaaagggtcactttgctcaaggactgctctgcctcatggtccttccagctcatcccaa

SEQ ID NO: 685779 - DNA, 620 bp, Homo sapiens
tcttttacgaactccttccctacattgaggttaaagatactgctttcttctacacattacaaatattttacatttgtcttcaatccatctgaaatttatgtgatggaartcatagatgtaattttatttccatatggatagcccatagttttaatagcattttgcgaatagctcatttttctccactaggaggtaacactgattctgccgcaaactaagtttccatatgaatgctcatctgctttcaggctattttgtatatattctgataatatcattaatttatacttttattaggaatcttgctatctgatatattgtaattcctacctcagacttctttaaaatttatgcttacatatgaatttcagaatagccctcctggaattatagttgaaattatgctaaatttatagattgggcaaatatgctgacttttctcattataaacattgtattcctatttgaatttttccaaaactttcagtaaagtttaacaatctctctataaagataatgatagttttgttcctgggtgctgtgtgttgcttattatgaggtttgtttttctaactatcatctccagtaacttttggggttttaagtgcttttaattcaaa

SEQ ID NO: 685780 - DNA, 1168 bp, Homo sapiens
aaaaagaagcaaatatatgattcaactatttttacaaggaaaaatgtttctgagacatcagattgaactcaataggaataccatcaaatggaccaacaagccatttaggtatgttaattggtaacagtagagaagatgtttggtaagaaaactcactcatgtttggtaagaaaacacttaaatcgggcatggtggtgggcgcctgtagtcccagctactcgggaggctgaggcaggagaatggagtaaacccgggaggcggagcttgcagtgagccaagatcatgctactgcactactccagcctgggtgacagagcgagactctgtctcaaaaaaaaaaaaaaaaaaaaagggaaacacttaaatttatcacactgaaatacaaaccccaaatctgaaagacaaaatataaaaaaattccagaagcaaagaatcactatttacaaaatttgtattcataattgaagtgataatttattaggtcaaattacaatatagcttaaagcgtaatttaatatagacatacttgaactcaaatagggagggggccaaatttctgcatttgctttctgcattggaataataaaaatcaatcatgattgtttctgaattacaacaaaaaaggcctactcttttcttttttctcagcccttcacatttcagcattaagtatgtatggatctgaaaatatraataatgtagattaatgatttaaagataaaatctaaggcagtaattttggtaccaattcttccctttaactcccttaataaattataagtaaatctaaagaaaaaattaaaatatcaatatttatatagagaaaaagatactaaagggatataaacagacttaaaatgtatgaaccttatatgaattctaatttgaataatctataaaaagatatttttgagacaatcagtgaaattttaatatgggagatactggatgatattaagaaattactaattttatagatatgacatggcatggttttttttaaaagggccttataagttagaaataaatgctaaaatatttacagatgaattgacaaaatgtctgaattttactttaaaatactatgaggcaaagaaaaaaagggaggcggctttaaataaaacatgattgacaaaatgttaacaactgttgaaactggatagcgtgg

SEQ ID NO: 685781 - DNA, 639 bp, Homo sapiens
gaaatcagatttctttttccatcagtagacaatacaactgtagttcaccacaatccattaactcgccttttcccccactgtactctttccctcctacctcctaagggaaatagaagacctttttggaaactgtgaactcccatagtataacatttacatcccttataatgtcatatgatttatccaatttaggcattttaagcttcaaaactgctgatttctcaaatataccgtgtcctttatctcagagttcactaaaatcagtttgctatgataccgtgtctgtgtgaggtaggaaagaacaaggaatagttgttaaygcagtgtcttataaggatggttcttaaggcctggtctacaaaaatacactgtagccagagatgggtaggccagaagattaccctgattttcaaaactccatggaaatcatcagtgtaggtcattttgaaaaaggcctaattatttggggattcaaatcccacaaaaatttgcttggaaaaactaaacaaatcctgagaaaagctagacttttagaatgtaaagtatagtacagcagttccctcttacccacagttttgcttttgatggttttagttacccacagtcaaatgcagtctgaaaatgttaaatggaaaattc

SEQ ID NO: 685782 - DNA, 2080 bp, Homo sapiens
tgcactccagcctgggcgacagggtgagactccgtctcaaaaaaaaaaaawaaatatatatatatataataaaacaatgttactattacaggtatccagatatattattggctaatcattatctgtaaaatgaaaaaataattggaaataaaatgtggtattacacaatttatcacattatattaaaaggggcctacattagaatgtgtagaagcaagccttttttttggtattaaaatctcataatctcatttaatgatttattaattatggttttctttcccattatggccttttcttttattgttgtcatctggactcttctattttaaatcacctttctttttatgattgtatgaaaaacaagttaacctagttaagttgggttctaagatgcctgaatcagtgtcccacaccacttataccatctcttgaggacattagatgatattcacgtgaccctcacttgagtgtaattcttgagccaggaccaaaggtttgacatgagatgaatatttctcagtttttttttccttgagtttccagacttgaaattggcgagcaatcagctggaatatttggttatagagacaaatttggttacgctagaaacctgatctttagaatggctttatgctctttatgcaatgctgaaagtcttcagaaagtttgtgtcaaattttcttgcctttgtagtttattctgcatgatcagaataagtgtggcataagttactttatatgacaagggcacatattttttccccccatgctcaatataatatgcaaatcaaaaggaccctcatactatctgtgctattggctacagtgtattatgtctaacttttgaaatgaacagtggcatttttatttaatagtcatctattgagcactctgttaggatcttggaaaaaagaagcagcagggcacattcctccctaatgtgtaacagtctactgggggagacagggcagacacatttagaaacagaattctacaaggatgttgcaagaacagggtcaagtgaagggtgtctgaggttcacaggtgctgaggcttgaaacctttcttttcttcttcttttgaatacaacacttagatcacattgttgcagctaataaagatgtatcataaaatatgagtaccagtagctacctgtaatgcattttggagattttcattttattgtatctttcttcagaaaattatgagcatttcaatctgttagtactctgcagttgcatatcaattggactcaaattgctcaatctctgattttcagacctatttatttttttccttcctgattattgtgagaaatacttcctgagtattgtgagaaatacctttaaaacctaggttttaaaggtagctgactttgctattgtggtgagttatgcttaaaaattggaaaaataaattatgatgtatttttggattaactattatttacagttttcaggagattttagcactgtattttatttcatcattattatttttatttggttgtatgttatttggagggactgttccagtgctttttgtggtctaaccatgaaagtctctgagaattgaacatttatacacttttccggagaacgctgtgaccatgtttatctcttttttccttttgcttttcaccttagttgcctgtcttttgaagcctgccatgctggcaatgatatcacatatttctggtgctttttgtaactaccagtgtggacaccaatggggtgcccatctgagtagccctgggtgtcgccctgagctcacctgcatgttggcctgagcactgctggtattgtagggatagtcaatgattgcttcctttgggcaagcaggagctgcaaccccctgtgtaattttctaggcagtaagcaagggtgtgtttaccattatccttcttggctgtttaatagccattatctaatttaaggagaaatcacagcatctatgcaatctgtcaaaaaacatgatgacttaaacatacttaatgtatttctagaaccaaagtaacagttgccagaaatgttgaagaaagtaaatgtcttctctgagaaactttagtttgtgggcaa

SEQ ID NO: 685783 - DNA, 2080 bp, Homo sapiens
tgcactccagcctgggcgacagggtgagactccgtctcaaaaaaaaaaaaaaaatatatatatatataataaaacaatgttactattacaggtatccagatatattattggctaatcattatctgtaaaatgaaaaaataattggaaataaaatgtggtattacacaatttatcacattatattaaaaggggcctacattagaatgtgtagaagcaagccttttttttggtattaaaatctcataatctcatttaatgatttattaattatggttttctttcccattayggccttttcttttattgttgtcatctggactcttctattttaaatcacctttctttttatgattgtatgaaaaacaagttaacctagttaagttgggttctaagatgcctgaatcagtgtcccacaccacttataccatctcttgaggacattagatgatattcacgtgaccctcacttgagtgtaattcttgagccaggaccaaaggtttgacatgagatgaatatttctcagtttttttttccttgagtttccagacttgaaattggcgagcaatcagctggaatatttggttatagagacaaatttggttacgctagaaacctgatctttagaatggctttatgctctttatgcaatgctgaaagtcttcagaaagtttgtgtcaaattttcttgcctttgtagtttattctgcatgatcagaataagtgtggcataagttactttatatgacaagggcacatattttttccccccatgctcaatataatatgcaaatcaaaaggaccctcatactatctgtgctattggctacagtgtattatgtctaacttttgaaatgaacagtggcatttttatttaatagtcatctattgagcactctgttaggatcttggaaaaaagaagcagcagggcacattcctccctaatgtgtaacagtctactgggggagacagggcagacacatttagaaacagaattctacaaggatgttgcaagaacagggtcaagtgaagggtgtctgaggttcacaggtgctgaggcttgaaacctttcttttcttcttcttttgaatacaacacttagatcacattgttgcagctaataaagatgtatcataaaatatgagtaccagtagctacctgtaatgcattttggagattttcattttattgtatctttcttcagaaaattatgagcatttcaatctgttagtactctgcagttgcatatcaattggactcaaattgctcaatctctgattttcagacctatttatttttttccttcctgattattgtgagaaatacttcctgagtattgtgagaaatacctttaaaacctaggttttaaaggtagctgactttgctattgtggtgagttatgcttaaaaattggaaaaataaattatgatgtatttttggattaactattatttacagttttcaggagattttagcactgtattttatttcatcattattatttttatttggttgtatgttatttggagggactgttccagtgctttttgtggtctaaccatgaaagtctctgagaattgaacatttatacacttttccggagaacgctgtgaccatgtttatctcttttttccttttgcttttcaccttagttgcctgtcttttgaagcctgccatgctggcaatgatatcacatatttctggtgctttttgtaactaccagtgtggacaccaatggggtgcccatctgagtagccctgggtgtcgccctgagctcacctgcatgttggcctgagcactgctggtattgtagggatagtcaatgattgcttcctttgggcaagcaggagctgcaaccccctgtgtaattttctaggcagtaagcaagggtgtgtttaccattatccttcttggctgtttaatagccattatctaatttaaggagaaatcacagcatctatgcaatctgtcaaaaaacatgatgacttaaacatacttaatgtatttctagaaccaaagtaacagttgccagaaatgttgaagaaagtaaatgtcttctctgagaaactttagtttgtgggcaa

SEQ ID NO: 685784 - DNA, 2080 bp, Homo sapiens
tgcactccagcctgggcgacagggtgagactccgtctcaaaaaaaaaaaaaaaatatatatatatataataaaacaatgttactattacaggtatccagatatattattggctaatcattatctgtaaaatgaaaaaataattggaaataaaatgtggtattacacaatttatcacattatattaaaaggggcctacattagaatgtgtagaagcaagccttttttttggtattaaaatctcataatctcatttaatgatttattaattatggttttctttcccattatggccttttcttttattgttgtcatctggactcttctattttaaatcacctttctttttatgattgtatgaaaaacaagttaacctagttaagttgggttctaagatgcctgaatcagtgtcccacaccacttataccatctcttgaggacattagatgatattcacgtgaccctcacttgagtgtaattcttgagccaggaccaaaggtttgacatgagatgaatatttctcagtttttttttccttgagtttccagacttgaaattggcgagcaatcagctggaatatttggttatagagacaaatttggttacgctagaaacctgatctttagaatggctttatgctctttatgcaatgctgaaagtcttcagaaagtttgtgtcaaattttcttgcctttgtagtttattctgcatgatcagaataagtgtggcataagttactttatatgacaagggcacatattttttccccccatgctcaatataatatgcaaatcaaaaggaccctcatactatctgtgctattggctacagtgtattatgtctaacttttgaaatgaacagtggcatttttatttmatagtcatctattgagcactctgttaggatcttggaaaaaagaagcagcagggcacattcctccctaatgtgtaacagtctactgggggagacagggcagacacatttagaaacagaattctacaaggatgttgcaagaacagggtcaagtgaagggtgtctgaggttcacaggtgctgaggcttgaaacctttcttttcttcttcttttgaatacaacacttagatcacattgttgcagctaataaagatgtatcataaaatatgagtaccagtagctacctgtaatgcattttggagattttcattttattgtatctttcttcagaaaattatgagcatttcaatctgttagtactctgcagttgcatatcaattggactcaaattgctcaatctctgattttcagacctatttatttttttccttcctgattattgtgagaaatacttcctgagtattgtgagaaatacctttaaaacctaggttttaaaggtagctgactttgctattgtggtgagttatgcttaaaaattggaaaaataaattatgatgtatttttggattaactattatttacagttttcaggagattttagcactgtattttatttcatcattattatttttatttggttgtatgttatttggagggactgttccagtgctttttgtggtctaaccatgaaagtctctgagaattgaacatttatacacttttccggagaacgctgtgaccatgtttatctcttttttccttttgcttttcaccttagttgcctgtcttttgaagcctgccatgctggcaatgatatcacatatttctggtgctttttgtaactaccagtgtggacaccaatggggtgcccatctgagtagccctgggtgtcgccctgagctcacctgcatgttggcctgagcactgctggtattgtagggatagtcaatgattgcttcctttgggcaagcaggagctgcaaccccctgtgtaattttctaggcagtaagcaagggtgtgtttaccattatccttcttggctgtttaatagccattatctaatttaaggagaaatcacagcatctatgcaatctgtcaaaaaacatgatgacttaaacatacttaatgtatttctagaaccaaagtaacagttgccagaaatgttgaagaaagtaaatgtcttctctgagaaactttagtttgtgggcaa

SEQ ID NO: 685785 - DNA, 649 bp, Homo sapiens
ttctaaggaggagtgagggctgctctggagaaaggctgctgtgggtgtacaggttttatattttccatttgcctcactcacctctttttgcttcctacagggaagaggctgctttgagatgctctgcattgtctgtcagaaagaacgaagtttctaattacttgctatgtatagtcttggagggaatgtgaaatatgcatcaaagagccaaggaatgcaccaatcattattctctctctctaattcagatggaacatagtgacagtgcctcagttaggctggatggttttctcagcctaggaagagggtttttctgaacttttctactatcccctccagtttttgctggtttttattttctctttgtttctgtttttcttttttcttttagagatgagaattcactgtgttacccagactggaatgcagtggcctaatcatagctcactgaagtcttgaacttctgggatcaagcagtcctcctatctcagcctcccamgtagctgggacaacaggtgcacaccactgcacatagctaatttggaaaaaaaaatttcagagatgggtcttgctatgttgcccaggctggtctggaactcctggcctcaagcaatcctcccactcggcctcccaaagcattgagattaca

SEQ ID NO: 685786 - DNA, 607 bp, Homo sapiens
aacatggatgcagctggaggctattatcctcagcaaactaacccaggaacagaaaaccaaatactgcatgttctcacttgtaagtgggagctaaatgacaagaacttatgaacacaaagaaggaaacaacagacactggggtctactttagcggggagtgtggaaggagggagaggagcagaaaagacaactattgggtactgggcttaatacatgggtgatgaaataatacgtgcaacaaactcccatgacatgmgtttacctatgtaacaaaccttcacatgtacccccaaacctaaaataaaagttaaaaaaaataaataaaataaaataaaaacactctccttaactctgagagaaaaaagacacccataagacataactatctaatgtgacacatgggttgagatgctaattcaaacaaatcaactgtttaaaaaactattttgagacaatcaagaaagcttggatattaattgggtattagacggtactaaggaattattattaattgtattaggtatgataatggtggtgaggttatatatatttttaatgtctttagaggcatatgtcagagatgttgcaggttcggttccactccacc

SEQ ID NO: 685787 - DNA, 598 bp, Homo sapiens
taatagagtcagagatggacaatgtggttggaatgagagtgtgaacgtgtgcatttatgtgtctctctaagctgcctctctggctgcaattgcaaatccagttatcaatgaccactgaattagctattgtttttttatcttccaaccctacttcccattcagttgtgcaaatggtgaccaaagagaaatgttggaaactgtcagttctctgtgtttggctcacaggtggattttktctgacagcatgtgtactgcatattacaatgcagtagcccgtgtggggtggttctgggtgtcgggataagtggagggttcatgtcttcccgttgggtggcttctgctcactctgagcactgttctgcctagtgctggacttcctaggccttttggctctattctgtctcgttggagcaagtacaaggacttacagacctgtttcctgcagattggcagtgagccattgaaagctctgggggaaactttgcccaaatcagggtggagattgccaagcccttgcttctggacagagttagggaagattgaggttatggaaggtgctgcctttgttgaagagctcaactctgtaggatggctaaaa

SEQ ID NO: 685788 - DNA, 634 bp, Homo sapiens
tatctctctctataaacatctatctcttttattaaaatgttgttgactcttggcggggcacagtggctcacgcctgtaatcctagcactttgggaggccgaggtgggcagatcacgagttcaggaaccggagaccaggttggccaacatggtgaaaccccatctctactaaaaatacaaaaattagccaggtgtggtggtgcgcacctgtaatcccagctactcaggaggctgaggcaggagaatcacttgaacctgggaggcagaggttgcagtgagccaagattgtgccattgcactccagcctgggtgacggagcgagactctgtctcaaaaaaaaaaaaaaaatgtcgttgactcttttaaaaagttaamcccaaaaaagtataaagaacattaaaaaaaatcacctatatctagcactcagaaataaattgttaacatttggtgaacaaaattctggatatctctaaaattataaaaatagatggataggtagaaatagttttataaatgtagtctaatatttagaaatattacttacaataatttaacaaagagaaacagcttcaatgatagaagttgatgaactaaagataaatgtttctttacaatgagatatgggtttttaaaag

SEQ ID NO: 685789 - DNA, 634 bp, Homo sapiens
tatctctctctataaacatctatctcttttattaaaatgttgttgactcttggcggggcacagtggctcacgcctgtaatcctagcactttgggaggccgaggtgggcagatcacgagttcaggaaccggagaccaggttggccaacatggtgaaaccccatctctactaaaaatacaaaaattagccaggtgtggtggtgcgcacctgtaatcccagctactcaggaggctgaggcaggagaatcacttgaacctgggaggcagaggttgcagtgagccaagattgtgccattgcactccagcctgggtgacggagcgagactctgtctcaaaaaaaaaaaaaaaatgtcgttgactcttttaaaaagttaaccmcaaaaaagtataaagaacattaaaaaaaatcacctatatctagcactcagaaataaattgttaacatttggtgaacaaaattctggatatctctaaaattataaaaatagatggataggtagaaatagttttataaatgtagtctaatatttagaaatattacttacaataatttaacaaagagaaacagcttcaatgatagaagttgatgaactaaagataaatgtttctttacaatgagatatgggtttttaaaag

SEQ ID NO: 685790 - DNA, 2094 bp, Homo sapiens
ctttccataggctgaacaattcaactgtccccatatgaaaaaccttgctgcttctacatactgaaatttaatttagtgacttgagaacacttgcttaattaatcaactttatttaagcctaactagggaatatttatgatatctccaagcttcaaattaaaacaatcttataatacattcaattttattctacagtttattaataaaaacattgaacattaagatttggaatagattctttgtaggactttattaaacatctcttccttatttgacatttctctgcatttggtttgggccaattctttgcccattttggaaaaaaccttatgtaatccaatgttgttctattttttgtgtatgtcctaaaataaacatcatgcagactcttcaatatctatataaaacagayctgtataataataaaatgacttgtatgaaacctttacaaattaccatatttaaagtggagaagagaaattaattcattgtagagtgctttatggtttctgtgatcacttattatatgtatagtcctttgaggcttaatttctaatgcttaagagatgttgaaagaaataatctgtaatacacaaacacatgaatacatgtgggatttttaaaaaatcataataaatccatgatgccaatgaacgtttggcatgaaaataaaggcttaatattttgctttcaagtaaaagtactacccagttccatatatgagacaaatatacccaacatgaatttttctaactgttctttttaatatataaaacattttatagacaatatttcttttgtttccttttctcataagggctagattatggttaatatctcatgacaccaaaagtaatactgcaacagatattaaagcattttttcagccacttattctataaaatattaattgcaagcttgtgcatgtgctgtatatataggagattaggtaactgagttcctgctcagttccaaatcaataaaagataatatgcacagcatcaatcatcattcactcttcctttagtggaagatttttaaaatatatatttaagcactcagggagacaacacaagctagagaagatgtgaataatacttacctaggaaggacaggtttttctctagaagcaagtctctcagcaggacctcatgctcatgaccaatggcactgggaagtttcagttaagggggtaacacaggcagaattataccagcaggaaaacgctaataccaggtctatactttgagcagccattttcacccttagtccacatcttggaggaatgaaatctctacacacatcccctcatttaaataattggatagaatttttctataattttttaaaacctttttttttttaatagagacagggtcctgctctgttgcccaggctggagagcagtggcacaatcatagctcactataaccttgaactcctgggctcaagcaatcctcccacctcagcctcctgggtagcagggactacaggggtgtaccacccaccacgcctgggtaatttttttttttttttttttttttttagaaatggaatcgcactatgttgctcagtgctggtctcaaactcctaggctcaagtgattctccgacctcagtctctcaaagtgctgggattacaggcatgagccactgtgtccagcattttctataatttttatatatattttggcaaacaaagatttgtaaatggatgtgtgcttgtattttgaaaagaaggagagtcattttaaatgtactttaatctgtgttaaaaatcttccaattcagctgggcaaggtggcttgcgcctataaccccagccactctggaggccgaggtggaaggatcacttgaggccagttgggtaaggtagcaaggctcccgctcttaaaaaaaattctaaaaaaatttttaaattaaaatccctcaactcaatttagcatacatttattaagcacttaataggtacagtaaagaatactaggcagtctttgccctagaagaattcctaatcttagagaattctgtaaatcttctgtgaattcacatttgtcatcaggccaacatttagaaacttctttgtttcacttcc

SEQ ID NO: 685791 - DNA, 2094 bp, Homo sapiens
ctttccataggctgaacaattcaactgtccccatatgaaaaaccttgctgcttctacatactgaaatttaatttagtgacttgagaacacttgcttaattaatcaactttatttaagcctaactagggaatatttatgatatctccaagcttcaaattaaaacaatcttataatacattcaattttattctacagtttattaataaaaacattgaacattaagatttggaatagattctttgtaggactttattaaacatctcttccttatttgacatttctctgcatttggtttgggccaattctttgcccattttggaaaaaaccttatgtaatccaatgttgttctattttttgtgtatgtcctaaaataaacatcatgcagactcttcaatatctatataaaacagatctgtataataataaaatgacttgtatgaaacctttacaaattaccatatttaaagtggagaagagaaattaattcattgtagagtgctttatggtttctgtgatcacttattatatgtataktcctttgaggcttaatttctaatgcttaagagatgttgaaagaaataatctgtaatacacaaacacatgaatacatgtgggatttttaaaaaatcataataaatccatgatgccaatgaacgtttggcatgaaaataaaggcttaatattttgctttcaagtaaaagtactacccagttccatatatgagacaaatatacccaacatgaatttttctaactgttctttttaatatataaaacattttatagacaatatttcttttgtttccttttctcataagggctagattatggttaatatctcatgacaccaaaagtaatactgcaacagatattaaagcattttttcagccacttattctataaaatattaattgcaagcttgtgcatgtgctgtatatataggagattaggtaactgagttcctgctcagttccaaatcaataaaagataatatgcacagcatcaatcatcattcactcttcctttagtggaagatttttaaaatatatatttaagcactcagggagacaacacaagctagagaagatgtgaataatacttacctaggaaggacaggtttttctctagaagcaagtctctcagcaggacctcatgctcatgaccaatggcactgggaagtttcagttaagggggtaacacaggcagaattataccagcaggaaaacgctaataccaggtctatactttgagcagccattttcacccttagtccacatcttggaggaatgaaatctctacacacatcccctcatttaaataattggatagaatttttctataattttttaaaacctttttttttttaatagagacagggtcctgctctgttgcccaggctggagagcagtggcacaatcatagctcactataaccttgaactcctgggctcaagcaatcctcccacctcagcctcctgggtagcagggactacaggggtgtaccacccaccacgcctgggtaatttttttttttttttttttttttttagaaatggaatcgcactatgttgctcagtgctggtctcaaactcctaggctcaagtgattctccgacctcagtctctcaaagtgctgggattacaggcatgagccactgtgtccagcattttctataatttttatatatattttggcaaacaaagatttgtaaatggatgtgtgcttgtattttgaaaagaaggagagtcattttaaatgtactttaatctgtgttaaaaatcttccaattcagctgggcaaggtggcttgcgcctataaccccagccactctggaggccgaggtggaaggatcacttgaggccagttgggtaaggtagcaaggctcccgctcttaaaaaaaattctaaaaaaatttttaaattaaaatccctcaactcaatttagcatacatttattaagcacttaataggtacagtaaagaatactaggcagtctttgccctagaagaattcctaatcttagagaattctgtaaatcttctgtgaattcacatttgtcatcaggccaacatttagaaacttctttgtttcacttcc

SEQ ID NO: 685792 - DNA, 607 bp, Homo sapiens
tctctcgttccctccctccctctctctccccctctcttgcttgcccaggctggagtggagtggcatgatcatagctcactgcagccttgacttcctgggctctagtgaacctcccatccaagcttccagagtagctgggaccacatgcgtgcaccaccacacctggctaattttaaaatttatggtagagatggggccttgctatgctacccaggctggtcttgaactcctgggctcgagcagtcctccagcttcagcctcccaaagtattgggattacaggcatgagcaaccgtgcctggcstacacccctactttcaatttctggacctttctggggctctcaggcagagggaaccagccctgtttctggatctggacttggtttagagatccattttctaatcttctcagtaaggtaccacttgttcatgacttcccagtttccaaaattttgtcattgttgtgttcttgcagggtttaatgcaactaaaagactccctttattggtgtgtgtgtgtgtgtgtgtgtgtatgtatgtgtactttgtgaggggcatgtgttcaatctgccatttaaaattacatgtggctgttaatgtgtggtcc

SEQ ID NO: 685793 - DNA, 396 bp, Homo sapiens
tggtcatccttagacttacagctctgtactcataggcaaatatttcagtaaaacaaatttgtaagagtgaaattgtaagatgaaagaatacgcttattttatttatttatttatttatttttatttttttgagacagagtcttgctctctcacccaggctggagtgcagtggcatgatctcaactcactgtaagctctgcctccccagttcacgccattcttstgcctcagcctcctgagtagctgggactacaggcgcccgccaccacgcccggctaatttgttgtgtttttagtagagatggggtttcaccgtgttagccaggatggtctcgatctcctgaccttgtgatcctcctgcctcggcctcctaaagtgctgggattataggtgtgag

SEQ ID NO: 685794 - DNA, 603 bp, Homo sapiens
aatgttatgtttatcatatactgagttctaatacatattcaaatctatttttaatctttgttccactgatatactcttttaccatactagtttaattaagatagtgtttaagtaagatttaatatttgaatagacaaaaccttcttattagccaacttttacagaatatctctgcaattaccagactgttatwcttctagtgaattttagaatgattttctccaacattttttgcaattctaattaaaatttcattaactgtatatattaaattgggatgataggcattttaattatattaagtaatcctatacaagaacatgatatatgctgacatcttttgtgtctttcaataaagttgtatcatttgtttagaagaactaaatttcccaaattgtatcaaagtggtttggtctaaattacaaccattagcatctattaatatatgaagctgcacttggctatagtgtctaacatttcatcgaggaaagtcagactccaacaacacttctttatggtaacagttctggtcagagcctgaggccagatgtcaacagtattgcgcattctgaattgaagcatcaatatgaggaaatttgttta

SEQ ID NO: 685795 - DNA, 603 bp, Homo sapiens
aatgttatgtttatcatatactgagttctaatacatattcaaatctatttttaatctttgttccactgatatactcttttaccatactagtttaattaagatagtgtttaagtaagatttaatatttgaatagacaaaaccttcttattagccaacttttacagaatatctctgcaattaccagactgttatacttctagtgaattttagaatgattttctccaacattttttgcaattctaattaaaatttcattaactgtatatattaaattgggatgataggcattttrattatattaagtaatcctatacaagaacatgatatatgctgacatcttttgtgtctttcaataaagttgtatcatttgtttagaagaactaaatttcccaaattgtatcaaagtggtttggtctaaattacaaccattagcatctattaatatatgaagctgcacttggctatagtgtctaacatttcatcgaggaaagtcagactccaacaacacttctttatggtaacagttctggtcagagcctgaggccagatgtcaacagtattgcgcattctgaattgaagcatcaatatgaggaaatttgttta

SEQ ID NO: 685796 - DNA, 600 bp, Homo sapiens
tacatttttcacatttataggtttgtcttttaaaagcaaaacaaaacaaaaaagccataaaatttggggatcagaatcaaatcacaggatgtgccagagccagtggtaatgattacagatataccctaatgtgaggtttattgcagttgtgctatttcatttcagaggtatattactgtagaataacagttaagagaacaaagcatattttttgcctgtcaatagattcaattgcattttacagcaaaaataatttactcgcaggtttaaattagacatctaagtgatgcaaataaataaatcactgatgatttcagcaaccagagataaccacacagatactgatttgtgatttatttktaatataccacaaacaaaactaaaaacttcaatgtatatttcaggaaaagattaatttggtgtgtggttacttataaaatcatgtaagagtaacaagacaaaaccaattttaaataatagaatttaagaatgctctagtcctaaagaataatttagtatgacattgaccatctaaccatccctctatttcctctcccaaaatatagttcggatgctgaaagtgaaatacaccttaaaaaa

SEQ ID NO: 685797 - DNA, 1381 bp, Homo sapiens
tcttgagtacaagtcactggggttggagttattgcagaagtcaagtattgctatgggtcccaagcacagaccaaaaaatcatagaatgttggmatatatcttacatcagaaaacaggactattttcaaatacatatacctatgacgaataacaaaaaacttacctaaattattacttaatttataaaacttcaacattatgtattttaatgtatatttaaagatcaactataatcatacaggggctataaacagtttccaaaaatagaagagtacacactcaaaatatttggaatgacttatgagaattacagttagttccaaagtgagctctttaccatttctgtattacaattcctaaattgataacaagcaaaagtttagcaactgtaaagtgaataaataaactgtggtatacttatataattgaatactattcagcaatgagaatgaactccatgcacaacataggtggatatcacaaatataatactgagcaaaagatggagacacagcataattttgcaagatcccaactccctggaggtttggatagtggtcaccttgatagaaaacagggctaggagaaagcaaagagagagtttctagagtgctgataatattttaacccttgttattggcaatagttacctagatgggtccacctccacaagctgtattcttatctgtataaacctaggttttaagaatcaattaaaaagattactatcaaaagttactgactgccctaaacttaaagtacctcttgggtcatgttatttaattaatataaaaagacttactaattaatcttccaaatcaagacatgtctgagagtaaataaggatgccattaatagttactccagtaccatcccatacaaaccacctcaggacatgtgtttaccctgttaaatttcttgaatggttctttcttttctttagttctgacataactatttatgaacagaatttatcaaccttttactcacccattttaagctttttgaggtttgaggtgatgtcatagctactctaaatgccctagaagagctagaagagtaaaactgatagcgtcaaatttagaaatttaaaacagcaacatttgctctattaagatcaaagcagcctttgacatttaagaatgttcagaactgagtcatcaaaaaatattgattgggattattaagaatattggtcataattcaaagagcagggtaagacagaaagcagaagaacatgatgaaacccatagagtaagggaggcccatagcagaaagaaaaggatggtcccattgtaagatgaagctgcttccaaaggaaaaacaaagctatctttttgcacatgattttcatataataaatgagcctgtgaaaaattag

SEQ ID NO: 685798 - DNA, 2348 bp, Homo sapiens
taggataaacacagagggaaatttattattcatttatgtaaattttcatactactttatacaaaatttcataattatcatttatcatatttttattatagtcatttatttatgactgtcaccccttctaaactgtaaggaccttgaaagtaacacagtgtttcatttagctctgtaatcagtgcctgcatgtgaacatatggtaatcatttaataaatatgcttgtattttttaaaaacttaaattgagaataaactggcaaaattcctaataattaagcagtatgcacatatccaatagaaacaaaatttgtaaataaatggtaatgaatgctattgaagaaaatcattaattacagttactcactgaataagatagggttttttgtttttttggtcagtgacaggcaatatacaatggtaatctcataaggttataatatggcatttctactctaccttttctataataagacatgtttggatatacaaataccattgtgttacaattgcctacagcattcaggacagtatcatgttgcacaagtttgaagcccaggagcaataggttataagtgcatactagactatatactatctgggtttgaataagtacactctatgaagtccatacaaggatgcaatcacctaaggtcatgttgcccagaacatatcgccatcattaagtgacacatgaatatatatatatgtgtgtgtgtgtgtgtgtatgtgtgtgtatatgtatatgtatatgtacatatatatgtgtgtgtgtatgtatatatgtgtgtgtatatatatatgtataaattgagattttatatttattgaaagcaagtcatatgttgtggtggttttctgttttgttcactttaatgttaaagatgtcaagaaaacttcatatgctctaagaaattgggaatctatgaatttcctggtagaacatatattagtcagggttctccatagaaacagaactaataggatatctgtctatccatagatagttagatagaaagagattaattataagaattggcttacacgattatagatgctgagaagtcccacaatctgctgtctgcaagcaggagacctgggaaagctggtggtctcatcaagtctaaatgcctgagaatcagaagtggcagccaatggtgtaaatcccagtccaagggcaggggaagactaatgtcccagctcagcaggcaggaagcaaaggggcaaattcctcctccctccatcgttttgttctgttcagtccttcaatgaactggatgatgccctctcactttggagagggcactctgcttggctgaatccaacaattcaaatactaatttcattcagaaatgttatctcaggcacacccagaaataatgtttaatctgggcagcctatggcccattcaagttgacacataaaattaaccatcacaaatatttacaaaaacgtgattacataggcctcttttaactctctatagaaatgtacttatatatataacatatatttatacatgtatagtacacataaaagttataaacataccttatacatattatatacatatgtaacttcagtttatacttaatatttatgtttcaaaagagagtcaayaaacacatattgaactctgatctgatttcaagcactgtgctaggcctttggggcaaggttgaataaaggcatagccctcctcatctcacattctcggtactaacaacacctaccaaggatctttcatattttgtgtaaatcatattttttaatgctactacatacctttgaaacattttttaggaagtggcatgttttgattaccaataaacattatgaggtactaaactcttctcagtttttgtttaagctgtattaaaatgcctatttaaaagagattattatagttcaatgaagctctttaaatacttcatagaataatcatgtgtcaaaaaagattagttagttatgtgtttgtcacttgcctagctggttttcctacataatctacagctgttttcctgaattagcagttgctatcactaagttataatctttcttcttctcctttacctgtctcctgccccatacagtcaaaccacaagttaacagcacattcatcttttaagagcaatctaaaaagtcacttctaccttgcccaaccatcaccagtgttgtatctgcactaagctggaaatagctctattctccaaattctatggtattctatgagaacatttcactaaggctttatctgtttcagtggagccatgtcacacattatttactaggtgtgagctgctaagaggagagaatatttctcactcatctttgaattcacataatacc

SEQ ID NO: 685799 - DNA, 626 bp, Homo sapiens
actctacactcctcagtgtacacatgggaaactgaagcacagagaggggatgtagtcctttttaaggtcaaataattttatctaataggatattggactgtttctcacggggctaaaattagggccaagacatttccttgggtctcactggagattattgagagtggttgacttttaattagaacattacaaacagtagaatcaggaagaagaaaagatgaacctgcgattgttctgtttctttgtacccatattgggatgattagttmagtgcatattaaggttctggcctctcttgaagtacatcatcttcattatttttctcagataatttctctgtggggtcagtgggtgagatgacactcatcagctatgttattttagacacttagtttctctgagcctgagttttctcatctgaagaatggggatatacttgaccctacttggactgaaagccattcaaggtcagggatggtttcttcttcacctcctcttcctcttctatatccctgactacaacattgtctagcacacactgggcttctgcataaatttacagaaactaactaaatgatccctcaaggtagtagaaagagtcacgaggaatcaggtctgtggacagg

SEQ ID NO: 685800 - DNA, 1242 bp, Homo sapiens
atatttaataactttaaaataatttgacagttataaacagtcactatttttcctttagaatctgaaccaaagtatattggttctgtcatagcaataataatatcagtacctttcagaggtatgtaatagattaatacttttttaaaacacagactttgaaccattatatacaaatttaacattagaactaagattttacactgataagtaaatctattaaaagtaaaatctgtttagctattattgagaagaggaactcatgtttttgtaatgttgctattctaaatttttagcaatgaggcatttttttttcacattaaaggggtatgtacaattcattcaggccatgtttgtttactgttttatataaagaatatgtttaggaagaaagaacatttttaatagaaggattctaccagaataggtttccaaaagataatatctaaaacttagtagatattttttagacttttaaagcccatctatttcatttgtagatgtagataaggaaactgagattaagagaaattacacacagtcatcccttgctttacgaagggaactgattccagaacccctgcatataccacagtccatgcatatggaagtcttacagttggtcctgtggaaccatggatatgtaaagtaggccgtctgtatatgcaaaacctgcatatacaaaaccggcatatacagatggcctacttttcaatctggctttggttgaaaaaaattctcataactggacccacacagttcatccctctgtttttttctctccattcatattctgaagtggcctctcttctggccttttcctcagcagctgcgtgtatgtgggtttctgtgtgtgtgtgggtgtatatgtgtatgtttattaggcagggaaaggtataagtgcccaataagtaatttaggcttgcacctaaaagttagttgaaaacactgttcctcccataatcaattttaagaactaaggggaagaatataaatttgaaaatcttggtgcattatatctgaattgtgacattaacrgtacttcattcacttctaatgttctttattttgacttcacagaggagagtgaaaaaattccctcagaaattcttgtacagactgctgataaaatgatgccatcaaagaaaggccaattgaagattgcttgtattatcctcttttttcattggtcctaaaaccttttatcacattttaacatctctgaatttgggatgcatcttaaga

SEQ ID NO: 685801 - DNA, 737 bp, Homo sapiens
gaatgaatagaattcttcgttatgtcctcatacttgcaggtggactctagcaccacaagcactgatatattcttgaaaaaacaatgaaaacaatttaaacacatgatattttaattgaaagaaraaagagaaaggtggtatatttaatatagaataatttgggtactgtaatcgttaaacagcttttatgattagcttaaaaacttaagcatatgtttgtatgatatatgattgggtcaaagtgataatattttgaaagcccatgtggctaccagaaatgttttagaactactatatttacacaactttataatagattttcacaagaagttaggagaacattggacttccattcagcattttaaaacgcacaggcataactagcatgaggaatagtaaagttaatgagatgaatctgcccatccaagtcttctttagaccatgtaataaagaggtatcttttcgatttcctaaattcatttagggattttgatatatcattgactgggcaacagttttaacttgttacttctttttagtttaatgtataaacgtgtgggtatacctttgtgtcattttatgagaatgagaagcaaagaatataaaagatttcacaaaactatggtattaaatcatatttctgtcctcaaaaatgaatggtaaatgtattaatggtactattgtagatttatagaatctttccataagtaaattgtgaatagcagagaaatttgcaa

SEQ ID NO: 685802 - DNA, 737 bp, Homo sapiens
gaatgaatagaattcttcgttatgtcctcatacttgcaggtggactctagcaccacaagcactgatatattcttgaaaaaacaatgaaaacaatttaaacacatgatattttaattgaaagaaaaaagagaaaggtggtatatttaatatagaataatttgggtactgtaatcgttaaacagcttttatgattagcttaaaaacttaagcatatgtttgtatgatatatgattgggtcaaagtgataatattttgaaagcccatgtggctaccagaaatgttttagaactactatatttacacaactttataatagattttcacaagaagttaggagaacattggacttccattcagcattttaaaaygcacaggcataactagcatgaggaatagtaaagttaatgagatgaatctgcccatccaagtcttctttagaccatgtaataaagaggtatcttttcgatttcctaaattcatttagggattttgatatatcattgactgggcaacagttttaacttgttacttctttttagtttaatgtataaacgtgtgggtatacctttgtgtcattttatgagaatgagaagcaaagaatataaaagatttcacaaaactatggtattaaatcatatttctgtcctcaaaaatgaatggtaaatgtattaatggtactattgtagatttatagaatctttccataagtaaattgtgaatagcagagaaatttgcaa

SEQ ID NO: 685803 - DNA, 579 bp, Homo sapiens
tttttgtatctttagtagagacgggctttcaccatgttggccaggatggtctcgatgtcttaacgtcgtgatccggccgcctcggcctcccaagtgctgggattacaggcgttagccactgcgcccggccccagccaggcagttttaatcgagcgctcacaaccactgagacgcagygaagcacccaccataaaatcccaggaggccgaccgccggttcagactttttcttttctttaatccccgtccaagggatccgccctcaccccccaccccagccaccccaattccctattccctccccttggacggcgccggggaaaacaagctgctcgagctttatttcttcggtgcaaccaactcagaatgaattcctccgcccctgcgtgctcagtgagtcggcaccctagcagtgaactgcatttaaaacctcaggaattgagcgaactctcccagtggctctcctcaccgggatccccttccacgcctcctccccgtgccgcgcctcagtccgcactgctcattggccgcgtgccctgccaatccgatgcacgtcggctagggcaaagaccgcgaaaaa

SEQ ID NO: 685804 - DNA, 621 bp, Homo sapiens
taagtctcttataagcgctatttggccaggggcagtggctcacgcctataatcccagcactttgggaggccaaggcgggtggatcagctaaggtcaggagttcgagaccagcctggccaatgtggtgaaaccccatctctactgaaaatacaaaaattagctgggcgtggtggtgcatgcctgtaatcccagctacttgggaggctgaggcaggagaattgcttgaacccgagaggtggaggttgcagggagccaagattgcaccactgcactccagtctgggcaacagagcgagactccttctcaaaaaaaaaaaaaaaaaaaargagaaccattcacaaatccttcaatcaggcaaattgttactaagtgcaaaagtgtagaaacagggagagtgggtttttcccccgcttttctttctgcctcaacagatctgtatatatccatttctgcatggatttatctgtgaaaagttaaaaaatgaaacagcaaaaacaaaacaaggggaatattattcttcatccaggagaagggaaaattcccaagtaaattatcacagataatataggattcatcttgcagaattacttctttaagagccatattcatcaacttctctcc

SEQ ID NO: 685805 - DNA, 621 bp, Homo sapiens
taagtctcttataagcgctatttggccaggggcagtggctcacgcctataatcccagcactttgggaggccaaggcgggtggatcagctaaggtcaggagttcgagaccagcctggccaatgtggtgaaaccccatctctactgaaaatacaaaaattagctgggcgtggtggtgcatgcctgtaatcccagctacttgggaggctgaggcaggagaattgcttgaacccgagaggtggaggttgcagggagccaagattgcaccactgcactccagtctgggcaacagagcgagactccttctcaaaaaaaaaaaaaaaaaaaaagagaaccattcacaaatccttcartcaggcaaattgttactaagtgcaaaagtgtagaaacagggagagtgggtttttcccccgcttttctttctgcctcaacagatctgtatatatccatttctgcatggatttatctgtgaaaagttaaaaaatgaaacagcaaaaacaaaacaaggggaatattattcttcatccaggagaagggaaaattcccaagtaaattatcacagataatataggattcatcttgcagaattacttctttaagagccatattcatcaacttctctcc

SEQ ID NO: 685806 - DNA, 843 bp, Homo sapiens
tccctaaggcttattttaactctggtatcatctaatttttaaaatagtacttaaaacaaaaacaaaccacagttaaggacaagaaattacaatcattttacatggatcatgagaataaaaaatgcacagataagcaattatttttattgttgaatctgaaaaagaagggaaaggaaggtgggatgcagtggttcacacctgtaatcctagcactgtgggagtctgaggtgggcagattgcttgaccccaggaattaaaaagaccagcctgggcaacatagagaaactctgtctctaccaaaaaaaacacaattaactgggtgtggtggtgcatgcctgtagtcctagctactcaggaggctgaagtggraggatcacttgagcccaagaggcagacgttgcagtgagccgtgacctcaccactgcactcaagcctgggtgacagagtgagaccttgtctcagagaaaaaaaaagaaagaaaggaaaagtgacgtatcttgagttccttctatggtccagaagctatcattagtcccatttgacaaatgaggaaactgaggctcatctggttatacaactccatggtagaaacagcagtggaaccaaagtccatttctactgccgccactcactaaaaggagaaaacatttattaaacaaattttcagttttaataaatgactattgactagataaattaataaaatattattgcttctgaaaggtaaaattaggattcattgtacaaaggtccatcttaatagctcaaaattctgaattgagaaatatttttaataaaacaccttatttaaaattgtcaggtacatactccaagagttctcta

SEQ ID NO: 685807 - DNA, 678 bp, Homo sapiens
ttttgagaacttctttttgatgatcagttaatattctttcctttgcatcttttccttctggaggtataaacacaaagtcagtagacttttcctcttccaaaagaatttcaccctttacttttaaagacgaagattcaagtttcagctgcagatttgaaaaaataagcaaatgtacattttagcttccaaattattttccaatatttctatcactctcctctaataatgacaccatttttcaatagtgattatgaaagttgatgatrctcatgatccgtaacaaattagtacaatgttccccactttctttctgcctctaataaatactaagaaagtagacagtattaaacctctttacgaagtagggaagtctgtgcttaactacaaagtatggacaaaaccgtctgtcaggctaacacatggaaatgaactgatttggcaggaggagagtatatttgcagctctcaagttgaggcatgacttagtgaaagtcgccaatacaaaatgccctacatacaagtaactttggtactacaatattatcttaataaatgttcattggaaccattgctttaattctatttatagttgctacaagaatgtggcagaggtattcttaaaaaataacacttttctttcatttcaccagggccatggtctcaagattctagaataacc

SEQ ID NO: 685808 - DNA, 661 bp, Homo sapiens
gctgaggcaggagagtcacttgaacccaggaagtgagggttgcagtgagctgagatggcactattgtactccagcccaggcaacaagagtgaaactctgtctcaaacaaaaaaattttaaaaatattatrttgacaaatctgtagtttgaagtgttttccaaaccaaaaacaatgtaagaaatgaaaacaggaaaacactgatatttgacttgataaaactttaaacaacaaaactaaaagggaatattaagattaaatggaaatgagctaaacatcattaattcataataaaatctaagaaaaaacattaatcatgctaataaaataagtaatttataaaatcagaaactaatttttacatatcaacttaactatatttctttaaacaagaactctatgtggagtgacgatgtagtatgctgtgcaatataggtatgtaactgacatcgcctttcttaaagacaaggtggcaatagtataaagactcaaaaacttatttacagctttggattcagttcctctttctcacaaaagaatgtgaaaaggagatcaatctttattttaaaaattgacatcagacttccagtttccagtccagcatataaggatattacaagttgccactgcatcctaacaacaagtacaaagatatggaagctg

SEQ ID NO: 685809 - DNA, 642 bp, Homo sapiens
aaccagtacatcaccaaaagaggacacagtaatgggaagactttttataaagtgccctaaaaaaagaacaatgaaagaactagaagcacttgatccagagaagaaatgagtcaaagttgtctttcaatatatagaagagtgtgttaggtcaagagagcaggtatattctttgtggatatatatccatttaggtttttggtggcaaaaagtagaaaccaactggttaatataaaaagacaaggaataaaaggaggataaaaaagagaaggaaaaactgaagtggaacaaaaatcatcactcattggaagtgtatgaagtaattcaaagaatgaaaggaaaactgactattaggctccaaaacaatgggaaatatggcaggtccaggaacctaggtcatagctgtggttaacaagattatgtagctactgtttttcctccctttatttcaaattcttgataacaagcttccatttgatctaccttgtgtcacacgcctaccactggagtcgtaaacggtgaagaggcttsgctggcagcttcaaccagcccacctccagtagaagacaagttagtcatccaaggaaaaatcaggtattgtgcccaaaggaagaggggaggaatcttgagtaatccaagtcaaaa

SEQ ID NO: 685810 - DNA, 645 bp, Homo sapiens
tagccgggcgtggttgcgggtgcctgtagtcccagctcctggggagtcaggcaggagaatggcgtgaacccgggaggcggagcttgtagtgagccgagatcgcaccactgcactccagyctgggcaacagagcaagactctgtctcaaaaaaaaaaaaaaaaaaaaaaaaaggatccaatttcagatcaattttcagtttggaaaatatggttaccatatcactgttaattttctatagtcattgctagctttctggtaatgaaaatatcaattacatagtatgttaattttagaactgaatgcagtttagaagataaacttattattcagcaatactataacttccctaaagtcccattttagctgacattggttttgtttcatctgtaaggtaaggatcttgaacttgctcctctccagggtccttcctggctctcaggttctaggtcctacagacctgattgcaggcctcctgttggacgcacttcttacccttactcagcatacttaccatgaacctgcatcacagccaaccggggtgaacagagctgggtgcatggctggtgtgtgtgactctgtcctccttcttcaggcagaagagctgtccatcaagctggacccctacatccgcacacagaggagag

SEQ ID NO: 685811 - DNA, 645 bp, Homo sapiens
tagccgggcgtggttgcgggtgcctgtagtcccagctcctggggagtcaggcaggagaatggcgtgaacccgggaggcggagcttgtagtgagccgagatcgcaccactgcactccagtctgggcaacagagcaagactctgtctcaaaaaaaaaaaaaaaaaaaaaaaaaggatccaatttcagatcaattttcagtttggaaaatatggttaccatatcactgttaattttctatagtcattgctagctttctggtaatgaaaatrtcaattacatagtatgttaattttagaactgaatgcagtttagaagataaacttattattcagcaatactataacttccctaaagtcccattttagctgacattggttttgtttcatctgtaaggtaaggatcttgaacttgctcctctccagggtccttcctggctctcaggttctaggtcctacagacctgattgcaggcctcctgttggacgcacttcttacccttactcagcatacttaccatgaacctgcatcacagccaaccggggtgaacagagctgggtgcatggctggtgtgtgtgactctgtcctccttcttcaggcagaagagctgtccatcaagctggacccctacatccgcacacagaggagag

SEQ ID NO: 685812 - DNA, 887 bp, Homo sapiens
atctttctcagcattcaagggaaggccatacacttcctgggcatacctcagccaatgacctagcacaagagaaatactgggacttggccatttctacccaatgcaggactcttttaaaagcaatctttgtttgggagctcctggtggagttggctgaaattttgtgagatctggatcrcagtcagaggctctccttgatcaatcttctttcacttttcttttctttcttccttcacctttcttgtcctagttgtcagatatgcattatgttctggagattctctctgcttaatcttatttcctttcctatttatagacaaccacctctcaatctctaacactcataaatttatctcagtctcagtttgaggaatcaactgacaaaacaacaattaaaaataattatttaaagaaaatatatttaactggcataaaattggcatactgaccaatggaacagaatagagaactaaacccacacatatgtggtcaactgatctttgacaagagtgccaacaatacacattgagaaagaaaatccccttcagcaaatactgttgggaaaattagatatccacatgcagaagaataaaagtgaacttctttcttataccatatacaaaaattaatgtaaaataaattacagattttaacgtaagatctgcaaccataaaacttctaggataaaacataggggaaagcgtcttggcattggtctcagcagtgatttcatgaatgtgacaccaaaagcacgggcgaccaaaacacaaatagataagtgggactatatcaaactaaaaagcttctgtatagccaaggaaataatgaaaagtgaaaagttagcctacaaaatgatataaaatgtttacaagtcatatgtctaataa

SEQ ID NO: 685813 - DNA, 829 bp, Homo sapiens
tgaaaagaactgagcatatgcaaaaataccacgcagaatgtgttggcattgagatgaaaactgttcaaaaagaaagaagaaaggaggctttagttcttcttaaataatactagatgatgagttgcaaaatataaaaccatttaacttggaagctgtctatgatatacaaataactgaattgcagaaattcttgatgttcctcaacagcagccaaactcaaagtggttcctagccttcacacccatttttctcttcccatgtggatcacgtgattcacccttaaggaatcaattgcctttttggggcctttacatccaggtaaagattttccagatataactatctactaagctcatcttcagtgtaagcatagctccctttccacaaaattctctgtgattgaaccggatcctcttgttacaataccctacttcctgtaattcccttgctgccaactggattgtaaccagaaatgcctgaaaaccttggacattccctcatcttgccaaattgatctcctagtcagggatctctgcaggttatcaactaccccagtgcttgtccaacttcagtgagtagatttagtagtactaaatcctgctctatctatgtctctccaaatcccaggatattatagcgggtattaagttaaaatttttgaatggatattcactggctacatataaaacccgacctaaaaaatggatgaggaatgcatagagaagagtgaataaccctccttaataggaaacttgaacaaggagaaaatcaaarttattgaacatgtgcactcattgaattgaaaacaaaatggtttaaaggccttgaa

SEQ ID NO: 685814 - DNA, 1462 bp, Homo sapiens
tttttaaaaacaagataactaacttaaacacagatactgcttttcctgtggtgcttgcacaagagtaaactaagagtctaattaagtagtttttttttctccattagaatttatcaggagatatacaaaaacatttataccattcttcctctgggataactaaataattgaaagtaagaggtatctgatctgataatggatgtctgctaacattttggaggcttttaaaaataggatgcaaagtgattaaattactaaatgacaaaggaaagtatctttcaatgacactcctgaagactgataacagagcacattttgtttcattatggaaagcagttaacattaatgctgtatataatatttttaaaagatgaaagtgaaygtaaattagccacaactgtgtaaaaataaacatatttctcaagttatagatgaaaaaaccaatatattggatcaacccatgtttccacaatctattatagcctgttggcaatagggggttggggggttggggcgtgtcacaggttgtcagccaccattacccaatgatcattgcaagtaatgcaccagtttattatgtcaaatagaataggtagacacagtagtaagatatatatatataaaatatatatatgtgtgtgtatcactatatatgtctatatatagatatataattactaaatatctatgtttgtgtatatatagatatatattactatgtctctctatagatatatatatattactatatgcctatatatagacatagatagtgatgtctatctatatataattattttgatatgaagggaggagccctagtagcagattcattcctgaggattgacctgggacaagcatttcagtgacagagttgtgctgcatcttaaaatttttattatttagttttctcttaaaaatgtaacttctgcacatgacaataacttccaagaatatataaaaaaccataccaaaaaatagatctttctttcctcttcattcctcacctcttagttctgttccttaaaagtaacaccattacaattttatcctcctcctgttatgcatttattttaaacaggggaatttcctgaatgctctgtaatgtatatttccctgtggaacacattaagtgcattttctttttctatcctacacctttggaatatatttggaataaaaattaaagttgccaagcaattctgtcatcacatgcttaatatgatatgtaaattattggcatctttgctctctgtggccccagctgctgagaattcccataatagctgcagaatgaatgacaggccagaaccagtagcttgtgtttaattttcagtgagctaatatgagaaaaatgaataaatctttgcacttaatgaagacccagtatgcttatgcaagcattatattacctttctgctaggtgattcaaaaagtaaattttacatatttgtgtgtctcc

SEQ ID NO: 685815 - DNA, 1221 bp, Homo sapiens
agaggatgtattcatgtcctaaggctactataacaaagtatcacaggcttagtggcttcattttattctctcacagttctagagactggatgcctgaaatcaatgtgtcagtaatgccacacttcctctggcggctctagagaagcatccttcattgcttcttcctagtttctggtgactcccagcaagccttgaggttcctgggcttatagctggtttactccaatctctgacgtcatcttcacaagaccgtttctcctaactgtctgtttctgtgtgtctgtctgttttttcttgctcttataatgacaccacctattggatttagggcccactctactccaatatgatatcatcttgatccttaactaatcacatctgcaaaatccctgtttccagatatggtgacattccgggcttcttggtgaacataaattttggggaacactattcaatccactataaagggtgaactatatatatacataattttatgtagaaaatcttaatataagttgctgtataaagcacgcatcagctgtgtggactgcaaactgacattcagatttcttggaaaattccaacatgtaaaacatcctgaggatatccagtatagtcgatggtgacttaatttcatgtttagcattccagatagctctacctcctagaagacacaccccgaagacatatttgttagtgtacagagcttattctttcccgactagttttcacacttggtatgttcaaaatgggcataaaaaccttacatttgccccagtaatctgccttctcacctatcttttattattggcacagtctcttggttgcatgtttcaaatktatgaatccctaaatcatctgaagtaattgtcaatctagtctactatgtgcaaatggcacacagagttaccaaacccttttgcatattgctgtaggagaggctttttaaaaaagtagctgccactgccttgaacttcttttctactttaatgtattttgtttatttcttattcacaaccactatctttcttatttctcattgaagtatttttattccagttaatctagaaacatctttccttaggatattactcacattataagattataattttttaaaaaatatagctctattatagtattatgttaaaacagtgataagtagcaactatttcattaatttttattatattcactaaatgtattttattttgggctgat

SEQ ID NO: 685816 - DNA, 887 bp, Homo sapiens
ggggagccctcattaagaaaaagaatttgttaaagtgtttttttgcaaattttataaaacaatgtatccttgtgaacacattgatggttcctttctagggtcttagaaggagcctgtgcgaggtaggagctttgttaacttcacagtaaatttacgtctgccaagtggaattacgtgattttgttttcttctctcttctggaagactttacaatcttattctgggaaaaagcaaagtacaaatattaataacaatacagcattttagatggtattatgtggcatagattataagtactgaagagttcataaaggagaaaaaaatgctggtagacttttggaggaaagttaaaggaagatgctttgcagagtgcttacaacagcaatgatgatgatagcaaattagcatagtagactgaaatttccatttataaatcaaacaaccaatttggtataaatgccaactctgcctcrtaaattgtataaaaacaaatgtgattatgaacttatgccaggcattatgccaggggtttgcattatcttatttaatatttatatcaattgaataaggtagtcttatttcattaacttgtccaaagttactttgttagggaatcttagtggtgagtttgcagctcacatctgtcagattttactcccaagtaccacttcacactgtctggaataacttttcaaaaatgcttgggcacaggtaaacacctccaagtttgttttggaagcaaatgaatgtgttctggagttagtatatttgaaaacctacccaattccttgacaacttaaacccacatatcccactgaaaaaacaaaatagctattataccatatgcacacactaatggaattttgcaaataaattcaacaataacc

SEQ ID NO: 685817 - DNA, 998 bp, Homo sapiens
ggcttgaactctttggccagcttggttggggagagctggaatggcaggttgagaagtaccaacaaaccccatcaatggcagcttccaacaccatctgattttctgaatttcaaatctggacacggaattgagccggaaaactctgaatgctgccagattctcatttcagatgcacacacatactcttacatgtctcaaagaaagtaaaataaaaggaagatagaaagaaggaaaaagaagaaaaagaaaccctgtagtccacatgaaagagcaaatgccatctgaaggcctcagcagctacacgggatgtcatacctgggctgacgctgccggcttctggggccacccttcggacgtggtctcagtcacacccaggctgacgctgccggcttctggggccaccattcggatgtggtctcagtcacacccaggctgacactgccggcttctggggccaccattgggatgtggtctccgtcacacctgggctgacactgccggcttctggggccaccattcggacatggtctcaataatcttcccgagctcggccagctcacaggagctcaagcttacaagtagttggtgtgtaatttgcatggtcagtagagacaaagaaaggcttcaaagccactgcacactcctgctgctctccagagataaagcgaggagagggtgacgatagccaatcagggcccacgccagtttcccagataggaaccatggccgataaacccgagaccacaggtgttccatccctgctactcagcccaaagcaacaaggaagcctgaggtgacaccacaaaatgcaaatttatctccaacgctgtcacttgttaagatagcaaagaaatgagccttgatccgtgaataaactgtatacatcaactcatctgggaaacaagcaagaaacccaagagaaaccacgggggagamaccgggatccatgttctatcccctgctgctgggccagacctgagcagcacggcagtgaagga

SEQ ID NO: 685818 - DNA, 998 bp, Homo sapiens
ggcttgaactctttggccagcttggttggggagagctggaatggcaggttgagaagtaccaacaaaccccatcaatggcagcttccaacaccatctgattttctgaatttcaaatctggacacggaattgagccggaaaactctgaatgctgccagattctcatttcagatgcacacacatactcttacatgtctcaaagaaagtaaaataaaaggaagatagaaagaaggaaaaagaagaaaaagaaaccctgtagtccacatgaaagagcaaatgccatctgaaggcctcagcagctacacgggatgtcatacctgggctgacgctgccggcttctggggccacccttcggacgtggtctcagtcacacccaggctgacgctgccggcttctggggccaccattcggatgtggtctcagtcacacccaggctgacactgccggcttctggggccaccattgggatgtggtctccgtcacacctgggctgacactgccggcttctggggccaccattcggacatggtctcaataatcttcccgagctcggccagctcacaggagctcaagcttacaagtagttggtgtgtaatttgcatggtcagtagagacaaagaaaggcttcaaagccactgcacactcctgctgctctccagagataaagcgaggagagggtgacgatagccaatcagggcccacgccagtttcccagataggaaccatggccgataaacccgagaccacaggtgttccatccctgctactcagcccaaagcaacaaggaagcctgaggtgacaccacaaaatgcaaatttatctccaacgctgtcacttgttaagatagcaaagaaatgagccttgatccgtgaataaactgtatacatcaactcatctgggaaacaagcaagaaacccaagagaaaccacgggggagaaaccrggatccatgttctatcccctgctgctgggccagacctgagcagcacggcagtgaagga

SEQ ID NO: 685819 - DNA, 1460 bp, Homo sapiens
tagctataaatactaactatgactatgtgacaagttgcagaaataaagactatttgttatgagtatttctacctcatttttatgaatatgtgtatatataatctttttcttctctatcttatccccttatcagatttcagtattgttaattttgcaatgtagcatttaagttaaaggatatcaaggagaaaagggaacactacccaaagactttgtaataaacagcctttccccaaagaaaactccaggcccagataacttcaatggtgaattttgtcaaatactttaaaaagcaacartgtcagtctgacacaagctctttcatataatagaagagaagggcaaaaaggagcagcgagtcctactcgcaagagaataaggataagcttcatatgagacgcaatgctttagaagtcctaaaagatgtgcatgttctgggcgcggtggctcacacctgtaatcccagcactttgggaggccgaggcgggcggatcacgaggtcaggagatcgagaccaccctggctaacacagtgaaaccccgtctctactaaaaatacaaaaaattagccgggcgtggtggcgggctcctgtagtcccagctactcgagaggctgaggccggagaatggcgtgaacctgggaggcggaacttgcagtgagccgagatagcgccactgcagtcaggcctgggcgaaagagcgagactccgtctcaaaaacaaagaaaaaaaaaaagatgtgcatgtgtttgtcaagtactgagtttacatttctttcctacagcttctacatctttgtcccatttctgtccctttgacacatgcagatcacatgtagcttaactatcacagaatggcctttgaaatactcaaaagagtgcctttgtgacacagttacttcctctgatttccagtccctcactatttctggcacattcatcttgaaaactcgcacttgtcgatatcactctggagacaacatggcagagtggatagaaaccctcaggccctgatatcaggaagatgtgggctgagatgctctgctactattgtgactttcagcaggtcattcaatttgccagtgacaattttcacattttctaaatcaaaatgataacactacccacctctagaactgttggagatttaaatgagagaatgcatttgaatttattcactagttcctaggcttaatacatgtttatgttgttctttttctcattatataaaatcctaaaactgaacatagctctcctaagaaagaggagccaagaaccatcctccctttatctaatatacagtgaaagtgtggtttttaaaagtaatattcctattaaggagatcccaatttcaccaatttttagcaatcacagtactctactgatttatgttaagtttatggctgatacaaatactaagagcttttctttgcatgccagtgatgccaacgcatgtttctacc

SEQ ID NO: 685820 - DNA, 1460 bp, Homo sapiens
tagctataaatactaactatgactatgtgacaagttgcagaaataaagactatttgttatgagtatttctacctcatttttatgaatatgtgtatatataatctttttcttctctatcttatccccttatcagatttcagtattgttaattttgcaatgtagcatttaagttaaaggatatcaaggagaaaagggaacactacccaaagactttgtaataaacagcctttccccaaagaaaactccaggcccagataacttcaatggtgaattttgtcaaatactttaaaaagcaacaatgtcagtctgacacaagctctttcatataatagaagagaagggcaaaaaggagcagcgagtcctactcgcaagagaataaggataagcttcatatgagacgcaatgctttagaagtcctaaaagatgtgcatgttcygggcgcggtggctcacacctgtaatcccagcactttgggaggccgaggcgggcggatcacgaggtcaggagatcgagaccaccctggctaacacagtgaaaccccgtctctactaaaaatacaaaaaattagccgggcgtggtggcgggctcctgtagtcccagctactcgagaggctgaggccggagaatggcgtgaacctgggaggcggaacttgcagtgagccgagatagcgccactgcagtcaggcctgggcgaaagagcgagactccgtctcaaaaacaaagaaaaaaaaaaagatgtgcatgtgtttgtcaagtactgagtttacatttctttcctacagcttctacatctttgtcccatttctgtccctttgacacatgcagatcacatgtagcttaactatcacagaatggcctttgaaatactcaaaagagtgcctttgtgacacagttacttcctctgatttccagtccctcactatttctggcacattcatcttgaaaactcgcacttgtcgatatcactctggagacaacatggcagagtggatagaaaccctcaggccctgatatcaggaagatgtgggctgagatgctctgctactattgtgactttcagcaggtcattcaatttgccagtgacaattttcacattttctaaatcaaaatgataacactacccacctctagaactgttggagatttaaatgagagaatgcatttgaatttattcactagttcctaggcttaatacatgtttatgttgttctttttctcattatataaaatcctaaaactgaacatagctctcctaagaaagaggagccaagaaccatcctccctttatctaatatacagtgaaagtgtggtttttaaaagtaatattcctattaaggagatcccaatttcaccaatttttagcaatcacagtactctactgatttatgttaagtttatggctgatacaaatactaagagcttttctttgcatgccagtgatgccaacgcatgtttctacc

SEQ ID NO: 685821 - DNA, 663 bp, Homo sapiens
tgtgaaggaagtcaggttctagatcctccaacttccccatgtacttgccgttaggttatttaattaatattcattkagcaaatcttagttaagacttttggtatacttcccagaaacttttttctaatatgcaaggtcttgcactgtttcccaggctggagtgcagtgacacaatcatagcttactgcaaccttcaactcctgggctcaagggagcctcctgcctcagctgggattccaggtgtgagccacggtgcccagctgttttcaatagatctgaaggaagaccaaaacaaattgtcaactgataaaacatttaaatgtttttggttaatacttactagcttgagatacaataaaaccccttttatttgcatcttcctatttatgtgaacaaggtacctaagcttacacgtatgaaaaaagttggaatagaattatagctgaatccgtctcattggagcaatcacagtgctagagaacttagataccaaaattttttttgagacttgagttttgctctccaggctggagtgcagtggtgccatcacagctcactgcaacctccgccacccgggttcgagccagtctcctgcctcagtttcccaaatagctgagattacaggcgcccgccaccacacccggcgaatttttgtatttttag

SEQ ID NO: 685822 - DNA, 663 bp, Homo sapiens
tgtgaaggaagtcaggttctagatcctccaacttccccatgtacttgccgttaggttatttaattaatattcatttagcaaatcttagttaagacttttggtatacttcccagaaacttttttctaatatgcaaggtcttgcactgtttcccaggctggagtgcagtgacacaatcatagcttactgcaaccttcaactcctgggctcaagggagcctcctgcctcagctgggattccaggtgtgagccacggtgcccagctgttttcaatagatctgaaggaagaccaaaacaaattgtcaactgataaaacatttaaatgtttttggttaatacttactagcttgagatacaataaaaccccttttatttgcatcttcctatttatgtgaacaaggtacctaagcttacacgtatgaaaaaagttggaatagaattatagctgaatccgtctcattggagcaatcacagtgctagagaacttagataccaaawttttttttgagacttgagttttgctctccaggctggagtgcagtggtgccatcacagctcactgcaacctccgccacccgggttcgagccagtctcctgcctcagtttcccaaatagctgagattacaggcgcccgccaccacacccggcgaatttttgtatttttag

SEQ ID NO: 685823 - DNA, 1222 bp, Homo sapiens
cccttactgggaaggaggcctggattgctggaacatgggagcctgagaaacttctggatcctcaagcatcaggcccagaggaagacagcagaagaggagataagggggtacagtgaaggggaaaggatagggaatgggtctgagggcaaagaggcctagaacagcacatcttctgatcttttgcccagacacaagtctacccacagatctttgttaacaaaatttgtcttggaactaagaaagctaccctcctctctcctgtccctcagtaacacttaatgattcaactcaacagttttttgttttttttttaagtcccaaaggctaaggttctagatctgggtcacttcccacacatgaccaagattcgtgagaaaagagatgacattgaatcaagcttttatctgaacctttggtctatttttccttgtccacagaagtagggaagtaagtattcatagggaatttagccaacctttgtccaaacagtttaacaccagtcacataattaatcagatagtctggcttttatagctatatctaatatgcatgtattaatttttttcaaggccttagaatcttttatctatattcaattgagaaatggtctctaagcgtaacttaatgtttgtttgatgaagatgctttgggagtacacaggaaccatgaagaaatttaaggaactggaagtcccagttaatagagagtcctggttaatgcagtgctgataaacagagagttgctgtatayagaggtggtgctgtgggcttgtttggaaaactgttcacttactgggcagcttacttaccctcacttacttaacctgaagggagagaatcatagaagtgagaaatggaaggaaaaattaagccatcctctgtttgaccctcttgttgtatgcaaggagactctgttctgtagaggagaaatgctcccctgagttcagccagtgaggtgcctgcaaggactggagaaagaaaatgagaagccagggtatttctctgctccctctctgccctgagcatgcctccagcagctactacatttcctccatggccccagcgccctccagacaagcccatcagggattccgggaacactatctcctccctttctcttttcagcctatgaatactagtgactttctgctcttattaacctttgagctatctctttatcccctctttggcattgcagcttttctaacactggtgtgacccat

SEQ ID NO: 685824 - DNA, 548 bp, Homo sapiens
ttcgactytgggctagttagttaacctttctgtgcttcagtttcatcatctgtgaaatgaggataaaaatggtgtgtatctctttgggttatgatgaggatcaaataaattagtatttaaattaaaacatatatctaacactgtaaatgcttgttaaataaataacagtttctcaatatcttcaaaggaaaaaataaatgggtctttgtcagccctttccagtgagctgagtgtgtcctgctggccccctatcgacttcactagggatgacaccatgttcaagagaccgaagaagagacccagagccagcgaacgagtcatagagttgattgaggggacttatatacagggtgttccagtggtggcaggctggacaggagaaccactaccctttgttaaaagcatggaatatcgatagctttttcacttagcattctccccctagtgacctccacctggcaatcttcatttaacccaacacaaagggctttgattccctgtatggcttgcattctgtggggtgggccaggggttcagatgttccttat

SEQ ID NO: 685825 - DNA, 674 bp, Homo sapiens
ctaaaaagattcaaataacccaaaagacagaaaaagggggaagaaacaaataactgagggaatacacggaaaacaaataacaaaatggtgtgtctaaatccaatcatgtcactaactatattaaacaaaaatgatctaaacacacccatgaaaaaagatttttcaaaattacaagaaccaactatatgctgcctacaagaaacccattttaaatacaagtcctacacagattaaaagtaaaggatgaagaaactaygtcatataataatcaaaataaatctattaatacattaatatatagattggctatattaatttcatccaaaatcctattcttgtttttcccaatttttcattcctctatgctaacatatttatacatagtggctattccttctttactcagaaaaacattaccagagtattaagctgtgttcatcaacaatttataaaatatatcaacatatcccttcactttatgaacttaccatctaagacaatataatgcaacagttattttaaaaacaaaagcaaaatatagcaaatagatctaaaacactgcatgtttgacaaaggtgctaaattcctatatacacaggattgtataagctttaggaatggcatggcatcctcactaacagttacaactgggccagggcagtggttaatgcctg

SEQ ID NO: 685826 - DNA, 609 bp, Homo sapiens
actaattctcatcaagtcacctctccacccttcatccacacatacattacrtaataatgctaagttagccatttacctcttcaaagtaaactatcttaaaaaatatattcctttaattttttaacaggaaaataatttcgtggtattagatacttccatccccaaagcaggaactatttactttgtttctccatttccaaaaacaagttttagtaagacccagaaagtctgcttacaaccttgaatggaccatcacagtgttaggtccagtcttaataacctcggggagactggcttcttttgaggactaacctataagacaaaatgagcctgaaaattccaggagtacagtatagactgtatctcttaaataggtgttggtgtttaaaggacactcttgacagaaaacttcctgagacttggtcaaatctactttgggacccacaatagtgacctgaaatccaaagacgggatgtaaattaaactgatctatataagcagggagcaacattgtattcagcatccttcataaactccttgactttttttcctaccagaaaacatgatgatcctccccaacgactgaatcatttacattttgtatattca

SEQ ID NO: 685827 - DNA, 1162 bp, Homo sapiens
aaccaccatggacacatttccctgtgtaacaaacctgcatgtcctgcacatgtaccctggaacttaaaaaaaataaatttttttaaaaagaagcacttacaaaataaaactgaaagcaaatttaaaattatactgaaagtatatttcttgcctataaatggatagtgattcttaaaagtttgattatgatagacaatttacaatgttttttacacagctatataaaatattcacagtgtaatgaaataattttaatgcgcgattgaaacaggaaaggcccatgtgtcaaactggttatgttagtgaaagagttctgtttttatagttttaaaagtaactgatatatatggatgtatatgtggatccataccagtaagtgtctcttgtatcataactatccattcattccatcttcaggaatttcagaatctctttattctcctttgctttgtaaaacatttcaaaatgccaaaaataattaatttgtaatactactgctgataatttttaattatgaagttattaagttcaggtatataggttaagtttgctaattatcttgctggacatttgcaaacctctgccaactgttagaagaaaaatttccccagaacactagtcatttcatattataatgtatggtgaaaactactgcataagtatcccaaaacaagtggcatgatatatttttcttttatgataatctttttatcaaaagtacaaattgttttgtcttcagagacatagttaagttattctgtagataggtaaatctgaatctcatactccataaatgtaatatttccccatgtatatkaccttaaggtgtcaaaataaaataacaatggacatttactcttactccacgatattcttgaccattgaatatctgaggtggtagagccttaagggtagaaacctttattctcatttattgaagtactttaaaactgatagaaacatctgttaattcatactttatattgtaactctctaaaattctagtaacttcttcttgtctctgcttcacctagatagagggagagagaaatagaaagatgttaatctgctggctggtcccaatgtttttatatttttttcattttccctgtccattatattatggaacaggaacagcttttaacggtgtaattttctttga

SEQ ID NO: 685828 - DNA, 729 bp, Homo sapiens
agacatacaatcctgaagagccgagagttgtggaaacaggcacacaaagtactctagtgggtcctttggagtgtcgataagtggggccatcctgcttctactccttggttcccagaacaatgtttcatttctattggggacattgtaccatatagaagtctctgctataattcatatattgcatccttaaaaatagaatcctatccttgtagagtgttgctggcaagctgtcatttcacctgtgtcttaagccgatcattccacagttctgtcgtactggctgattctagattatgtggtgtgtgatatgaccagtagatctcatactcatagacccactctcaaacctcacaagtattatgtaagctcccctatagtgatgcggttgagtcttcatggacaggaaaggtaaacccatatctagcgtagacatttctctctaaaaggttgaaccattgactcttccaggagaaaaagagcccagtgcattcaactaaccaccaagtggctgactgctctccttgaagaatagtatattattaggatttagtaataattttgctgcctgcaggttggacctagagaggcagcaatagctaggtagatcttgataagatagagtcartgctgttgagcctatgcctaacctctatctctgccaccttgctcattctatgcatgtgcccatgatgccagctctgtggtggtcaaaatacaaaatttagctaa

SEQ ID NO: 685829 - DNA, 595 bp, Homo sapiens
gatagaaggcaatttaatttaccagtatggattgaataattggatatatcagtttgaatgtattgattgaaccagcactttctaaatagtgataggcaagactttttctagattttattccagggacgcaaggatggctcaagatacacaaatcaataaatgtgattcaccatataaggagaattaaaaacaaaaaacatgatcatctcaatagatgtagagaatattacataaaattcagcgtcccttcaagataaaaactttcaacaaaataggcattgcaggaacctttctcmaaatagtaagatccatatataacaaactcagccaatatcatattgaatgggtaaaagttgaaaacattctccctacaaaccagaacaagacaagatgcccacttttagtcttcctttcaacacactactgaaagcactattcagagcaaacaggcaagagaaagaaataaaaggcatcaaaattggaaaagaggaagtcaaattctctgtttgctaataatataatgttatgtttagaaaattttaatgactcctccaaaatactcttagatttgataaataaattcagtaaggtttca

SEQ ID NO: 685830 - DNA, 595 bp, Homo sapiens
gatagaaggcaatttaatttaccagtatggattgaataattggatatatcagtttgaatgtattgattgaaccagcactttctaaatagtgataggcaagactttttctagattttattccagggacgcaaggatggctcaagatacacaaatcaataaatgtgattcaccatataaggagaattaaaaacaaaaaacatgatcatctcaatagatgtagagaatattacataaaattcagcgtcccttcaagataaaaactttcaacaaaataggcattgcaggaacctttctccaaatagtaagatccatatatamcaaactcagccaatatcatattgaatgggtaaaagttgaaaacattctccctacaaaccagaacaagacaagatgcccacttttagtcttcctttcaacacactactgaaagcactattcagagcaaacaggcaagagaaagaaataaaaggcatcaaaattggaaaagaggaagtcaaattctctgtttgctaataatataatgttatgtttagaaaattttaatgactcctccaaaatactcttagatttgataaataaattcagtaaggtttca

SEQ ID NO: 685831 - DNA, 747 bp, Homo sapiens
acctgaatgatttctacatttggctactgcatatcaatcactggagacagcagccactgctctgctgtggcagagaagagctatactgatttccgttagacatgcttctgctaaaatagattaattcttagtcatcagaatctgattaaggctgaagcttagcaggctaattttcagcctatgggaataaagtcacagtaattttccaatcatttaatgggaaagaaaccaacaaagataaaagaaaaacaygacaccaggaggctacaaatgtcaaatatttcctgcctgtctggcccattaaacatcatctgggtaggctttacttttacaaggcataatttccctaataattaagaatgggaaggttctcaaagtgcttagtttactatttagaaaaacatcaccagcacaaggctaattaaacctttgcttttcatcacagtatatggttgccatacttccctgcgatttgaagcaatggtcttggactatattttacttccaaaaaatccaggttctttgaagcaaacagttatcagaaaggaataatttccaatgaaaactagatttatttaaagtagcaattggtggcttttattcactttattttttacattgaaatggctgtgctctactccataaccaacttggctcaaacacacacgtattttttgaatgtaggtaagcattttgccagcggcattttgccagatactgggcaaaaaataaaaatagattctggct

SEQ ID NO: 685832 - DNA, 747 bp, Homo sapiens
acctgaatgatttctacatttggctactgcatatcaatcactggagacagcagccactgctctgctgtggcagagaagagctatactgatttccgttagacatgcttctgctaaaatagattaattcttagtcatcagaatctgattaaggctgaagcttagcaggctaattttcagcctatgggaataaagtcacagtaattttccaatcatttaatgggaaagaaaccaacaaagataaaagaaaaacatracaccaggaggctacaaatgtcaaatatttcctgcctgtctggcccattaaacatcatctgggtaggctttacttttacaaggcataatttccctaataattaagaatgggaaggttctcaaagtgcttagtttactatttagaaaaacatcaccagcacaaggctaattaaacctttgcttttcatcacagtatatggttgccatacttccctgcgatttgaagcaatggtcttggactatattttacttccaaaaaatccaggttctttgaagcaaacagttatcagaaaggaataatttccaatgaaaactagatttatttaaagtagcaattggtggcttttattcactttattttttacattgaaatggctgtgctctactccataaccaacttggctcaaacacacacgtattttttgaatgtaggtaagcattttgccagcggcattttgccagatactgggcaaaaaataaaaatagattctggct

SEQ ID NO: 685833 - DNA, 2101 bp, Homo sapiens
tagacatattttcaacataatttgctgaccaattagatgtgggatataaaagaaagaagagttgagtatattccgaagttttaggtctgagcaatggggaaaattaagctggcattaattaagatagagaaaactattcaaagagcaggtttagggtgtcagtggtggggcagtgtgggccagggaagaggagccagggggagatcaagcacttagtttttgcataagtttgagatgcctggtagtgattttagtcaagcaggtctgtcctccaccagggccagaggtataggtcctatgggaatttctgccaaagaattgcagattgaatttacttgccaccgtgtatttcccttctcctctttattaaaaaaaaaaaggaggagagctatctgccttttaaataactatttgtcttccttcagtatatataaaaaatccaagtggaggtgtcaggtagttagatagataattctggaatttggaagagtggtctagcctagaaatataaattttttgttctttagcatgtaaatggcattttaaagcatgagagtgaatgtaatcacttagggagagaatatagataggaaagaagagaccaaagtctgaactctggaacactgcaatctcaagagtttggaggagttgaaaggaaaccagcaaagaagaactagagtagccagtgaagtaggatgcaagtcaggtctgctagatctgatttccaaaatgtcttcagaatgccatagtattcttagatcagaacatggtaactggtatattacagacagttgcttttgaaaaattatattggataattggactatttccatacacatatcctgctatcagagttccttccggatccactgatagttctgcatttactctctgtccatgtaatatgaggtttttgaagtttaatgagatactcttgagaatatatgttaatgccatctttagagggtgatatatctgtgtaggctctgtattaaatatgagagttcagaatggagtaagaaattcagttgcttcattaagctacagaaattataattttaggagatttgacaattttatattcttttgaatatcctcattggtgacaaatttcttttgctttgaatggatttaactttacagagtatctgcagtaatttgtgtgttgttgaatagagcgaaaattggaaaatcaatataacattctagaaggtaattggcatyatataccaaaacacttaaatttttatatagacattgatatagtaactcttctgacaggaatttattctaaggaaacagtcttatatatatgtgcaaagattttttttatgatattgttcattatagtgaaaagttaaaaacaatctaaacagtagagtattagaaaaatagattttaggataaccattcagcataatactatgagtcaacaacgtataatattatggaaaatatcaaatgaaatagaataaaagtggaaaaatcaaaatatcaaacagtatgtgaaaaattctgtatgtacacatatatatggacataaatatgtagaaaaggatatatttgcaagtgttaaaattcatctctacatagtagaattgaaaaacattttcttttttcattattttttctaaatattctacaatgaacatatattaattttgaaacaaaaaatatatttcaaagaagatagaattatggttcttcaggcatgtgcgatagttaatgtgggtaatcaaacagtctttgctcagtactaaaactataaaaggaatttttaatttttggaacaatagcaacaccattaaaagaaatggatagcttcccaaagagaataatttgaaaaacagccctgatttggatttggaagttctgggattttgagggggtgttggggtacattttaaattgagctttaatttgcatagtaaaattcacagattatacatttgtgtaaccaacatccaaattaaaatacagctggtatatttgtctgaaaaaaaatcattgtttttctttcaacagtattataccttaaataatttcttaaagcagtatagatctttcagggcattttctctttgttggtacttggaatcat

SEQ ID NO: 685834 - DNA, 1931 bp, Homo sapiens
attgatgttacctggaatttagtgattttgtttatttaaatgacaataacaacaaggaagtatattaaaaataatcttatgattacaccaattcatgtgagggttagaattaatgcatattctaaggragaaaattagaaaatcaagaagttccttaagaatggcattcttgggcctgttacatatgccagccacactgaatgtgactatatcaaagtatcaataattttgcctaattcatgcggttctgtgactttctgatttctactagtcccaatactgctgtttttaaactatggttttcattttgccaccacaaatctgtggctttctgatttctactaaccccaatcctgctctatttttaagctatggttttcatttgccaccacataggcacataaggtgcgtgatggcatctttgttccatgtttatgatcatttgttggtgtaggactctggaagaacatttcatgttaatgccctgagccacctgccacagaaaatcacagattatgctgtgatattcctaatggaagtcttgatgctgaaagaatttgactaaagactctgactaaagactcgaggctgatagaacagaccagttacagtgtgggataacagactgatacacccctttaaaaaggatggtgaatacaaaaaagactgtcaatggagtactggtatttgacccatgttccactgagcattagggctctgtagaactgtctaatacacaaattaaatacctgatagacagggtagaaaaggtaatctgtttcattttaagtgttcatactgagggattgctagtggctccgtgaggtatggaaagagactgggtcattgaccatgggcctcagcaaaggtaatgggagccagaacgagtggaatcgaagtgtaagtgtaaaggagaaagactgcagtggaataaacttatcagaaaaggactgtgataagtttaatttgataaagaaaaacctggagtgccacatgcaatggacatctttctttgtcacaccagattcatcctctatccccctctaccacactctctgccttaggaagttaacctgtgtggtcgactatgggctccccagtctcactgtctggacaccacatcttctgtggtttccatatactctaacctcaccttcataaatagtgcctttattaaatcctcaaattaccttaatttgagcataccatttgcttcctgctgggatcttgactcatacaccaaatatgacttaaaattttgatcagaccatgtgtggtggctaagatctgtaatcccactactttgtgaggctgaggcaggacgactgtttgaacctaggagttcaagactagcctgggcgacacagtaacaccccatctctacaaaaataaaaataaaaaattttccaggcctggtggagtgtgactgtagttccagctactcggaagacaggagagaggatcgcttgatcccaggtggttgaggctgcagtaagccatgattactccaccgcactccagcttgggttactgaataagacctcatctcatttaaaaaaaataaaggagaagaaaaaagattttgatcttgggtggccctaaggataggtgatgttattagctgagataaggaatataaggagccagatgtggtggctcatgcctgtcataaataatgcctttatcaaaacctcacattatcttaacttgagcatatcctttgcttcctgatggaatcctgactcatacaccaaatatgactttaaaattttgatcagaccaggtgcagtggctcatgcccataatcccagcactttggaaggctgagttgggaggatcactcaaggccaggagttctgaggtgggaggatcacttgaggccaggagtttgagatcaagctaggtaacacagtgaaaccccgtctctctct

SEQ ID NO: 685835 - DNA, 1931 bp, Homo sapiens
attgatgttacctggaatttagtgattttgtttatttaaatgacaataacaacaaggaagtatattaaaaataatcttatgattacaccaattcatgtgagggttagaattaatgcatattctaaggaagaaaattagaaaatcaagaagttccttaagaatggcattcttgggcctgttacatatgccagccacactgaatgtgactatatcaaagtatcaataattttgcctaattcatgcggttctgtgactttctgatttctactagtcccaatactgctgtttttaaactatggttttcattttgccaccacaaatctgtggctttctgatttctactaaccccaatcctgctctatttttaagctatggttttcatttgccaccacataggcacataaggtgcgtgatggcatctttgttccatgtttatgatcatttgttggtgtaggactctggaagaacatttcatgttaatgccctgagccayctgccacagaaaatcacagattatgctgtgatattcctaatggaagtcttgatgctgaaagaatttgactaaagactctgactaaagactcgaggctgatagaacagaccagttacagtgtgggataacagactgatacacccctttaaaaaggatggtgaatacaaaaaagactgtcaatggagtactggtatttgacccatgttccactgagcattagggctctgtagaactgtctaatacacaaattaaatacctgatagacagggtagaaaaggtaatctgtttcattttaagtgttcatactgagggattgctagtggctccgtgaggtatggaaagagactgggtcattgaccatgggcctcagcaaaggtaatgggagccagaacgagtggaatcgaagtgtaagtgtaaaggagaaagactgcagtggaataaacttatcagaaaaggactgtgataagtttaatttgataaagaaaaacctggagtgccacatgcaatggacatctttctttgtcacaccagattcatcctctatccccctctaccacactctctgccttaggaagttaacctgtgtggtcgactatgggctccccagtctcactgtctggacaccacatcttctgtggtttccatatactctaacctcaccttcataaatagtgcctttattaaatcctcaaattaccttaatttgagcataccatttgcttcctgctgggatcttgactcatacaccaaatatgacttaaaattttgatcagaccatgtgtggtggctaagatctgtaatcccactactttgtgaggctgaggcaggacgactgtttgaacctaggagttcaagactagcctgggcgacacagtaacaccccatctctacaaaaataaaaataaaaaattttccaggcctggtggagtgtgactgtagttccagctactcggaagacaggagagaggatcgcttgatcccaggtggttgaggctgcagtaagccatgattactccaccgcactccagcttgggttactgaataagacctcatctcatttaaaaaaaataaaggagaagaaaaaagattttgatcttgggtggccctaaggataggtgatgttattagctgagataaggaatataaggagccagatgtggtggctcatgcctgtcataaataatgcctttatcaaaacctcacattatcttaacttgagcatatcctttgcttcctgatggaatcctgactcatacaccaaatatgactttaaaattttgatcagaccaggtgcagtggctcatgcccataatcccagcactttggaaggctgagttgggaggatcactcaaggccaggagttctgaggtgggaggatcacttgaggccaggagtttgagatcaagctaggtaacacagtgaaaccccgtctctctct

SEQ ID NO: 685836 - DNA, 1931 bp, Homo sapiens
attgatgttacctggaatttagtgattttgtttatttaaatgacaataacaacaaggaagtatattaaaaataatcttatgattacaccaattcatgtgagggttagaattaatgcatattctaaggaagaaaattagaaaatcaagaagttccttaagaatggcattcttgggcctgttacatatgccagccacactgaatgtgactatatcaaagtatcaataattttgcctaattcatgcggttctgtgactttctgatttctactagtcccaatactgctgtttttaaactatggttttcattttgccaccacaaatctgtggctttctgatttctactaaccccaatcctgctctatttttaagctatggttttcatttgccaccacataggcacataaggtgcgtgatggcatctttgttccatgtttatgatcatttgttggtgtaggactctggaagaacatttcatgttaatgccctgagccacctgccacagaaaatcacagattatgctgtgatattcctaatggaagtcttgatgctgaaagaatttgactaaagactctgactaaagactcgaggctgatagaacagaccagttacagtgtgggataacagactgatacacccctttaaaaaggatggtgaatacaaaaaagactgtcaatggagtactggtatttgacccatgttccactgagcattagggctctgtagaactgtctaatacacaaattaaatacctgatagacwgggtagaaaaggtaatctgtttcattttaagtgttcatactgagggattgctagtggctccgtgaggtatggaaagagactgggtcattgaccatgggcctcagcaaaggtaatgggagccagaacgagtggaatcgaagtgtaagtgtaaaggagaaagactgcagtggaataaacttatcagaaaaggactgtgataagtttaatttgataaagaaaaacctggagtgccacatgcaatggacatctttctttgtcacaccagattcatcctctatccccctctaccacactctctgccttaggaagttaacctgtgtggtcgactatgggctccccagtctcactgtctggacaccacatcttctgtggtttccatatactctaacctcaccttcataaatagtgcctttattaaatcctcaaattaccttaatttgagcataccatttgcttcctgctgggatcttgactcatacaccaaatatgacttaaaattttgatcagaccatgtgtggtggctaagatctgtaatcccactactttgtgaggctgaggcaggacgactgtttgaacctaggagttcaagactagcctgggcgacacagtaacaccccatctctacaaaaataaaaataaaaaattttccaggcctggtggagtgtgactgtagttccagctactcggaagacaggagagaggatcgcttgatcccaggtggttgaggctgcagtaagccatgattactccaccgcactccagcttgggttactgaataagacctcatctcatttaaaaaaaataaaggagaagaaaaaagattttgatcttgggtggccctaaggataggtgatgttattagctgagataaggaatataaggagccagatgtggtggctcatgcctgtcataaataatgcctttatcaaaacctcacattatcttaacttgagcatatcctttgcttcctgatggaatcctgactcatacaccaaatatgactttaaaattttgatcagaccaggtgcagtggctcatgcccataatcccagcactttggaaggctgagttgggaggatcactcaaggccaggagttctgaggtgggaggatcacttgaggccaggagtttgagatcaagctaggtaacacagtgaaaccccgtctctctct

SEQ ID NO: 685837 - DNA, 1931 bp, Homo sapiens
attgatgttacctggaatttagtgattttgtttatttaaatgacaataacaacaaggaagtatattaaaaataatcttatgattacaccaattcatgtgagggttagaattaatgcatattctaaggaagaaaattagaaaatcaagaagttccttaagaatggcattcttgggcctgttacatatgccagccacactgaatgtgactatatcaaagtatcaataattttgcctaattcatgcggttctgtgactttctgatttctactagtcccaatactgctgtttttaaactatggttttcattttgccaccacaaatctgtggctttctgatttctactaaccccaatcctgctctatttttaagctatggttttcatttgccaccacataggcacataaggtgcgtgatggcatctttgttccatgtttatgatcatttgttggtgtaggactctggaagaacatttcatgttaatgccctgagccacctgccacagaaaatcacagattatgctgtgatattcctaatggaagtcttgatgctgaaagaatttgactaaagactctgactaaagactcgaggctgatagaacagaccagttacagtgtgggataacagactgatacacccctttaaaaaggatggtgaatacaaaaaagactgtcaatggagtactggtatttgacccatgttccactgagcattagggctctgtagaactgtctaatacacaaattaaatacctgatagacarggtagaaaaggtaatctgtttcattttaagtgttcatactgagggattgctagtggctccgtgaggtatggaaagagactgggtcattgaccatgggcctcagcaaaggtaatgggagccagaacgagtggaatcgaagtgtaagtgtaaaggagaaagactgcagtggaataaacttatcagaaaaggactgtgataagtttaatttgataaagaaaaacctggagtgccacatgcaatggacatctttctttgtcacaccagattcatcctctatccccctctaccacactctctgccttaggaagttaacctgtgtggtcgactatgggctccccagtctcactgtctggacaccacatcttctgtggtttccatatactctaacctcaccttcataaatagtgcctttattaaatcctcaaattaccttaatttgagcataccatttgcttcctgctgggatcttgactcatacaccaaatatgacttaaaattttgatcagaccatgtgtggtggctaagatctgtaatcccactactttgtgaggctgaggcaggacgactgtttgaacctaggagttcaagactagcctgggcgacacagtaacaccccatctctacaaaaataaaaataaaaaattttccaggcctggtggagtgtgactgtagttccagctactcggaagacaggagagaggatcgcttgatcccaggtggttgaggctgcagtaagccatgattactccaccgcactccagcttgggttactgaataagacctcatctcatttaaaaaaaataaaggagaagaaaaaagattttgatcttgggtggccctaaggataggtgatgttattagctgagataaggaatataaggagccagatgtggtggctcatgcctgtcataaataatgcctttatcaaaacctcacattatcttaacttgagcatatcctttgcttcctgatggaatcctgactcatacaccaaatatgactttaaaattttgatcagaccaggtgcagtggctcatgcccataatcccagcactttggaaggctgagttgggaggatcactcaaggccaggagttctgaggtgggaggatcacttgaggccaggagtttgagatcaagctaggtaacacagtgaaaccccgtctctctct

SEQ ID NO: 685838 - DNA, 421 bp, Homo sapiens
aagttatttccgccttttatccctctaaattcttcacttcctgaaaaaacaaacaaaaaaaagccactgagggcccttggactaaatccaggcctgagttgctgggcagaggtcagtcttgtccagacatgggaaaaaaataactcgagtcagacaggtgggtcaccagagaacgaatccagcctgcaaatggcctgtgcaatcttcagctctgtccagacctgccctcctctggggatgcctttaaaggtgatgaatgacctggatgaatgggcttagaagataagagggaaaaacaaatatcacaggtcaaatcgttatttgtcttcaagtttaacaccgtctactggactgaaagatgtccaaagaatagttgttcaactatgtaaatycctttttttttttttttttttttgagaca

SEQ ID NO: 685839 - DNA, 421 bp, Homo sapiens
aagttatttccgccttttatccctctaaattcttcacttcctgaaaaaacaaacaaaaaaaagccactgagggcccttggactaaatccaggcctgagttgctgggcagaggtcagtcttgtccagacatgggaaaaaaataactcgagtcagacaggtgggtcaccagagaacgaatccagcctgcaaatggcctgtgcaatcttcagctctgtccagacctgccctcctctggggatgcctttaaaggtgatgaatgacctggatgaatgggcttagaagataagagggaaaaacaaatatcacaggtcaaatcgttatttgtcttcaagtttaacaccgtctactggactgaaagatgtccaaagaatagttgttcaactatgtaaattcytttttttttttttttttttttgagaca

SEQ ID NO: 685840 - DNA, 2498 bp, Homo sapiens
taatcaataaaaacatctgtttcactatgcataaccttaaccttagctagaagtttgtctttacctagttcctttgatcccaaaactccaactacaaatttgatgctattagatatagtgcataacagaagactactggcattaattcttgaaaatcttgtttaaaagttaagccctttgctatgctaaatatcgcagtgtctttgctctgcttttggagagaaaagtcagattcaaagaatcatatcttttaaagtttttccattgtgtccttgacttatgttcaaacctctgaggctcatgcttaatttatgaattggaaagagaatgttattggacaacagagaagtcaagtggctgattttgctgttggtaagggagtttcaatgggagttattaaaatgttaccaaagcataccatgtatacacagacacatatgggtacattttggttggtggccaaattctctagaggcaatagaggaaacctatctccttaaccacagttcaataagaaatttgttaatacatgtcaagtgctatgccagagagactttgagcccaattttcacagcttgcaaggctcagaggacatcatctacctgtaggttccaattaggttgccaaaaacctaggagaactggacctaaagtaatttgcttccagtccagtttctaattaaacacagagtgaatatagccccacgatgcatttttttgttttacacacacacacacacacacacacttacttactgtccatctcatttgagtatgaccatgatgttttaataaatgtccatataaacagaaacaacttaagtgatatttggggaatatatattttcctctttccaacactacttatgtggactctttcagttgggagacagatgggtcagtgtaagataataaaactgttcacataaatgcaatacttattttagcctaactcaatttattgaaagctttgattttctatagaatccacctccactctttccagaatgacaatgagtttgaacttatttgtgttttattacattaaactagtctacaaagaacagcaggagactgaacatgcatgttgagatggataatgcttggtggtttttttttttttgcctttttctgggtctcactaacctggttctggagtagcagactgaatggacctttgtctccatcctcttctgtctcagtcattaacgtctgacttgagtgagaagcagcagatacaaggaaaggaagataatcaattaataaaaagaacaagaatgtactttacctacaagctttatggtgaattgtgttacatgtgtggagactcctgattcagatgtattaaataggcaatgagtctgaggggagttgatgtctttcagtgaaggtgagaaggatgaattggatccagacaaatcggaatctgttttggaattttagtactggggaatagagctttaaatttaattggaaacaagaattaatatgtgaataggatggagtaatggcattcatgtgacacagggacttagtgattatataagctctctggcatctgtgatttatatcaaatacacagaaaagtgtaaaaacctgtttacaccacaattacttctcgagagtctattttatacccaaggaactgaaagtacagcagtgaataaaacagacccaaatcctgtcctcatggagctactattctagtgggatagctcaggtaataaataaagtaaatcagtaaaatgtatagagtatgttggtggaaacagaacaaaaaccactaggtaggcagtgagataggtggcaatggataggaactgcgttttacacaagggtattaaggtgagaggcagcatgtttttggaacatcaaaaagaccagtgcttaacagttgatgtcaagattataaagaatgagtagtccattatgaaaattttatttttattctgagtgaaattgcagggtttaaacagagcactgacataatcatacaggatcattcttgcagctgtataaaagactgaaattgggagttcaagaccagcctgcttaacatggagaaaccttgtctctactaaaaatacaaattagctgggcatggtggtatatgcctgtaattcccgctactcgggaggctgaggcaggagaatcgcttgaacccaggaagtcgaggttgcagtgagccgagatcacgccattgcactccagtctgggcaacaagagtgaaattccatctcaaaaaaaaaaaaaaaagactgaagagaagcgttggaaacatatacacctcccaccaagatatatatatgtgtatatatgtgtgtatatatatgtgtatatatatgtgtatatatatatakagagagagagaacagaatatataacaagtatatgtaagaacagaaataattttttagatgtataatagtcaagaaaaatatatatattcaagaaaatttcatttctgttctaaaaaatcaattttatagaattatagag

SEQ ID NO: 685841 - DNA, 2498 bp, Homo sapiens
taatcaataaaaacatctgtttcactatgcataaccttaaccttagctagaagtttgtctttacctagttcctttgatcccaaaactccaactacaaatttgatgctattagatatagtgcataacagaagactactggcattaattcttgaaaatcttgtttaaaagttaagccctttgctatgctaaatatcgcagtgtctttgctctgcttttggagagaaaagtcagattcaaagaatcatatcttttaaagtttttccattgtgtccttgacttatgttcaaacctctgaggctcatgcttaatttatgaattggaaagagaatgttattggacaacagagaagtcaagtggctgattttgctgttggtaagggagtttcaatgggagttattaaaatgttaccaaagcataccatgtatacacagacacatatgggtacattttggttggtggccaaattctctagaggcaatagaggaaacctatctccttaaccacagttcaataagaaatttgttaatacatgtcaagtgctatgccagagagactttgagcccaattttcacagcttgcaaggctcagaggacatcatctacctgtaggttccaattaggttgccaaaaacctaggagaactggacctaaagtaatttgcttccagtccagtttctaattaaacacagagtgaatatagccccacgatgcatttttttgttttacacacacacacacacacacacacttacttactgtccatctcatttgagtatgaccatgatgttttaataaatgtccatataaacagaaacaacttaagtgatatttggggaatatatattttcctctttccaacactacttatgtggactctttcagttgggagacagatgggtcagtgtaagataataaaactgttcacataaatgcaatacttattttagcctaactcaatttattgaaagctttgattttctatagaatccacctccactctttccagaatgacaatgagtttgaacttatttgtgttttattacattaaactagtctacaaagaacagcaggagactgaacatgcatgttgagatggataatgcttggtggtttttttttttttgcctttttctgggtctcactaacctggttctggagtagcagactgaatggacctttgtctccatcctcttctgtctcagtcattaacgtctgacttgagtgagaagcagcagatacaaggaaaggaagataatcaattaataaaaagaacaagaatgtactttacctacaagctttatggtgaattgtgttacatgtgtggagactcctgattcagatgtattaaataggcaatgagtctgaggggagttgatgtctttcagtgaaggtgagaaggatgaattggatccagacaaatcggaatctgttttggaattttagtactggggaatagagctttaaatttaattggaaacaagaattaatatgtgaataggatggagtaatggcattcatgtgacacagggacttagtgattatataagctctctggcatctgtgatttatatcaaatacacagaaaagtgtaaaaacctgtttacaccacaattacttctcgagagtctattttatacccaaggaactgaaagtacagcagtgaataaaacagacccaaatcctgtcctcatggagctactattctagtgggatagctcaggtaataaataaagtaaatcagtaaaatgtatagagtatgttggtggaaacagaacaaaaaccactaggtaggcagtgagataggtggcaatggataggaactgcgttttacacaagggtattaaggtgagaggcagcatgtttttggaacatcaaaaagaccagtgcttaacagttgatgtcaagattataaagaatgagtagtccattatgaaaattttatttttattctgagtgaaattgcagggtttaaacagagcactgacataatcatacaggatcattcttgcagctgtataaaagactgaaattgggagttcaagaccagcctgcttaacatggagaaaccttgtctctactaaaaatacaaattagctgggcatggtggtatatgcctgtaattcccgctactcgggaggctgaggcaggagaatcgcttgaacccaggaagtcgaggttgcagtgagccgagatcacgccattgcactccagtctgggcaacaagagtgaaattccatctcaaaaaaaaaaaaaaaagactgaagagaagcgttggaaacatatacacctcccaccaagatatatatatgtgtatatatgtgtgtatatatatgtgtatatatatgtgtatatatatatagagagagagagaacagaatatataacaagtatatgtaagaacrgaaataattttttagatgtataatagtcaagaaaaatatatatattcaagaaaatttcatttctgttctaaaaaatcaattttatagaattatagag

SEQ ID NO: 685842 - DNA, 2084 bp, Homo sapiens
  misc_feature 890, 891, 892, 893, 894, 895, 896, 897, 898, 899, 900, 901,902, 903, 904, 905, 906, 907, 908, 909, 910, 911, 912, 913,914, 915, 916, 917, 918, 919, 920, 921, 922, 923, 924, 925,926, 927, 928, 929, 930, 931, 932, 933, 934, 935, 936: n = A,T,C or G
  misc_feature 937, 938, 939, 940, 941, 942, 943, 944, 945, 946, 947, 948,949, 950, 951, 952, 953, 954, 955, 956, 957, 958, 959, 960,961, 962, 963, 964, 965, 966, 967, 968, 969, 970, 971, 972,973, 974, 975, 976, 977, 978, 979, 980, 981, 982, 983: n = A,T,C or G
  misc_feature 984, 985, 986, 987, 988, 989: n = A,T,C or G
ttcattatcgctataagggaagacagttgattttcacctatgcatttttgcaaactaagaaaatctagtgacaaccatgtggtatatatattgctacatgtgaggcatggacaaatgaacaacaaacatacatttctcctatatctgagacatcagtcaagctgatattcgaacatataggcaataaaaatcagattagagaggctgcatagttatgtggaaatccacaaaatgcatgtgcatacaacactaatttaaatggtcactgcaggtatcctgcaggaagtaatttaagattgaaaacatgaayaagtagctgaaaaacgatgcaaatttaagctgggaaagacaaaagaatgattagtattcatgtagaaaccatgacatgtatacaagtcaaaatatttgaggcatcacaagaatagcaatttcagaacacatgaaggaagttacaaatctatgtcagggctagatttttaagaaattatgtggggttgaggctcagccctgcattggcaaagaaaaagttatgggtgatgaaaatagacaacctaaagtcctggaaaagagtccacacaaaattttagtattttcaaggtagaagcttctcttgactcagttggacctccctgtgaaaaatacgaaatcagaaaaggaactttccacctagaaaacgaatttcagtaccaagcataggttgctttcacgcctaaacccctccttacttgaattgcagaagtacctgctatactgtagtttttgggcatgagggacccctgtgctcacagcgccatctagcatcaacagaaaggggggctgatggcaatagaaaggggggctgatggcagcctttaataattcaggagaggaaaaaaaaaacacaaaacaannnnnnnnnnnnnnnnnnnnnnnnnnnnnnnnnnnnnnnnnnnnnnnnnnnnnnnnnnnnnnnnnnnnnnnnnnnnnnnnnnnnnnnnnnnnnnnnnnnncagtgtgctggaaattcctgcccgatttgaaaacaataaattacagcattttcccccaaacggaaaaagcattaaacaaataatgaatattggggcttcaggacaataaaaggaaatttggacaagggtattccagaaaaatccacctctttatttttcttgtcaaatgggaatagatgctttttttgaatataaaatcttccttgtgtttgtgaggcaaaataacattagatggcaactgattattctgagatcttttgacttggcagacgcaaacatgttgagatgaaatttgtcaaggcaaaatattttccaaaaatttaatttaataattatataaatactgtgataatagcaacaatttatagttgccaggtgagattacttgtaatttaataattttttaaagcaccaatctccagtcatatcaaatgaatctctgggtggctagctttgtatagaattgtggtagtgacaataaaccatacctagcaccctatagttgaacactttcaccaacaacccactgtaagtcatacagagttaatgtgaggacacactgaatcctttggactttattgactcatgaacctcattaaatgaacttttttccctaaaataatttcagtctcctctctcgtgaagaaaagttatctgaaaaaggaatgtggaggaaagagactttattccagtgaactgtttgcatcctctgttgcaaaacaaaggtgcattccagaaaacaaagggaagacttgggttttatagcaaaagttcgctgtccaggttcccacataagtttctttaggcaaatgaaggtttgaaactggcttagttctggcccactgtggtggctcacatctgtaatcccagcagtttgggaagcccaggtgaatggatcacttgagatcaggagtttgagaccagccggggcaacacagtgaaaccctgtctctactaaaactacaaaaataaataaataaataaataaattggctgggtgtggtggtgcacacctgtaatcccagctacttcactgggtgaggcggcagaggttgcagtgagccaagatcatgccaatgcactccagcctgggtg

SEQ ID NO: 685843 - DNA, 2084 bp, Homo sapiens
  misc_feature 890, 891, 892, 893, 894, 895, 896, 897, 898, 899, 900, 901,902, 903, 904, 905, 906, 907, 908, 909, 910, 911, 912, 913,914, 915, 916, 917, 918, 919, 920, 921, 922, 923, 924, 925,926, 927, 928, 929, 930, 931, 932, 933, 934, 935, 936: n = A,T,C or G
  misc_feature 937, 938, 939, 940, 941, 942, 943, 944, 945, 946, 947, 948,949, 950, 951, 952, 953, 954, 955, 956, 957, 958, 959, 960,961, 962, 963, 964, 965, 966, 967, 968, 969, 970, 971, 972,973, 974, 975, 976, 977, 978, 979, 980, 981, 982, 983: n = A,T,C or G
  misc_feature 984, 985, 986, 987, 988, 989: n = A,T,C or G
ttcattatcgctataagggaagacagttgattttcacctatgcatttttgcaaactaagaaaatctagtgacaaccatgtggtatatatattgctacatgtgaggcatggacaaatgaacaacaaacatacatttctcctatatctgagacatcagtcaagctgatattcgaacatataggcaataaaaatcagattagagaggctgcatagttatgtggaaatccacaaaatgcatgtgcatacaacactaatttaaatggtcactgcaggtatcctgcaggaagtaatttaagattgaaaacatgaataagtagctgaaaaacgatgcaaatttaagctgggaaagacaaaagaatgattagtattcatgtagaaaccaygacatgtatacaagtcaaaatatttgaggcatcacaagaatagcaatttcagaacacatgaaggaagttacaaatctatgtcagggctagatttttaagaaattatgtggggttgaggctcagccctgcattggcaaagaaaaagttatgggtgatgaaaatagacaacctaaagtcctggaaaagagtccacacaaaattttagtattttcaaggtagaagcttctcttgactcagttggacctccctgtgaaaaatacgaaatcagaaaaggaactttccacctagaaaacgaatttcagtaccaagcataggttgctttcacgcctaaacccctccttacttgaattgcagaagtacctgctatactgtagtttttgggcatgagggacccctgtgctcacagcgccatctagcatcaacagaaaggggggctgatggcaatagaaaggggggctgatggcagcctttaataattcaggagaggaaaaaaaaaacacaaaacaannnnnnnnnnnnnnnnnnnnnnnnnnnnnnnnnnnnnnnnnnnnnnnnnnnnnnnnnnnnnnnnnnnnnnnnnnnnnnnnnnnnnnnnnnnnnnnnnnnncagtgtgctggaaattcctgcccgatttgaaaacaataaattacagcattttcccccaaacggaaaaagcattaaacaaataatgaatattggggcttcaggacaataaaaggaaatttggacaagggtattccagaaaaatccacctctttatttttcttgtcaaatgggaatagatgctttttttgaatataaaatcttccttgtgtttgtgaggcaaaataacattagatggcaactgattattctgagatcttttgacttggcagacgcaaacatgttgagatgaaatttgtcaaggcaaaatattttccaaaaatttaatttaataattatataaatactgtgataatagcaacaatttatagttgccaggtgagattacttgtaatttaataattttttaaagcaccaatctccagtcatatcaaatgaatctctgggtggctagctttgtatagaattgtggtagtgacaataaaccatacctagcaccctatagttgaacactttcaccaacaacccactgtaagtcatacagagttaatgtgaggacacactgaatcctttggactttattgactcatgaacctcattaaatgaacttttttccctaaaataatttcagtctcctctctcgtgaagaaaagttatctgaaaaaggaatgtggaggaaagagactttattccagtgaactgtttgcatcctctgttgcaaaacaaaggtgcattccagaaaacaaagggaagacttgggttttatagcaaaagttcgctgtccaggttcccacataagtttctttaggcaaatgaaggtttgaaactggcttagttctggcccactgtggtggctcacatctgtaatcccagcagtttgggaagcccaggtgaatggatcacttgagatcaggagtttgagaccagccggggcaacacagtgaaaccctgtctctactaaaactacaaaaataaataaataaataaataaattggctgggtgtggtggtgcacacctgtaatcccagctacttcactgggtgaggcggcagaggttgcagtgagccaagatcatgccaatgcactccagcctgggtg

SEQ ID NO: 685844 - DNA, 1356 bp, Homo sapiens
gtctaagcttgagtttaaatcaaaattgtaatgtgattatattacaggtgaaggtaatgggataaactcactaccctaagacttgcagagcttaagatggttgtccaagatccaaaaacgaatacattgtggaccagaattccaatgaagtcctgatgaactctaaactccaagatttttctgtgttattacgttgcgtttaacaataagtttttggtggtatcatagaaactgtctttagaatgtgggtgaaaaataatggcattgaagaatgaatggtctttgtcctattatcaatgaatgtgaagaacacattaaaaggttcaatgaaaggactaatcaacaagagtgacattracaaaatgtcagactaggaagctccaagctctggaaacgccaaaaacaccaaagaaggaaacagaaactggctctactaaccttatagaaactccggaaaatagtcaaagtttttagcaaacaaacacattctgaatcaggaaaaagccaccttcaaatggtaagaaatgttgtgttactttcacttggctttgcccaaattcccatctcccttctcgtgtatcatggtcttggcctgggagagatgacagcccagttaccagtcccctcaccccaacctgcagaagagaatattttatttgcaatgttctaacctctctgggtgctgcttgaaggattgacttctatttctcctaactcagatttcaggtggaaaaaatgtcagctttctgcttgtcaaagctacagggagactacagacctgatgcctgggataaagattacaggtggaaatatgcaacagaccatctaagacccagaggggaatcaagggtcagactttttggaaaattaagacattcaatggaagccatgtatatgggagagttgagaaggccactttcaggcccaggaaagatgcatactcagaaaagacctaagaagaccttaaattttcatgtatggatgtccctaggctcagaggaagtccagctaatgggcgaaggactgccctgcacagagccagtctgcaaaaataggagatgtgtctatttttcaaatgtccagttttctttttctttttttttttttttttttttgagacagactctcggtctgtctcccaggctggagtgcagtggtgcgatctcggctcactgcaagctctgcctcctgggtttaagcaattctccacctcagcctccaagtagttgggactgcaggcacccaccaccaagcccgactaattctttttgtattttttagtagagacagagtttcaccatgtgggccaggctggtcttgaactcctgacctcaggtgatccgcccacctcggcct

SEQ ID NO: 685845 - DNA, 685 bp, Homo sapiens
ccttgccctcccaactcgcagggtgccagcttcttcccattctggccagagtttgtgacttccatgaacgcccataatctacttttctctgttttctctgaccccatgctgagggggaaatcaacaataataaaaaggaggccaggcacagtggatcacacctgtaatcccagcaatttgggaggccaaggtgggtgtatcacttgaggccaggagttcgagaccagcctggccaatgtggtgaaactttgcctctactaaaaacacaaaaaatagcccsgtgtggtggtgcgcacctgtagtcccaggtactcgggaggctgaggcaggagaatcacttgaacctgggaggcggaggttgcagtgaaccgagattgtgccactgcactccagccagcaatagtgtgaggctcggtctcaaaaaacaacaacaaaaacaataacaaaagggaaaatgagtaaggaaataatgccctgtcccaatgactgtgtctgtctgcagtgcactctatgggtcagagagacagcaatggtcccacggggcaggtgcctggggcttcctctcctaaatcaattctctctcctgatccctgtctcctaacaaccctacatagtcacaagcttggtctctaaatcagaggtgatcattgtccatcactaccttaattgaccaccagagggaggt

SEQ ID NO: 685846 - DNA, 903 bp, Homo sapiens
ggaggcaaaggttgcagtgagccacgattgcaccactgcactccagcctggcaatacagtgagcctgtctcaaaaaaaaaaaaaagtgttgctctggatattcatttatttatttctgacctattctagaatagattcagatggctcactgtgctaggtgttttaaattatctcacttacttgggtgttcttcccgattacagatgggaagaatcagagaggctgagtagcctgcataaataaaaagccttttgttcatttatggtattacattgctggaaccttaaaatcaggaagtgtaggaaaccacgtgcttttcctacacaggctgcttgctgcctgaaagcaaggattgcaatttagaaatccttagaatctcttctgtctcaaagcccttaacagtactatgcataccataaataaatgttcaagatatgtttgtggactgacatgaaatgataaaatagtataggtggattgattattataataggtatagtgttacctacataccactcaaaccattaatgggaacatcctccctcaattttagataatattttacctaatagacatatctaaaatcctcagtaaagctgcctgtttattcctgagttgccacacatgcaccacacttattggagtcatctgatgtcatgtacatgtgcctggtcaaatgattgctaacagagargtgtgaggagaaccatctgccttgtggtcctaaaaaaaatagatggtcccataacagggtaaccaattctgatctgctacataatcaggtggaacctcttttgtcagaggtttataactggaaaccccaccactttcaattaattataagcgaggtcaaattgattttagccctttgtccatcatccagttaggaagattctgcttgtc

SEQ ID NO: 685847 - DNA, 986 bp, Homo sapiens
taactagttacttaataatatctgaatgtagtgcttatcaacagatacattttgacattattttaaaatctgcagagatcattttaaaaatattttactttaaaatatttcaatagaaaaatgttttgttcttttcattgcttttcctgtacttaattgtaatatattttccagatatcactagaaaggaaaactcaatgtgtttcagagtctttagttttttaaactatctgacaaaacttacacatggaaaactaaactatcacaaagcaaacacttcaatatggagtttgttttagaatatttagacacagcataaggaaaaagacttagaacactgcaataaccttggttttttttacttagattggttagggattttgacatcaagcagctctagtttacctaattatttttgattgtttaattggatttgaccacatagtaaaaggatttgacccaagtccttaaaatagcctatttttgtttcatctttatagtctacacagaaaaatgtaaaaaataatggatcaagaaagcaagcaactcactcctttgataactggttcccattagtgggaataactagtgtttccatgttacgttcatttggtttggccaaagtggtcaaccagtcaaattagtatgttaaatgcagacaagttagtgtgcaatatttgctagtagtgcttgctctaaaactgaaggcaggaagaaagaaatggggtaacttatgtatgggttgagcatgaaaaatgtggatgtgtcagaatgtctggaaagttacgrtatccttctaattccagagagtatctaagctagtcctccctatctgtcatatgatgatatatttttcatatgaatttatcaccatagaaacctccaatatctccccatcacctgtaaattaactttaagttccttaacctggcactcgatccttttttgagtctcctgtatagtttgccatttgactatgaagcacc

SEQ ID NO: 685848 - DNA, 649 bp, Homo sapiens
agttggccgaattaaacaagccgtcttgactccaccctgtatggtttgtgtctcccaagcttcatgtgttggaaacttctctctcaaattagtatgttgtagtatttggagtggcacccttaggagacaattagaattaggtaagatcatcaaagcgaggcccacatggacagagctggtggcattataagtcctccactatgttgtactatagcaagaggctctcatcagatgcaggcaccatgccttttggacttgccagcctccaggactttacaaaataaacttcttytgtgaattacccagacggtgttactctgttgtagcaacagcaaatggattaagacacctcctgggccgggtgcagtggctcacgtctgttatcccagcactttgagaggctgaggtgggtggatcacttgaggtcaggagttcgagactagcctggccaacatcgtgaaactccatctctactaaaaatacaaaaattagccaggcttggtggcagtgcctgtaatgccagctactcgggaggtggagacaggagaattgcttgaacccgggaagcagaggttgcagtgagctgagattgtgccactgcactccagcctgggcaacagagcgagactccgtctcaaaaaaaaaaaaa

SEQ ID NO: 685849 - DNA, 649 bp, Homo sapiens
agttggccgaattaaacaagccgtcttgactccaccctgtatggtttgtgtctcccaagcttcatgtgttggaaacttctctctcaaattagtatgttgtagtatttggagtggcacccttaggagacaattagaattaggtaagatcatcaaagcgaggcccacatggacagagctggtggcattataagtcctccactatgttgtactatagcaagaggctctcatcagatgcaggcaccatgccttttggacttgccagcctccaggactttacaaaataaacttcttctgtgaattacccagacggtgttactctgttgtagcaacagcaaatggattaagacacctcctgggccgggtgcagtggctcacgtmtgttatcccagcactttgagaggctgaggtgggtggatcacttgaggtcaggagttcgagactagcctggccaacatcgtgaaactccatctctactaaaaatacaaaaattagccaggcttggtggcagtgcctgtaatgccagctactcgggaggtggagacaggagaattgcttgaacccgggaagcagaggttgcagtgagctgagattgtgccactgcactccagcctgggcaacagagcgagactccgtctcaaaaaaaaaaaaa

SEQ ID NO: 685850 - DNA, 649 bp, Homo sapiens
agttggccgaattaaacaagccgtcttgactccaccctgtatggtttgtgtctcccaagcttcatgtgttggaaacttctctctcaaattagtatgttgtagtatttggagtggcacccttaggagacaattagaattaggtaagatcatcaaagcgaggcccacatggacagagctggtggcattataagtcctccactatgttgtactatagcaagaggctctcatcagatgcaggcaccatgccttttggacttgccagcctccaggactttacaaaataaacttcttctgtgaattacccagacggtgttactctgttgtagcaacagcaaatggattaagacacctcctgggccgggtgcagtggctcacgtctgttatcccagcactttgagaggctgaggtgggtggatcacttgaggtcaggagttcgagactagcctggccaacatcgtgaaactccatctctactaaaaatacaaaaattagccaggcttggtggcagtgcctgtaatgccagctactcgggaggtggagacaggagaattgcttgaacccgggaagcagaggttgcagtgagctgagattgygccactgcactccagcctgggcaacagagcgagactccgtctcaaaaaaaaaaaaa

SEQ ID NO: 685851 - DNA, 2753 bp, Homo sapiens
ctttagcttacttgattataagaagacagtacaaaatatatatacaaaataggggtttgtcaactgtttatcagtaaggcctcttgtcaatggtaggctattaggagttaagtttacagggagtgaaaatttatgtgcagattttcgactctacagagattagtgccattaactttttcattgttcaagggccaactgtaatataatgctgaatatttatttgcataccagctttcttcctgaattagagtcacacatcctgaagacaactgttccttaggtgctcctgtatctccagggcctagtgctgtgacaagcttgatgtggataataaattgtttgtgaaattaaattatagatatgttttgtcagtgagggtgcccatgaatcttaaggaatctaaaactttgaatgcagagaaaatgaatcagaaggtaatttaaatgagttgcacttcatgccagcaagaaaaaaatatacaaattttcagttatttatgcatacactttttgttttaaccatgttctattagagaaagccattgaaacaggctcactgagaagctaaacaaataaacacagttttttaaactaataaaaaatgtcaagattatcattagagggggaaatatatatatatatttcaattgtagatgatggtcttgtgatagataaaaaatattttttgaaaatcagagaatcttaaaaacatctccctaaaggaaagaacacagttcaaaagataatgtatatgtaatacaacctgtctagggaaagttttgctttcactaagacatcctgctacacttttgtgatgacaaaagtgatatacattgccttcttttcctatgaaaaaactggggcacaaaagcaaatctgaacacctgcaggcatgtagggcagggcattctagaccattgaattagcattgcttcccctttgctcacttcctattcttctccattttttcctctggtcttgatgcttggacccttattaaaattttatcttatttttcttttcccaattttagcttccttagacaattgtgaagcaagttgagatattaatacatttggatctaaaattgaattattttatttaaacataatacttcagtgcatctttagtaagagattcaggtggccaggcatggtggctcacaccagtaatcccagaactttctgaggccaaggctggtagatcacctgaggtcaggagtttgagaccagcctgaccaatatggtgaaaatacaaagagattcaacccttaaacggtagagcatgttctaatttattttaaaatatttttgatgaaatattttagcatttcacattcaacatttaagctgtccaagcatgatgcataatttaatctttatatcactagaggagaaacagatacagaaaagatatctttcaatgttaactacatcaagaaatattttatcaagtgatatagcctaagcacttgccaacaaaaacatgatgtaatgtaaaaatgacttaaaaaaaataaagtttccttttcaagaagatggaggagacatacttttcctatttttttctgcaacgtacaacttaagaccatgaacattatatatacagcaaatagaagaagatgctgcaaagtggagagataaagacagataaagctgggcacctgggaacccaggggtggtatggttctgagtcctctgggttttctttctgccccatattccacagatatggaactgcagaggctggcaactcataaaagttgataagcacagctccaaaaaacactgctgcctctaatcaaagtattggaataagagagaaaacttttagacaataactactctattccagccaaaattcagcaaggaaaagaaagcttcatctccacccatgccagcgaagaccaatgtgggcctaggtgaacacccttgccaggccacaactaaaaagagtgatagcgagtggggtagggaaggtagtggctgtgcacgtaaaagggagacatgagggatttctgtatctggctgcgatatggtattataatttggcctaatgttactattggggtaaactaggtaaagggtacaccagatcaatctgaaattatttcttataactacctgtgaatctaccactatctaaaaatcaagcatataatttttaaaaaagaaaaaaaaagaaacccttgtgaagactatcactaatctatcttagctgccatccaaccgatgtcaacatatggtacttgcaaagtcattgtttctaggccacttaagtgtaacatgcatctgtagcaaagattagtgatgtggtttctgcttaccaaatatctgggcattgcatagcctagtcaagttgacacataaaagtaacctttcctgaaatctatgttaaacaaagaaaaagatgagaaaatgagaaagcttctagcatcagaacatacggakgctttttgtcattttgtgaaaattcccacatcttaggtgattacaaagttgataacagagaagccatcgattacttcaggttgtagtctacaaaagccttgagttcaggtgaaggaattaagggggaggcagcacataccaattctttctgacccatccaaataagcatatcatacaaggaagacaagaaaactccaatggcaaagtaagcacaacttttgttccctgaagcccagaagaattaaatgtcctctgccaaaggggccatgctgaaagcatcaggaaacgaaaaaattaagcaact

SEQ ID NO: 685852 - DNA, 634 bp, Homo sapiens
gttagttaaaatgaatcattctggattagggtgattcttaatccaatatgactggtgtccttatagaaagcagaaattgacacacaggcacacataggaagaacacatgcaaagatgaaggcagagaccaggcttccgcttctaacaagccaaggatcaccaaagatggccagcaaacacccagaggctggaggagascctggaacagattcttcctctccgctccgggaagaaaccagccctgcagacacctcgctctcagatttccatctcccagccagagctgtgagagaattaatttccatggctttaagccacatggtttgtgatgctttgttatggaaaccttcagaaaccgatagatgctctcatcctccctctacccaaagaaattaataatcagagactatctaaaacagaaaggctttggctaaaagttgacaagagcctttaaaattcaggcttttctgaatccaaaacccacactcagtaggagagcactgcacaaaagagaaagggttaacgtccttgccctggagctactaacaggatgctgcacacgtgagaataaactctgacagtaaatattatgttgtctaatgtccactcttgatgatagcattcttttttgatt

SEQ ID NO: 685853 - DNA, 1718 bp, Homo sapiens
tgctgtagctgaaaagcaaccattttagtagtagataattttggggtcttaggcctttttcaaacacctctcaattagaatctgcaagacaaagagagaaaattttccaccaggtcgtgatcaaggatgttgttatttctctagatactattgttttgaattgcctcagaacacagcccataatttaagggagggataaggatagaccacagagaactgctgctgagattaaatagtacaatgatctgatgaatatgcctagacaactttggctacagttactccatgtagaattaataggaagtagatagacatgaattccgtgttgtctgagaaaagcgcattgccaactccaaacagagcatcaacaacctttttcatcatccactgagaaatcccgtaatgccctaaatttgtaccatagaagtgggctgcaaaatggtacatcttccaggaaggatattctccctggggcccaccccactctgttcatggagaaatttaatgtgggcaatccacccagaaggcagagctgttgggtcatgaagagcaacaaaggagaaaaatgtcccatagataaaaccaagagactcacctctctgttagggcaaggtacttactattccttttcagatggtcttgacttgtgctatgttccaggaactgctgtgttgccctttctacccatccagaccaagagattatcttgtttcttctccattattgtatgatgggtatcttgtgccaattgattatcagatggttaagagacacatcttaccttaggcagaggaccgtataattcacagaaatgctagactttggggtgggtgagactttgtggtcatttccctgggggagttaggaagcgtgttttaaggatgtgtatggatgggaaaagtgcaggtatggatgttggatagaccaaagaatggactgtatcagatactgacacttgtccagatgatctcaatcccctttatttccagctagtggaacttgctttgagcaaggtagaaaagtgctcagccaaaactattaattttccttstcacagtcatgcactctagtctggtcttcccaaggatatatgtaaatgaacaatccttctgaagagcctttgaaaaggaatagatgcaattttctctttttcctatacccttccaccttctttctgcttaaaatgtggatacaatgtttacagatagagcagccattttgcagcaagaatatagaaaaatcaaaaatataggaggaaaatgggtctttggtgagcttgcagagccattgtgcaggtccttggggcttgtcatagccttttcttattgcatgaaatatatggaatctttgcttatttcaattgctttgggatatttgtgtgctttcagtctgatttagttctaaaatagaggagaggcaagctacttcatctcagagtttatatctcagaaaacgagtgcaggaatgggataagaatagggagtagtcttaccaatactggttaacaatttaatttttatccttagtaagaaatttgcttatttctctccaattgaagaatttagtttttttttcttctaagacccaatctagaaattaatatttctgctaaaatctttgtatagcttagcgaaaatacatagagataattgaaagttcaaagagagacaaaaatgtagaattatggaaatagttttaaaaaacgttgtcagacagca

SEQ ID NO: 685854 - DNA, 636 bp, Homo sapiens
tgcatggggcacggtgggcttcctgcaggtctccctgcaggctcagggttggctgcgccgcacctggctcctggtgcacccgtgagcatccctgtgtgtgtctgctggccaggctgggtagggccactgcacctgagggctgagctgaggtctcatcggtcacagcaccctgggccctgacgctggtgcaggtggccaccctgtgagggggaggcacgaggtgtgaggggcacttgggtgtgtggggccttctggaaacacagagaccctcgtgcacttggccagagccgctggctcctaccagcagggtgggcaccgggcaggcctgggcatagggagtcctcttggcaccttggaggctgcatgatggcgggggacccttgttcaaataagatgtcaaccctgagcgtcaggtcaggcccatccctyctgagctgagggacggtgcattggggcccagccagcactgtgggccagcctgtctcggaggcagaggttcttgatttctgagtgtttgggtcctgcgtgtgatcagagggcctcctttcccagttggggttccccggtttccccagggcagctgtggcacaagagtgcagctcttgggtggctcctccctgggaagggtctcagcag

SEQ ID NO: 685855 - DNA, 605 bp, Homo sapiens
cgggtggggcactgaaagaaattctggacgcgcttttgcccttccggcagttctcagggtagcaggagccaaggcttgggagaggcgggggaggaagctcgtgctccagatgctcattgagtacctgtgtatgccaggcacagtccgcatgcccacagctgcccccgtgacgggcaggctcccctcgcagagcccacgggccgagggcccctcagtgaggctgaaactcagctgggactggccagttcgtttccaggtcttgctatccagctgcygatgattcagatggcttacatattctctaagctgcagaggtgcataaaggtagaaagattaaaatgtaggatatttacgccctcatgtggaagacccagggcttctcagagtgtcgtgttggcaccagggctgcccgcaacctaagaggaccccgcgtgcctgtgtggctctgcctgccactgccctcgtggcagggaggcagtgacagctacggagaagctcagcaggctggcctggtcgtcgtcctcaaagcaccgtgatgtgttaacatgaacgactcatgttttattcttgttccaccacaggcagcgtctcctccctgggccccg

SEQ ID NO: 685856 - DNA, 605 bp, Homo sapiens
cgggtggggcactgaaagaaattctggacgcgcttttgcccttccggcagttctcagggtagcaggagccaaggcttgggagaggcgggggaggaagctcgtgctccagatgctcattgagtacctgtgtatgccaggcacagtccgcatgcccacagctgcccccgtgacgggcaggctcccctcgcagagcccacgggccgagggcccctcagtgaggctgaaactcagctgggactggccagttcgtttccaggtcttgctatccagctgctgatgattcagatggcttacatattctctaagctgcagaggtgcataaaggtagaaagattaaaatgtaggatatttacgccctcatrtggaagacccagggcttctcagagtgtcgtgttggcaccagggctgcccgcaacctaagaggaccccgcgtgcctgtgtggctctgcctgccactgccctcgtggcagggaggcagtgacagctacggagaagctcagcaggctggcctggtcgtcgtcctcaaagcaccgtgatgtgttaacatgaacgactcatgttttattcttgttccaccacaggcagcgtctcctccctgggccccg

SEQ ID NO: 685857 - DNA, 605 bp, Homo sapiens
cgggtggggcactgaaagaaattctggacgcgcttttgcccttccggcagttctcagggtagcaggagccaaggcttgggagaggcgggggaggaagctcgtgctccagatgctcattgagtacctgtgtatgccaggcacagtccgcatgcccacagctgcccccgtgacgggcaggctcccctcgcagagcccacgggccgagggcccctcagtgaggctgaaactcagctgggactggccagttcgtttccaggtcttgctatccagctgctgatgattcagatggcttacatattctctaagctgcagaggtgcataaaggtagaaagattaaaatgtaggatatttacgccctcatgtggaagacccagggcttctcagagtgtcgtgttggcaccagggctrcccgcaacctaagaggaccccgcgtgcctgtgtggctctgcctgccactgccctcgtggcagggaggcagtgacagctacggagaagctcagcaggctggcctggtcgtcgtcctcaaagcaccgtgatgtgttaacatgaacgactcatgttttattcttgttccaccacaggcagcgtctcctccctgggccccg

SEQ ID NO: 685858 - DNA, 605 bp, Homo sapiens
cgggtggggcactgaaagaaattctggacgcgcttttgcccttccggcagttctcagggtagcaggagccaaggcttgggagaggcgggggaggaagctcgtgctccagatgctcattgagtacctgtgtatgccaggcacagtccgcatgcccacagctgcccccgtgacgggcaggctcccctcgcagagcccacgggccgagggcccctcagtgaggctgaaactcagctgggactggccagttcgtttccaggtcttgctatccagctgctgatgattcagatggcttacatattctctaagctgcagaggtgcataaaggtagaaagattaaaatgtaggatatttacgccctcatgtggaagacccagggcttctcagagtgtcgtgttggcaccagggctgcccgcaacctaagaggaccccgcgtgcctgtgtggctctgcctgccactgccctcgtggcagggaggcagtgacagctacggagaagctcagcaggctggcctggtcgtcgtcctcaaagcaccgtgatgtgttaacatgaaygactcatgttttattcttgttccaccacaggcagcgtctcctccctgggccccg

SEQ ID NO: 685859 - DNA, 605 bp, Homo sapiens
cgggtggggcactgaaagaaattctggacgcgcttttgcccttccggcagttctcagggtagcaggagccaaggcttgggagaggcgggggaggaagctcgtgctccagatgctcattgagtacctgtgtatgccaggcacagtccgcatgcccacagctgcccccgtgacgggcaggctcccctcgcagagcccacgggccgagggcccctcagtgaggctgaaactcagctgggactggccagttcgtttccaggtcttgctatccagctgctgatgattcagatggcttacatattctctaagctgcagaggtgcataaaggtagaaagattaaaatgtaggatatttacgccctcatgtggaagacccagggcttctcagagtgtcgtgttggcaccagggctgcccgcaacctaagaggaccccgcgtgcctgtgtggctctgcctgccactgccctcgtggcagggaggcagtgacagctacggagaagctcagcaggctggcctggtcgtcgtcctcaaagcaccgtgatgtgttaacatgaacgactcrtgttttattcttgttccaccacaggcagcgtctcctccctgggccccg

SEQ ID NO: 685860 - DNA, 605 bp, Homo sapiens
cgggtggggcactgaaagaaattctggacgcgcttttgcccttccggcagttctcagggtagcaggagccaaggcttgggagaggcgggggaggaagctcgtgctccagatgctcattgagtacctgtgtatgccaggcacagtccgcatgcccacagctgcccccgtgacgggcaggctcccctcgcagagcccacgggccgagggcccctcagtgaggctgaaactcagctgggactggccagttcgtttccaggtcttgctatccagctgctgatgattcagatggcttacatattctctaagctgcagaggtgcataaaggtagaaagattaaaatgtaggatatttacgccctcatgtggaagacccagggcttctcagagtgtcgtgttggcaccagggctgcccgcaacctaagaggaccccgcgtgcctgtgtggctctgcctgccactgccctcgtggcagggaggcagtgacagctacggagaagctcagcaggctggcctggtcgtcgtcctcaaagcaccgtgatgtgttaacatgaacgactcatgttttattcttgttccaccacaggcagcgtctcctccckgggccccg

SEQ ID NO: 685861 - DNA, 955 bp, Homo sapiens
cacaggcaactccggagtccggtaagtgcccgcctcattccccccaactccactgaggtcccccgggcgcccgggactcacggagcttacccggcccagggaagcaaacgctgaagatctttgatggcgacgacgcggtgagaagaagccagttccgcctcgtcacggtgtcccgcctggccggtgccgaggaggtgctggtaagggggaggctgggggaggtctgagccccctcccaggaccgcatgtccccgcacctggcgcacctgacctggctcccccaacctggcgcccctcacccacctggcctccccctccatgacctgccccccactgaaccccgccygaccccccacaacttggcccctctaacctggtgccctgcaggaggcgcactgcgggcccaccacatccccgaggaccctggccacctggagctgtgccggctgcccccttcctctcaggcctgtgacgcctgggctgggggcaaggctgggagtgctgtgatctcggaggagggcagaagcccgggtccggcgaggccacgccagaggcctgggtcatccgggctctgccgcgggcccaggaggtcctgaagatctaccctggctggctcaagtgagactgggcccgaggctcagggtctgctgggcggggtggggggagctccagctcagactgtgtccccacagggtggcgtggcctacgtgtccgtgcgagtgaccccgaagagcacggcccgctctgtggtgctggaggtcctgccgctgctcggccgccaggtgcgtaccctgtgcctgctccccatgccggccagactcggtggggggtcgctgtccccaggaggccaggccaccatcccagcccaggcgtggctgtccccgcgggtgtcctgaggtggtgggggcctgccagacccgatgccaagctctaccccaacaggccgagagtcccg

SEQ ID NO: 685862 - DNA, 928 bp, Homo sapiens
gatgaatatttatgttgtgggaaacttgattctccaagacagctaattctgtttatcaagcaagagaaatattaaccttaacagatgggctcactcatttttccttaacattctggctcaacaatcagaatgctacaaagattaaaagaagaatgacagtatcgtgyacaactttatgctaataggtttgacaatttagatgacatgggcaaattccttgagaaatacaacttaactgaaagtgatacagttttttaaaaaaaatcttgatttattgttcatgataaaatcaactgtggatggagtgagttttccagtctcccctgaggtcagaagatatccacatgcttaagcaacttgccttactggctgaaaaggaatttcagcataattggctatcaagaaacagtatgtcgattgcacacactattatttgaagaagtttctagaaattttatgaataaaagtcgttttttgaacatggacatttgacagactcattatgctatatgtattatggaacgtaacctgagaaaaatatttctgttagtgaaatatgagtggtttttatattccagcagaggctgtagaaatgtggtaaagactctattttcaggaataatttttatagttcattactcactgtgcattttgcttagtgtgaggaagagatggaattgttctcttttaaccagtgcttcactgaaactgctgttaaccattggtagtcacgcctggaaccacaatcccaccaccacaactggagaatacagaggaaaagactgcagtctgagtatgacctttatactttggcttatcagaaaaaaagctcttggtagagttctctagacctttttctgtttgttaaaaggtccaaatcagtagtatgtcagttaattttataattatgttccttcccaattccctt

SEQ ID NO: 685863 - DNA, 928 bp, Homo sapiens
gatgaatatttatgttgtgggaaacttgattctccaagacagctaattctgtttatcaagcaagagaaatattaaccttaacagatgggctcactcatttttccttaacattctggctcaacaatcagaatgctacaaagattaaaagaagaatgacagtatcgtgtacaactttatgctaataggtttgacaatttagatgacatgggcaaattccttgagaaatacaacttaactgaaagtgatacarttttttaaaaaaaatcttgatttattgttcatgataaaatcaactgtggatggagtgagttttccagtctcccctgaggtcagaagatatccacatgcttaagcaacttgccttactggctgaaaaggaatttcagcataattggctatcaagaaacagtatgtcgattgcacacactattatttgaagaagtttctagaaattttatgaataaaagtcgttttttgaacatggacatttgacagactcattatgctatatgtattatggaacgtaacctgagaaaaatatttctgttagtgaaatatgagtggtttttatattccagcagaggctgtagaaatgtggtaaagactctattttcaggaataatttttatagttcattactcactgtgcattttgcttagtgtgaggaagagatggaattgttctcttttaaccagtgcttcactgaaactgctgttaaccattggtagtcacgcctggaaccacaatcccaccaccacaactggagaatacagaggaaaagactgcagtctgagtatgacctttatactttggcttatcagaaaaaaagctcttggtagagttctctagacctttttctgtttgttaaaaggtccaaatcagtagtatgtcagttaattttataattatgttccttcccaattccctt

SEQ ID NO: 685864 - DNA, 2826 bp, Homo sapiens
agagatccacagctcatttcctatgccatgattcctggtccccatgttatttctcttcttgcaaatcatcagctgtttcccttctttgctcccaaatcaaattagatagtctggcatgtagctagttcttttagcaggcagcctcaccaccagtcaggatatctgagctagggtcaaggaatagggaagagctactcaacacagcctcagatgataatgatgacacagacctaaatgtgtatgtgggwaccaacgagttctagccctggaaatacaaccctagaattgggtgaacgtagctagacagggttttcttttctcccacaattgcacataagatctaagaccttacttagtctgttaaaggaatgaatgtgtgaatgtatgtgttgtgtaatttggctcattaagcaattcagtttattaagtataacattgatgctgattattggacctaaaagatgtaaaatgaaaaaacaaaattggttatgtacagacacaatgcatttcacttaattaaaaaatgcatttggcaacctacatgcctgaaatacagagctaataatgtagatttctgtccacaggagttcacagtatagtgtttatgtgaatttgggctggggagggttacatgaacaaattccaaaccactattttaagcttaataataattatgttctaatgaaactagtgataggaaacaagaagaaaccagtgcagttaggttggattaaggagaatatcccagaatagaggataacagaactatgctggtaagaatggaatgatacacagttttctttttctgagagcctatcacagacctgatagtaagatactttgtgcaaattatctcatttaattcttacaataatcagaagtctatgaattattataaataatacaactgagactctgagaatgatgagatcagaacagccacagactctcgtctccaaaaatcatatgattgtcccaccattatctctcaatgagaggctagaagaggaagtgaaggatgcttacgcaaagatatagaaacacaaatcataaaataattcttttagcattttagtgttatgaaatggctgaagtttgactgtgtatgaaaggagtgaggatgcacgaaaacagataaagacaggaggctggtgttttaagggctttgaacgtgttgtcttatgtcagagtttcctttgtgctaagtgtgtgaatagccagcatggagcatgctctaggaaaacattaggctgaggacatggaagtgatgggactaggcacccataaacctatgcttaatacatagaaagtagaactaaaggtgttacatattcaaagccaaatagagaagaaggcaaagccaggagaaaacagtgaaaaaatggatgcaattttaatgaggtagaagagaaagtctagtgagagaatgaaatgacagatctagaagtaaacattaaattgagagtgagagattcatgtttgaatgttcagaagtgggcaggtaagggtgaaggcaggacccaagagatggtcctggctggtgaacctgaaatcaaatgaagttgaaccacatgcatgaatgctttgaggctcgggtgataaatggctcatcgctgaagactttaagctcaccgaaggttgtagtaggcttgggttgcaggaaaaatgtaccctttctaccaaatatttcagtgaatattcatgcatgattgtaagaatagatggtttaaagggactaggataagagctgcttggacttcatcaggagagaaggtttggaagactagaagtaatgaactgaagaagctcaaacctggctctctatgggtgggttttggaagatagatttactttttctattaagttaatttcaatatttttaaaatggtaaactttacaaaaacatttgcatttctgggttatttgaaaagttggagacattatcaacaattaacttgacaaccaataggtaataacatacctagttttttgaacgtacagaattttaagattaaaaaaatacaaattctgtttaaagaaaaaaatcagttaagacagaaagtggaagtaacattcaaaaaaggtaaggttgtatgagtctttatttacaacaaaatacagggagagttatattagtcgggatagaatagactatgccatgataacaagtaaacccaaagctgtggtggataaacacaacaaagattaatttctcagtcatgaaaagttttagatggaatgggagactccctcagtagcttccagagttcccatgtcaggggaagagaggacaggaaggtcacttgggttgattttgtgagctgtcctccagagtgatttgcatcacttcaccttatatccatatccctttggccagaacccagtagcgtgttcccaaagcaactattaagcagtcaaaaatattctatttgttttcagggaaataaaataaaacataatttggtttacatatagcattgcctttgtccaagagtttttacagaagacaataggaagagctgggaaatggatcattagagcacgggagcatcgtggaaacagcacacagcagtttgagtatgtgagtatggacagtgcagaacttagggatggagttaggggaggacttgcattcatggtgatgattgagaataaccaggataagaaccatggtaaaattaaataaaatgaacgctttatgcagatgcaaacaggtgatattggagtcttggtaagactaggagaaaatagcatgatctgtgaagaactgagattaatagaagctaaaaacatctgcagtatctgatctaggtgattctgagagta

SEQ ID NO: 685865 - DNA, 1156 bp, Homo sapiens
tggtgaggccaacagatcagaagactactgccactgaaaatacagtttgttcccaagaggaggaagtagagcatgccagtcagggcccttgggggagcacactstgtggaagcagatgcgtcaagggaaaaattcaggcaagagcatttattctggtttcctttagaaggaaaaagtgaggcaaggtcagctggcttaggattgactagtttgaataatttcagggggataatgacctagagtgtaagaccccaataaatgaggtagttggtttgcatatgaaaggcatgcttccaagtgagctgttcgctatctctaggaattggttagccctgggtaggacactttctctaagctcatcgaggcaccaaacacagaaactagaaaacgtggtgattacaaggccacatcctacagtgaaaatagcataagatttggagtattaatccaaattttaggtctaactggtagaagatatgtgaccttggacaagtcactttacttctctaagcctcagttttcccagggtaacacggactttcttcacagggtagtaatggagattaaatgatagaaactacgtgcttttcacttcctaatgcagtatgggttccaggacaaatgattggagcaacagaggtgaagggagtacccaggtgctcttgtagccactgaggctcagcagtaaataatttagacaaaagggctgccctcatgtagcttacattctggaaatgatatgataaccaataaattagtaagtaaatgtgccatatgtcagatgacagtaagtgatatggagaaaattaaggcagacggtatggggaggtgaaagttacagttctttagggtgttcagaggaggtctcataatgtttaataagggcaacatgaaagggaaggccaggaatagataaggaaatgagacatttgggtatttgggggggaaatatacctggtagaggggacagcatgtgtaaaaaccttgaggtaggagatgggttgtgcctggaatgttgaaagactacaaagaagaaactagtgttgagagaaagactgttacaggtagttagacatgagtggggcaggatagggatcttcccccacccactaggaatgtctggtggtggtttggcaattatcacactgcctcttta

SEQ ID NO: 685866 - DNA, 666 bp, Homo sapiens
cctacctttgaaagatgaaaaatcttatggcaattaaaaaaaaataggccaggcacgatggctcacacctgtaatcccagcattttgggaggccaaggctagtggatcacctgaggtcaggagttcgaggctggcctggccaaatggtgaaaccccctttctactaaaaatacgaaaagtagccgggcatggtggtgggtgcctgtaatcccagatactcgggatgctgaggcactagtatcggttgawcccgggaggcagaggttacagtgagccaagatcgcaccattgcactccagcctgggtgacagagtgagattctgtcccaaaaaaacaaacaaacaaacaaacaaaaaacctcaggtttaagagtcaaagagacctggattcaattccaaggtttttttggtttttgattttctacttattagtcacatgaacaacttatttttctcattttcctcaactgcaaaacaggaggaaaaaaagataaatgtttgaggggatggataccacattctccatgatgtgcttatttcacattacatgcctgtatcaaaaccatcttgtgtaccctataaacatatatacatctactatgtaacaacaaaaattttaaaaataaaaaataagggaaaaaattatcacctcaaaatactgaagtgc

SEQ ID NO: 685867 - DNA, 666 bp, Homo sapiens
cctacctttgaaagatgaaaaatcttatggcaattaaaaaaaaataggccaggcacgatggctcacacctgtaatcccagcattttgggaggccaaggctagtggatcacctgaggtcaggagttcgaggctggcctggccaaatggtgaaaccccctttctactaaaaatacgaaaagtagccgggcatggtggtgggtgcctgtaatcccagatactcgggatgctgaggcactagtatcggttgatcccrggaggcagaggttacagtgagccaagatcgcaccattgcactccagcctgggtgacagagtgagattctgtcccaaaaaaacaaacaaacaaacaaacaaaaaacctcaggtttaagagtcaaagagacctggattcaattccaaggtttttttggtttttgattttctacttattagtcacatgaacaacttatttttctcattttcctcaactgcaaaacaggaggaaaaaaagataaatgtttgaggggatggataccacattctccatgatgtgcttatttcacattacatgcctgtatcaaaaccatcttgtgtaccctataaacatatatacatctactatgtaacaacaaaaattttaaaaataaaaaataagggaaaaaattatcacctcaaaatactgaagtgc

SEQ ID NO: 685868 - DNA, 666 bp, Homo sapiens
cctacctttgaaagatgaaaaatcttatggcaattaaaaaaaaataggccaggcacgatggctcacacctgtaatcccagcattttgggaggccaaggctagtggatcacctgaggtcaggagttcgaggctggcctggccaaatggtgaaaccccctttctactaaaaatacgaaaagtagccgggcatggtggtgggtgcctgtaatcccagatactcgggatgctgaggcactagtatcggttgatcccgggaggcagaggttacagtgagccaagatcgcaccattgcactccagcctgggtgacagagtgagattctgtcccaaaaaaacaaacaaacaaacaaacaaaaaacctcaggtttaagagtcaaagagacctggattcaattccaaggtttttttggtttttgattttctacttattagtcacatgaacaacttatttttctcattttcctcaactgcaaaacaggaggaaaaaaagataaatgtttgaggggrtggataccacattctccatgatgtgcttatttcacattacatgcctgtatcaaaaccatcttgtgtaccctataaacatatatacatctactatgtaacaacaaaaattttaaaaataaaaaataagggaaaaaattatcacctcaaaatactgaagtgc

SEQ ID NO: 685869 - DNA, 595 bp, Homo sapiens
gttcctgccttaaccgatgacatcaccttgtgaaattccttcttctgactcatcctggctcaaaagctccctcactgagcaccttgtgaccccagcccctgccagccagagaacaacctcctttgactgtaattttccactacctacccaaatcctataaaatgtccccaccccatctcccttgctgactctcttttctgactcagctcacctgcacccagkcgaaataaacagccttgttcacacaaagcctgtgaggtggtctcttcacacggacgtacatgaaagtatcacgttaatttaaagaggccagctgaaaaagaccacatattgtattattccatttatatagaaagttgagaaaaagcaaatctttagatataaagactagattagtagttgcttgagtatgggggtagttgcctgagtatgaggatagattagtagttgcctgagtatgggggtagttgcctgaatatggggatagattagtagttgcctgagtttgggggagtattagtagtttcctgagaatgaggattacctgtaaagggaaccttctaggaatgttctaaaatcagatgctggtgatgat

SEQ ID NO: 685870 - DNA, 533 bp, Homo sapiens
aaaattggagacatcaaaatggctgactataaatgtcccgcaaatatatggactcggaagaaaggaacaggcaataaattgacagctatgacttgactagagtatcagagtaagagtgctggattgcaatggaagagtgagaatgtaccagtggttattggaagtctaagagagcagcatggaggagcttagcttctgcacccctgtctgtgtcaccagattggatctgcttgaagtcaggaggaatatcccattgcaggaaaaaggtaaacagaagacccccacaagcctccaatacccctacgaataattacaatacttaaaaccaaagagtctcacagtccccactgacctgaacccaatttggagaattgccagggactacacaatattgtccrggattaaaagcacaggtgtgcactccctgccccacctccagggagccaatcttctttagcatggccccatcttaaatccagagccatctctggagtgcatgctgctctgggggccagtagccaatgcacctttac

SEQ ID NO: 685871 - DNA, 533 bp, Homo sapiens
aaaattggagacatcaaaatggctgactataaatgtcccgcaaatatatggactcggaagaaaggaacaggcaataaattgacagctatgacttgactagagtatcagagtaagagtgctggattgcaatggaagagtgagaatgtaccagtggttattggaagtctaagagagcagcatggaggagcttagcttctgcacccctgtctgtgtcaccagattggatctgcttgaagtcaggaggaatatcccattgcaggaaaaaggtaaacagaagacccccacaagcctccaatacccctacgaataattacaatacttaaaaccaaagagtctcacagtccccactgacctgaacccaatttggagaattgccagggactacacaatattgtccgggattaaaagcacaggtgtgcactccctgccccacctccagggagccawtcttctttagcatggccccatcttaaatccagagccatctctggagtgcatgctgctctgggggccagtagccaatgcacctttac

SEQ ID NO: 685872 - DNA, 1336 bp, Homo sapiens
  misc_feature 769: n = A,T,C or G
ttataaggaaggggagacgaatggctaagatttatgcaaatctaaaaaatattcgctaagtttgcatatgggtaataattgaaaaattttccatagcctactttttgacttcctctatttcaagcctcattgctttttcaaaagcttccgtctttactcctatgtagtaacatcaccaattttatattttgctgagtggtgaagattaacttgtcccaaattcatcctctatgggttccacttcaaggaaaggaaatagtttcttatagtgctccaagaaaaccatctagtccttgtcagacattacacattgatgctggtacttccatcccacactttatatccaattacaccagaacatggggaaatacagtacattttaccactacagtgtcaggttgtccacaaggctctaacacctgagcacaacatgagaagcatggtgctaccgtcaaccacaactgtaagctgccaggacagaggtcagaccatattgttcttatatccttagcctgctctcaacagggagaatggccatgatttctgggtctaatgtctgatttgctggattgttatggtaaagccaagagtaggtcacctgctactgattctatgtccatagttttctctagtgaacaccactccaggtggccagatgtttgtctgtgttgcttggccatctgtccttgttggcacaatattcactgagaaactaataataaaggacaccctttgctataatacagttgattattcgacaaataatganagatatattgttcatttttcatgtcttctttttggatcctgcctattatttcaacattgtcttggatggcttgaaaatagarcaaatctctcaaaattagtagtaaatcaccattttgcatacaacctggactttgttttatgaggagtacattattttgtaaaaaagtattataatctgaagtaattgttaggtaatatttttaaagtaaatattgactcccagatggactgtttcaacgcagggaagtgattccaatattatttcttgggcacgccatgatagatacagtacttatacacaaatttcctgctttcttgaacttaaatttcctgaagggatacagaaattatataaacatacaatatattttgatgtaaagataaacgaagcaggaaatggaagaataggttagaccagttagtgaagattttatgaactgatgatagtactgaaggtaactttcatgttttagggtgaatgatcaaacagtaaatataaaattaacagttccagttgaaattgctagtttttccactggcaaagatagtgtgggaaagagagttt

SEQ ID NO: 685873 - DNA, 845 bp, Homo sapiens
ctgcatactctgtctttctcatatcattagtctacagctactgctgagaagtagcattacagtatcagcttgcactgagaggctattcacaccactggaaactatgaaaatttggaagtagtgcaggtgtttctaaaatctcttttgatttgccatgtttacctatttgataatgttttccaaagacagtgcccttagttttaataatatgttaaaattaatattcaatgatttgttagacccatggtatcaactgaaatacagtctaccaaatgccaatattagttaatgttggggaatgagtatggaaaataagtttctaatgtgcaagaaaaatacaatcttggggccccacagttgctatgccaaagggaaagttaagtctgagaactgagtcaccaatacttcttccttttgttcccagatagctgtaatttcacctgcttacttcatcttatgtaaaatgtagttttactgggcrtgagacaatgcataactgactttttcttctgctccctcttttaacatgtttactttatctgatgtaatatgtaactttactcagcaggagacaatgcataattgaccttttcttctactctgctatttcgcatgtaaaaacaaatgtagatttactgaggtttatccgggtctcacaagaatgtaaccatttgtttcactgtctgccttccctctctatttcttccttcttgcttgctcttcgtcctttaaatactgaagttcccacaacctgctttggaaaaagcacaggtcatagacacccgttatatggtttggctgtgtccccacccaaatctcatcttgaattcccacatgttatggga

SEQ ID NO: 685874 - DNA, 845 bp, Homo sapiens
ctgcatactctgtctttctcatatcattagtctacagctactgctgagaagtagcattacagtatcagcttgcactgagaggctattcacaccactggaaactatgaaaatttggaagtagtgcaggtgtttctaaaatctcttttgatttgccatgtttacctatttgataatgttttccaaagacagtgcccttagttttaataatatgttaaaattaatattcaatgatttgttagacccatggtatcaactgaaatacagtctaccaaatgccaatattagttaatgttggggaatgagtatggaaaataagtttctaatgtgcaagaaaaatacaatcttggggccccacagttgctatgccaaagggaaagttaagtctgagaactgagtcaccaatacttcttccttttgttcccagatagctgtaatttcacctgcttacttcatcttatgtaaaatgtagttttactgggcaygagacaatgcataactgactttttcttctgctccctcttttaacatgtttactttatctgatgtaatatgtaactttactcagcaggagacaatgcataattgaccttttcttctactctgctatttcgcatgtaaaaacaaatgtagatttactgaggtttatccgggtctcacaagaatgtaaccatttgtttcactgtctgccttccctctctatttcttccttcttgcttgctcttcgtcctttaaatactgaagttcccacaacctgctttggaaaaagcacaggtcatagacacccgttatatggtttggctgtgtccccacccaaatctcatcttgaattcccacatgttatggga

SEQ ID NO: 685875 - DNA, 1310 bp, Homo sapiens
tgattctgtctaaaaaacgctgacaaagaatgcatctacttcctagtaaattctacagctggaaggaagtttctagaggcacctcagcactgacttcagtacccatcactccacaactcaaggatggaaaccttgaacgtctgaatttgctgaactgcttgagatgaggtgagagaaaaggacttttttttttttttgacacggagtcttgctctgtggctcaggctggagtgcagtggcccgatcttagctcactgcaacctatgcctcccgggttcaagcgattctcctgcctcagccccgcaaggacctgggattacaggcacccacccaccaggcccagctaatttttgtatttttagtagagatggtgtttcaccatgttggccaggctggtttcgaactcctgacctcaagtgatccacccacctcagcctcccaaagtgctgagattacaggtgtgagccaccgtgcccggccgcaaagggcttttaataaatgatgctccttagtctttggtatgttactcaaataaccaccagtgaatggaattacaatctttgggcagtttagcaagattctttatagcaagcttggctcctaccagcggactattactctaaaaacactctgggagcaattacacactcagtaacccctcattaagtagcaattttacctaaccttacccgtttccttttgagtgtgagagtgaagggagaaatgaattaaagcacatcaagaagctctgtatgctcttggcttggacggtatggtgagcagcaggggggcataatatatgcagtagcgccatgcagaagttgggggaggagagattttggttaacacttcccactctcccaccgcccacacttcaaatcagtccgaattcccgtgctgtcagagaaaaggggaggtgtgcgagggaaataaggacttgctatcaccggtcccatttcaaatggtaaattcasgtagtattaatcctgtttcagagttgggggtataactcaaggctagaaacagctgagaaacagcatgagacagaatcccttgagaaggaggtgatcagctatttctctcttctcatttcatcttaattcttgatggtaagattttttaaaatttcctcaacaggcctacgttaatttataaacgaattatgcccatgtaataggtgctgaaacaaatgcatacaagatagggagataaaatagatccagaagtagaagacctcagaataatacactaaactattttttacagatatcttttttcctatataatgattccaaattacctaatgacaa

SEQ ID NO: 685876 - DNA, 645 bp, Homo sapiens
attgcaatatccagtgcaaacattgaatgtgtacctgctcttcttgccattcttttttattcctatcaatcactctgtgacagtgctatttcgttcagtaacaggtaaacactaaggggctaatcatgtgtttcaatttctaattttttcttgtgtgagtctacttactaaaagtcatgatagcttagtatgcttttctttctttcttttttgagacagggtctcactctgtctcccaggcggagtccagtgacgygatcacagctcaccataacttcgacccaggcaaaagtgatcttcccacctcagcctctcaagtagctaggaccacaggtgcctgccaccatgtctggctaatttttgtattttttttgatagagatgggtttttgtcatgttgcctaggttgatctgcagctcctgggcttaaatgatattctcatctcagcctctcagagtggcggggttacatacgtaagccactgtgcctgacctgatagttcagttttcttaaccacattaaaaatataactaggatcttaaactgacactttaattaagaaagttttcattcatttattcattaatatgtcaacctattcaaattaaaatgtacattacatttatattaaacattaatcattag

SEQ ID NO: 685877 - DNA, 1351 bp, Homo sapiens
tccggcagttctttatagccatatgaaaacggactaatacagcaccataggtaatgacttttacaagagtagtttcagtgggagaggagggccaaagactgaccattttccaagtagaatgagaagagttcaaggaggtgttttgtttaagaaggaaaaaaaacccaaaatagtccgttttcatgttggttttaaagaacaaataggagaaaaactgatgcaagagagaggaggaaatgcaatctactgcagaagtaggaggttagactaatttgaaaaagagatggttaatctatagtaaaggaggcaaggcagaatatgggtaaatacatactgttccacaggaaaagtgttgaaaaaatacaaatwtgattaaaaataattcctatggcataggcaagggagaaatattcaaggacttcacaattttcttttatgtcctgcaaccccttccctgatgatttcaaagcccattaaggtatcccctatcttatctgaacactcacaactgtggccatagtgtattttgtttctgattacttattgttaaaatacatgttttattctgccatctaccttacctacgttttcttccctatccttgattccttattctgtaactatatcaacaatttgcaaagacacaggcataatttagggtacaacttgcctctcttcattctctatcttccctgctcctagttagcactcaataaatgttcattgatttattgcttaaaatattattcctccagaaaactacttggataccttcttcacttccttcaagtctttgctcaagttttacctttgataatacccaacctatgtaatcttgcaaatttccccaatattttttactctatcttccaaatgctcctttttcagtttttactacgttttactatgtttcttatttgttatgtttattgtgcgctatctcctccaacatgatgtagaccccatgagggcagggtcttgtcttttgtttattaatgattcccaaaagcctaaaacagtgctagactcagaggtggcactcaataaagtgaattagtaaatacatttataattcctacacatttatagtagtaatcccctgttcaaatttttcagatttgtttaggaagatgagagagctcatccttttctccagttttttttaagcatctatttcatgcttgatattatttgaaagtaaaagacattattaactatttttaaattcaagaggtactacacaagttaaagaaatatttatttatcaaatggtgctgggttctgtggtatataatgttaaacaatatttgctccctgctttcacatagttcatagctattaacaaatgact

SEQ ID NO: 685878 - DNA, 1499 bp, Homo sapiens
gcggtgaaggagacctgtgcttggttcactgacaactacgagcaggcccggaagtgaagctggaagacaggatcaggtgccagcggaccatcggctggcagagccagcggccaccacccgtcaaccctgccaggagctgagggcaccacccagcaacctgggcctgcattccatccgctctgcagccccaagcatctttccagtggggcccccattcacgttggtcctcagggaaaccagggtccsgggcaggcccggcgctttgctccccacaccagccccctgcgcgtgtccactctgatcctgcatcccactccctgggagccaataaagtgcattttcacaggcctggccttggcagctctgtgctgagccgtcccccacacccagggactgccccctagcctggccagtcccaggacccactatccccctggcttactgttcagcccccaagagctggtgactccctggggtggaaaggccgcagaggctggagatgggaaggcacacgtgggcaggcagcaggcaggcagcagtgagactggtgtggactgtcagctggacaaggatgtgcagggcagggccagtcccagcccctccacatgtggccacctgcaggcctgagtaacttgagctcacccggacctccctgcctcagcctgagggctctggggaagctggtctagtgggccagaaacgtctagtgagccagccgagctgagcccatggatggatatgaggggaggctgatgattgggtggctcgggcttcccctggcctggcccctcctctctgtggctctcaggcttgggcgtgggtccccacctggccttatcccatggagagggacaggtgcctgctggacaggtcagctccagccaccagaggtggagtgtcattgctcgccgcccccgtccattctcagaggggagacagcaaagtccagaatggttcccgggccagtgcctcagccaggcagggtggcgctggggtatggaccaggagcactgggctcaggccccggcttgccgtcgccccctttctcagtgcctcgcacagagggagcccctatgccagaaccctctggtccactgcatccaggacccagatgccctccctggctcctggcccaactctgggcccacgtcctcagggtccctctcctgggcgccctgtgccgtcttcacgcacatgatgccttttggctgcaggtaggacctgctgcttcacttcttcgttcattccggcagcggtgatgtgtcctccctgtcccggcactgagtccagaccggtgtgtcctgcacccagccaaccgctcacctcatctctcactgtccctttgtgtccagcaagccgaggtgtcctccaggcctcccctgagactggccccctcttgggtcaaggcctccctaccttttaggcctcagctgaggtggcccagcctccaaaacaccttccctgatggcaccttcacagcgcctctcggagcatccacc

SEQ ID NO: 685879 - DNA, 1499 bp, Homo sapiens
gcggtgaaggagacctgtgcttggttcactgacaactacgagcaggcccggaagtgaagctggaagacaggatcaggtgccagcggaccatcggctggcagagccagcggccaccacccgtcaaccctgccaggagctgagggcaccacccagcaacctgggcctgcattccatccgctctgcagccccaagcatctttccagtggggcccccattcacgttggtcctcagggaaaccagggtcccgggcaggcccggcgctttgctccccacaccagccccctgcgcgtgtccactctgatcctgcatcccactccctgggagccaataaagtgcattttcacaggcctggccttggcagctctgtgctgagccgtcccccacacccagggactgccccctagcctggccagtcccaggacccactatccccctggcttactgttcagcccccaagagctggtgactccctggggtggaaaggccgcagaggctggagatgggaaggcacacgtgggcaggcagcaggcaggcagcagtgagactggtgtggactgtcagctggacaaggatgtgcagggcagggccagtcccagcccctccacatgtggccacctgcaggcctgagtaacttgagctcacccggacctccctgcctcagcctgagggctctggggaagctggtctagtgggccagaaacgtctagtgagccagccgagctgagcccatggatggatatgaggggaggctgatgattgggtggctcgggcttcccctggcctggcccctcctctctgtggctctcaggcttgggcgtgggtccccacctggccttatcccatggagagggacaggtgcctgctggacaggtcagctccagccaccagaggtggagtgtcattgctcgccgcccccgtccattctcagaggggagacagcaaagtccagaatggttcccgggccagtgcctcagccaggcagggtggcgctggggtatggaccaggagcactgggctcaggccccggcttgccgtcgccccctttctcagtgcctcgcacagagggagcccctatgccagaaccctctggtccactgcatccaggacccagatgccctccctggctcctggcccaactctgggcccacgtcctcagggtccctctcctgggcgccctgtgccgtcttcacgcacatgatgccttttggctgcaggtaggacctgctgcttcacttcttcgttcattccggcagcggtgatgtgtcctccctgtcccggcactgagtccagaccrgtgtgtcctgcacccagccaaccgctcacctcatctctcactgtccctttgtgtccagcaagccgaggtgtcctccaggcctcccctgagactggccccctcttgggtcaaggcctccctaccttttaggcctcagctgaggtggcccagcctccaaaacaccttccctgatggcaccttcacagcgcctctcggagcatccacc

SEQ ID NO: 685880 - DNA, 590 bp, Homo sapiens
ttacactgcacccatgactctcctccaggaccagctataataatgtcatatatatgttcctcctttctctatagtgacaaactaatctttatcttaagagcaaagaagacctactcatccacatcgatgcttctcaaaatataatgctcatacaaatcacttagggatctcattaaaatgcaaattctcattcagtgggtcttgggcctgagattcttccatgccgttagtacatggaccacactttgagtggcaataatccaaattaccccaaaaggaaaaccacacccaacaccaagtatgtattagagaggacaggcagaaggcccaaagccaatgtatccaggctcaacctcctccctttcaaaagacaccatatcttatcccaaaggacctgagactatggtgcttacagactgaagatagtgcatcataatttcaagraaaagaaatgaccacgcaccaagtgttgtgacagtgtccagctcatcttagatagcattcatccagtgagactgggtaatatggtttgaatgtgtcccctccaaaattcaggtgtcgccagtgttatggtattaagaagtgaatgg

SEQ ID NO: 685881 - DNA, 596 bp, Homo sapiens
tgtacttgcaagctcattaaagccagatactaaattactttatatttttacaatataaatgtttacatttgacataataatttttgcatttctaggttattttgtctctattcctaacagtacattttcaaagtttctaagaattttcatctaagaaaatcagatgtatcaaagcaaaatgcctaaaaaatacttacctacttagtttctttagaatgtgttggaggatgttaaataaattggaaatcctgataaacaaaagaaattcatgtaaaattaaactgcaaaaaacttacttttagcaattatagctcctcaggcagagaaatgccctcaattacaacaacaaaaacagcggatgagataatgtaatacaaaaaatctgaaacttatttctatttggattaaattatgatatttacttaattttttwaaaaaaatttccttttttttttttttttttttgagatggagtcctgctctgttgcccaggctggagtgagtgcagtggcgcaatctctgctcgctgcaacctccacctcccggattcaagtgattctcttgcctcagcctctcaaatagctgggactacaggc

SEQ ID NO: 685882 - DNA, 2297 bp, Homo sapiens
tgcaacctctgcctcctgggttcaggcaattctcctgcctcagcctccttagtagctgggattacaggcgtacgccaccatgcccggctaatttttgtatttttagtagagacagagtttcaccatgttggtcaggctggtctcaagctcctgacctaaggtgatccacctaccccggcctcccaaagtgctgggattacaggcgtgagccaccgtgcccggccaatgtgtaatctcttgctatctaaactattgctactggaaaatgagaactcaacagatttggagagcaagaaatacttacactgtgttatgaaacctactccacagcaaacaaataaaaaacaacgccccgcaaactgaataaaaaggggattcttttttttgagacagggtcttgctctatcacccaggctggagtgcagtgctgtgatcacagctcactgcagccttgatctcccaggctcaagtgattcttctacctcaggctcctgagtagctgggactacaggcatgtgccaccatgcccggctaatttttaagattttttttttttagagacagggtcttcctatgttgccctggctggtcttgagctcctgggttcaagtgatcctcttactttggcctcccaaggtgctgggattacaggtgcgagtcactatgcccagcatatgctttttaatataaatgttagaaaatgggaatcattgtaatagtgtcataatttattgatttattgagaatctttgatgtgctaggcatcccttcaagcatttctgaggtaataatcactcctcacaacaactgtaagttgttcttatctctatcttacagataaggaaactgaggcatagagagtttagatataatttcattaagtcacataaatagtaagaaaaatatggcctcaaaaatacacaaacttaatcagtatattatactataattatatagatatgcttttagtttgaaagaaggatctattaaacattttaaggaactggaggactaattattatgttaagtaaagtaacccaggaacagaaaatcaaacactgcaggttgccactcatatgtggaagcttaaaaaaaaaagttgatctcatagaagtaaaaagtagaacagaggatactagaagctgggaagggcrgaaggagagatttgttacaaaattacagctaactaggaagagtaagttccagtgttctgtaccactgtaggataactagagttaacaatactatatagtttcaaatagttagaaagaggataccgaatgttcctgcacaaagaaataataaatgtttgagatgatggatatggtaattaccctgatctgatcgctatatattatatgtattgaaacattactaggtaacctatgaatatgtacagttgttatctgtcaattaataaaaactgaaggtttataattcttttttttttttttttgagacggagtttcactcttgttgcccaggatggagtgtaatggcgcaatcttggctcaccacaacctccgcctcccaggttcaagcgattctcctgcctcagcctccctagtagctgggattataggcatgtgccaccacgcccggctaattttgtatttttagtatagacggggtttctccatgttggtcaggctggtctcgaactcccaacctcaggtgatctgcccgcctcggcctcccaaagtgctgggattataggcgtgaaccaccatgcccggccacttttgttttttttgagacagagtcttgctctgtcgcccaggctggagtacagtggtgcgatcttggctcactgcaagctctgcctctcaggttcacgccattctcctgcctcagcctccagagtagctgggactacaggcgctcgccaccatgcccggctaattttttgtatttttagtagagatggggtttcaccgtattagccaggatggtctcaatctcctgacctcgtgatccgcccgcctcggtctctcaaagtgctgggattataggggtgagccactgcgcctggcacaaggtttttaattcttaaatcttaatttaaatcttaaattataatctgaaatctataatttaaaattttaaggattataattatctgtacaaccctctgataaaaaatatcctcaccattcagcttgttttctttgctctgccaactcatggagccgccgaagggctttttcctgttttttctcatccttgcgggatcttgaagagacatttcgagcaaactctctctgcttcagatcttttaatctctgggttaaaagaaa

SEQ ID NO: 685883 - DNA, 2297 bp, Homo sapiens
tgcaacctctgcctcctgggttcaggcaattctcctgcctcagcctccttagtagctgggattacaggcgtacgccaccatgcccggctaatttttgtatttttagtagagacagagtttcaccatgttggtcaggctggtctcaagctcctgacctaaggtgatccacctaccccggcctcccaaagtgctgggattacaggcgtgagccaccgtgcccggccaatgtgtaatctcttgctatctaaactattgctactggaaaatgagaactcaacagatttggagagcaagaaatacttacactgtgttatgaaacctactccacagcaaacaaataaaaaacaacgccccgcaaactgaataaaaaggggattcttttttttgagacagggtcttgctctatcacccaggctggagtgcagtgctgtgatcacagctcactgcagccttgatctcccaggctcaagtgattcttctacctcaggctcctgagtagctgggactacaggcatgtgccaccatgcccggctaatttttaagattttttttttttagagacagggtcttcctatgttgccctggctggtcttgagctcctgggttcaagtgatcctcttactttggcctcccaaggtgctgggattacaggtgcgagtcactatgcccagcatatgctttttaatataaatgttagaaaatgggaatcattgtaatagtgtcataatttattgatttattgagaatctttgatgtgctaggcatcccttcaagcatttctgaggtaataatcactcctcacaacaactgtaagttgttcttatctctatcttacagataaggaaactgaggcatagagagtttagatataatttcattaagtcacataaatagtaagaaaaatatggcctcaaaaatacacaaacttaatcagtatattatactataattatatagatatgcttttagtttgaaagaaggatctattaaacattttaaggaactggaggactaattattatgttaagtaaagtaacccaggaacagaaaatcaaacactgcaggttgccactcatatgtggaagcttaaaaaaaaaagttgatctcatagaagtaaaaagtagaacagaggatactagaagctgggaagggcggaaggagagatttgttacaaaattacagctaactaggaagagtaagttccagtgttctgtaccactgtaggataactagagttaacaatactatatagtttcaaatagttagaaagaggataccgaatgttcctgcacaaagaaataataaatgtttgagatgatggatatggtaattaccctgatctgatcgctatatattatatgtattgaaacattactaggtaacctatgaatatgtacagttgttatctgtcaattaataaaaactgaaggtttataattcttttttttttttttttgagacggagtttcactcttgttgcccaggatggagtgtaatggcgcaatcttggctcaccacaacctccgcctcccaggttcaagcgattctcctgcctcagcctccctagtagctgggattataggcatgtgccaccacgcccggctaattttgtatttttagtatagacggggtttctccatgttggtcaggctggtctcgaactcccaacctcaggtgatctgcccgcctcggcctcccaaagtgctgggattataggcgtgaaccaccatgcccggccacttttgttttttttgagacagagtcttgctctgtcgcccaggctggagtacagtggtgcgatcttggctcactgcaagctctgcctctcaggttcacgccattctcctgcctcagcctccagagtagctgggactacaggcgctcgccaccatgcccggctaattttttgtatttttagtagagatggggtttcaccgtattagccaggatggtctcaatctcctgacctcgtgatccgcccgcctcggtctctcaaagtgctgggattataggggtgagccactgcgcctggcacaaggtttttaattcttaaatcttaatttaaatcttaaattataatctgaaatctataattwaaaattttaaggattataattatctgtacaaccctctgataaaaaatatcctcaccattcagcttgttttctttgctctgccaactcatggagccgccgaagggctttttcctgttttttctcatccttgcgggatcttgaagagacatttcgagcaaactctctctgcttcagatcttttaatctctgggttaaaagaaa

SEQ ID NO: 685884 - DNA, 744 bp, Homo sapiens
agcagttttaattcctgaatgccataattctgctcaaatgtaaaaggttagtttaccatatatttcatcacacttgatctattgtcraattcaccaagcactgccgtgtgcccttgccaggcatgccatcagaaaggccggtccctgccctcaggaagtgctggcagccacacccctgtgcacctgttcttcgcagggcagacctggaggttgttcctctctaccacagttgccttgggggtacacgtaaaggtggtgtagtttttttcctggttagccttacttttacctaccttttgagaggaagagaggatttgctcgtcagcagtatcttttgctgaacactaagctaaattctaagggaaaatgcaaataaaaacaccttgcccttgaactattagaagaaatgaaagagacaagatgaatgcaagaaaaatacagagaacaaaacagcacacaacaagcaattatttatgttaattggtggcagctgtacagagctgggatgggcgtgctgggaatgctaggccgtctgggtgtcctggaggttcctccagggtgactgagaaactgaaatgaggccagctctgcagggtttttcccctcccttccctgaagctgtggaatggaagttgaataagacattgcactgaagatgaggagggtatggtccggtactcagcacttcatgttcatgctccatgtcctgggcagggcttgtctgtgttaataaagttttattgg

SEQ ID NO: 685885 - DNA, 491 bp, Homo sapiens
gtttccgtagctcctaggtcagtgctgcttctatagacagcaattagtaaacatatgttgaatgaatgaaatggtatttgtgatgatttggggactcttccatcattcaaattccaaattgcgaaaaccaaagaaagttgaatggataaatgtcaaccaggaaggaaatctaacagttttgtctcgagattttatcaggaacatgggtaaaggtgatgaaaaacatgcttatcacatttgcgaatgacaggagattggaaggggttgctctcccactggccttcacaatcaaaacttagaaacaacaatattaaaacattaagccagtctccaaatgatatgtggttaaatgataatagcacattcttatgctgaaatagtatgtagctattaaaatgatattgaaaaacagtatttgctgtcctggagaaaggcttacgatacatttttaagtggaaaaaagtacatcctaaaacaacrtgaagaggatg

SEQ ID NO: 685886 - DNA, 593 bp, Homo sapiens
tttgttttccagaactcatggatgataggctgttcatattagatatttttccctaaaagttggataggatggtggcatcattaaataaaaagaaagaaaaaaaaaacctgctttaatgctacgccaggcaaaatatcagctatttacctcatttagaattctacaaagtaatgatgcgatattttggttttgaattttcaacctgttattacaagttctttttttctattttcatattttttctttatctcttaattgggcaatgcctttttattctttccattgaagtacctcacaaaacattctgcctaaaaaaaaaaatgtaggctgggcacaatggttcacgcctgtaatcccataactttgagagttcgacgcgtgaggattgcttgaggtcaggagtttgaggctgcggtgagccaagatcacaccactgcactygagcctgggtgacagagtgagattctgccttaaaaacaaaataaaaaaaaattgaaacccagtcatgggaacattagcataaggaagccagtatcaagttactccagaatgtatactttaagagtatattcaatgactgaaacagcagaaaa

SEQ ID NO: 685887 - DNA, 1078 bp, Homo sapiens
ttaaaacccagtcacttctcatcatctccaccgttgtcagctaggatcaaatgagcatcatctcttgtctggacagttggagcctcctaccctgtctgcctggagccttctaacctggtcctgcaggctgttctcaacagaacactggagccttccacattcaatcatgtcactcctctgtcctgaaccatctggtggttcttctcgcaacccccaccagatatcagcatggcatggtgtccaagcctcctgcacatttttgacgcactcttgccatatcagagtggccttccctgaccacaccctccttggtggtcactctcctcctccccacccagccagcactcttttctcccttcccctgcttacctgccctcaccctctggtaactccatgtttacttgtcaccctctcgtggaatgtgagctcccagcaggcagggccctagttctttccatcagctgtgtcccaagtgcctgaaagggtgctgggcaggcacatgcccagcaaataggggtggaatggtaacccttttcctgtaagtctgaactatccttgggctaggaatcgaccatctcttcttactcactttgtgatgtgggaggctccacggcctccctcggtatcttggaagatggggatgatggtgatatccacatcgcggggctcttaggaagatgaagctacrtcatgcagcaggtctcaagaaggccaatctcctctctttccctgccctgtagtcccatctctctcctgcccagagttgagtcacctgggccagtgtaccctgaggccctggccagccttgcctcttcccctcaagggtctcagactggtgccaacagtcacattgtcacaccaaagccaggagtgcggagagaggatgtggacagggtctagatacctgaagctggggacacatggcctgcacgtctctactaaaaaattaaaaattagctgagtgcggtggtacatacctgtggtcctagctactcaggaggctgagacaggaagatcatttggagcctgggaggtcaaggttgcagtgagccctgattgcaccactggactccagcct

SEQ ID NO: 685888 - DNA, 1078 bp, Homo sapiens
ttaaaacccagtcacttctcatcatctccaccgttgtcagctaggatcaaatgagcatcatctcttgtctggacagttggagcctcctaccctgtctgcctggagccttctaacctggtcctgcaggctgttctcaacagaacactggagccttccacattcaatcatgtcactcctctgtcctgaaccatctggtggttcttctcgcaacccccaccagatatcagcatggcatggtgtccaagcctcctgcacatttttgacgcactcttgccatatcagagtggccttccctgaccacaccctccttggtggtcactctcctcctccccacccagccagcactcttttctcccttcccctgcttacctgccctcaccctctggtaactccatgtttacttgtcaccctctcgtggaatgtgagctcccagcaggcagggccctagttctttccatcagctgtgtcccaagtgcctgaaagggtgctgggcaggcacatgcccagcaaataggggtggaatggtaacccttttcctgtaagtctgaactatccttgggctaggaatcgaccatctcttcttactcactttgtgatgtgggaggctccacggcctccctcggtatcttggaagatggggatgatggtgatatccacatcgcggggctcttaggaagatgaagctacgtcatgcagcaggtctcaagaaggccaatctcctctctttccctgccctgtagtcccatctctctcctgcccagagttgagtcacctgggccagtgtaccctgaggccctggccagccttgcctcttcccctcaagggtctcagactggtgccaacagtcacattgtcacaccaaagccaggagtgcggagagaggatgtggacagggtctaratacctgaagctggggacacatggcctgcacgtctctactaaaaaattaaaaattagctgagtgcggtggtacatacctgtggtcctagctactcaggaggctgagacaggaagatcatttggagcctgggaggtcaaggttgcagtgagccctgattgcaccactggactccagcct

SEQ ID NO: 685889 - DNA, 2140 bp, Homo sapiens
ttttttttgagacgaagtctcgctgtcacctaggctggagtgcagtggcgtgatctcggttcactgcaacctccacttcccaggttcaagtgattctcctgccttagcctcctgagtagctgggactacaggcgcaccccactatgcccggctaatttttgtatttttcgtacagacggggtttcaccatgttggccaggctggtcctgaactcctgacctcaagtgatccacctgccttggcctcccaaagtgctgggattggttctcccaaagtggcgagagccactgtgccctgccaaaactttttttttgagacagggtcttgctgtcgccccggatggagtgcagaggtgcgatcatgactcactgcagcctcaatttcctgggctcaggcggtcctcttgcctcagcctcccgtatagccaggtatgtaccaccatacccggctgattttttttatttttaggaagcaaggtcttgctatgttgcccaggctggcctcaaacttcggggctcaagcaatcctcacaccttggcctcccaaagtgctgggattacaggtgagccactgtgtccagcctttaaaaaccttttatgagtgcttttggagtgtcagatattctcctcactctggaaaaagaacaccagaactttagttttacaggtcccccaaattagggttgaaggaaggtgagtgaggaatgaaaggcagggcacaagggcaaggaaggggtgtggaatgtggagttgggagaacaagtaggctggagagctggctctgacatctgcacccaccacctaaccactctgggcctcgctctcctcacctgcaaaactgaggataatagtaattgggcctatctcacagggttataaagagtacataagatagtggtattaaaaaaaaggctggatatggtggctcccacttgtaatcctagcactttgggaggctgaagcaggaggattgcttgagcccagaagttcaagaccagcttgggcaacatgctgaggccttgtctctacaaaaaaataaaaaaatcagctgagtacagtgatgcatgcctctggttccagctactcgggaggctgaggcaggaccatctcttgagcccaggaggttgaggctacagtgagctgtgctcataccactgcactccagtctgggtgacagagaaaggccctatctcaaaaaaagagagattttgttttctcatctttcagaaactctggataagagctgactctttttccctgaagtttgggtctggaagtggctctctgtcctttccttggatggcacctccagagaaaacactttagggtaaggctggataaaaaytgcccgtaagagatctcctcaagtatacaatttcagtgaaaaaagggaagaaaagaacactgctgtcagcctagcctaaaaaaaaaaatattagaaacagaacttgaaagagtgctatttttatgtttgaaaatctccaggcaatcagatttccctaaggattatcttttcatttccaaatctgcaaaaggagtcaagtggaaaagtaacaaagttacttgattaaaatatcaaaaataaaaactcattctgacaggaattttgttcaagaccactgcacaaccctgcgaccaccgggaagtgaggttagctcctgtctgtgaactgggtagacagcgttgctgctcagagaacggtctgcagacctgtgcccagtccagtcacaagatgtgcatgcaaaccaagagtgaacgtctggtttcttgttgtggccagccccacttggctgaccacagctttgagcagcgctgggaaattcatgaaaactcatttctagaattctgtccattgcatcaatggatccaacaggggaaatgaagcgctgagatggcttacctcgactgctgggatagtccctcaaacttgtttgtagtcttacttgaagaggatggacccccatcgttacctacaaggaaaaccgaaggtgaaaaggtatgtctttagatggggaaatgcaatgagaatacatgggtttggcctgtagacaggcattgctcaggttccagaacggcatttaaaagacccaagccaaaacggcatgcatttctggcctaagaccaaaacaaaactgagcact

SEQ ID NO: 685890 - DNA, 1530 bp, Homo sapiens
gcagaccacaactgcacttgttagactggaggcttatgagaaaaacatctcaccttgtagaaaacatgcatcttactatctctgataacttgtttttcaggatgatgaagtaataaggagtccagcttcagtgctacagagcattttaaaggaagcagtgttgggagggagggatatggaactaatggaaatgaggctagtttatgatggtctcagttatcacagtagatacagagctgagtttacccacaagatcttaatttaggaacactttgaaaccctgtaaccctgctgggtgctctctcctctcactccaccaaggcagcgcacagaaacatacatggggctgtggtaggatgaataatggtcccccaagatgtccacctcctttagcaaaaggggctttgcaaatgagattgaggatcttcagatagggagattaatctggatgatcagaatataccctaagtgcaatcatcagtgttcttataatagggaggcagagggagagctgaccacagtaggagatgtaatgacaaaagcaagaggttggagtgatatgaagaagggctgcaagtcaaggaatgcaggtggcttctagaagttagaaaaagcaagaaaatgtattctcccctgaagcctccagaaggaacagccctgccaacaccttgatttcagatttaatctccagagctgtaagagaataaatcagtattttaaaccactaaggtttgtggtgatttcttacagcagcactataaaactaatacatgggctctgactacagtgagactggcttacaaaagccaagtggcacctttcccagataactccttgttaacagaaaataacctcagtgagcagaaggatacacaagggctttgtccaacatggctaattaagaaattgccaggtgcagtggctcacgcctgtaatcccaacactgggaggcttaggcaggtgggtcacttgagctcagcagtttgagaccagcctgggcaacatggcaaaaccccaaatctgcaaaaaatacacacacamaaaaaaaattagctgggagtggtggcacgcacctgtagtccagcaacttgggaggctgaggtgcaggatcacttgagcccaggaggctgaggttgcagtgagccaagatcatgccactgcactccagcctgggtaatagagcgatactgtcttaaaaaaagaaatcctcaataacgaaaagcttttggagatgcttcagcatctgaacctgacctgttccctagtaacagattggctgagcagttacctgacctgttgggaggaaccactgtatttcatgtctgtggcagttagtttcaaaaaggatgtgcaggcacgcacctgtaatcccagctacttgggcggctggggcaggagaaccgcttgaacccgggaggtggagattgcagtgagctgagatcgcaccactgcattccagcctgggcgagcatgagcgagactccgtctcaaaaaaaaaaaaaaaaaaaaaaaggcagaaaggattggctg

SEQ ID NO: 685891 - DNA, 795 bp, Homo sapiens
agtggataacatgtaaatgaagctggctggggaaaaggtcatttgtaatggtcaggactgtctaaaggcactcaaactcagattgttaaaattcctgtatggattagatacaaaaactgctggccaagtttggctactggttttttttgtttgttttggtttggtttttgggttgctttttaaaaatctttgtgcttagtgaaataaaaaagacattttatgcttatggtagttgagtatcaaagtattactttagaaaggatttttttctgtgtttaccttgcaggtaaaatacttaggactattagatgcagagttttaaagagacaaatgtagaaccctaaacttatttatagcaaattatgtaatgcaatatcatctgtaaaataaggctttatatccataaatatgagattaatgccccacacatttctatttcatagtaatttttaccacatcagtcaaccaaaacatgtatttactgccttttagagtagatgaaattctgtttatgtcctgcttgttcataacattccttctcttccagcatrtgcaatttggttagaagagatagtaaagaaaacactgtgagcttcttttctccttcatatgttttcctccataatgatgccaactcattttcttgtcttttcagaaatgaaagtactgaaaagaagaataaagatttacagatcacatgtgattctctgaataaacaaattgagacagtgaaaaagttgaatgagtcactcaaggaacaaaatgaaaagtaaaatctctagttctatattctga

SEQ ID NO: 685892 - DNA, 743 bp, Homo sapiens
tgacttttgggaaatgatgttaaaaaaaaaaaaggaaactctttgagttataggaaatagttcatgcgatcagttctcactactcatgggtcagttctgcataactatttcccagaccaatttattaaccatttcccactgagcaataaaagaatagagagacacctctcctgaagcctattacaacagcattgagggcagaagtaaactaataagaaatgctgaagcaagtactgtataattatacccaatcaatttttaccaaaatgaatcaatatggcagtctaattgagatgatctttgttgcttcatacaggaatgagatttaattagaatctccagtgattgtaaatgggtaaactgaagtcaccagtaacctcacagaaatcccaggcaatatgagatgaagcaatagatacagcgccctggctggctttttgttcacaggaaatggacattaaagtgccctrcttggcctttgggagactgcaaaccattttcaggtgtgcttggggcctgagtaaaagggtgtggtattgtgtccagacatttgtaaaagattcagttcagataaagcagacaaaacagtttaacttgcatttcaaggagctctgaggattcaagatgttcagttgtggaagaaactaacaagaccggttttaagaggggtttagtttgaaataaatgagagacagctgttaatagtaataagcctgtttccatttttgaaaggttgggaggga

SEQ ID NO: 685893 - DNA, 670 bp, Homo sapiens
tctcgaaatctctgtcttttgatatctagaaatctgctcatttcctttccacctatttttgtttcacaatatcttctttataaatggatcatattccttcacttatctctttcagcatcctaaacttcttttaaactttttgtatgtctattatacaaaatcaatttcatctggaataaattcatgttgtaattgttgattttattaattaccattctgagaattagaatttgccttgttttttggaattctgtattatatgcttcttagtgggagacttaatgttttgtttcctttttttctcccattatgatcactcttccaaaccagaacctgctcttaaaatgactttgcgggttcaggcttcatattgacttaatattgtgggaaactttgttaagttattattgtaaggcaacgtttttgtctccccayatcaagtccacaactttttagaaaactttactgtagataccaggttggcagattttcccagcatcctgttataaggagggacttgagcaagaaatcttgctctggctttcatggaacacatttgaaacaattcattgtccttaacagcctgaacacccagataccagagttcactaccttgaatgtctattccattcctgatcttgttttcaagtctagttatatatatattcca

SEQ ID NO: 685894 - DNA, 601 bp, Homo sapiens
aatttttatgtaaacataatatatgtactttgagttatataaatagaataaaaccataatgaaagcacacagattttataaatgaaatttattttttcctaaattttcataatttcaccaaatttcttacattgattttatattattctgataaagatgtcgcagaatgagatcagtgatgaatctattaacagccatttcattacttcaatattgggtggatgaagaagactctaagcagtgagcttgtgagaccaaacattgaacatgtcatattaaatgtggctacagataacttcaattacacagagtactcaggtgtcccagaatcacctggaataatagtgtaatgactgctattaaaactgatgtcataaggttaaaattatgttgttgaaaaatacttgtcaatakatgatctgcatggacaaagtcagatttttacttttgtaaacaatagttttaaaaagaatgtttaccccgatgattaggatctgaaagtatgtttgcattagaaagggaacaccattattttacagagagataaaaaaagcatttttaaaaaaggaacagcagcaaaatgataagcacataattttga

SEQ ID NO: 685895 - DNA, 1079 bp, Homo sapiens
ttttttctcttagaatgacaataatcagcaaatgaaaacaccatggaaagtcgagagcgagaccagggaagaaagaaaagtgttatatctttgtacttttaacagcacttttttcttgctttttgaaaacaggtctagcattttcattttgtgctaaggcgcataaattatgtatctgtccctgactactgaagcctccttcctaagcaagtgggttggctggccatcaatttaggcatctacttagatctatcagatattatattagcagtttgtattcattctctctacttgtcccctactctgtagtttccagtgctgccatatccactactgtatccactagccacctgtggccaatgagcttttgcagtgtggctagtctaaattgaaatgtactatcagtataaaatgtacgctagattccagagccttactacaaaaaaaagtgaaatatttgatgaataatttttacattgactatttgtttaaatgataatactttggacatattgggttgaatatacaaattattgaaaattaattttacatgtttatttttatttttaatgtaacttctagaaaatgtaacattatacttgtgcccagatagtatttctatagaccttcattgttctgtaacatatgaaccagcccttagccagatcttaatttccactgaggatctcatatttcttattttctaaatgtgaggacctatcatcacttgttttgtcccatgtggccctacaaacaataacaacaagaacaacaaaaatctacctaaatttttcatttatagttgtaaatataccaaaaataagtttattataaatgtttcactggtgaaaagtttaagggaagaaagtatagcaaggtatattaatgacatttgaaaacaaatgtgtaaatggcatgaacctttccatataccacaccctcagaacayacaatgaaagcaacaagaaaaagaagaaaatacaaagccattttcttcacttataattggattctatagccaaactataaagtgtaatataaagaaaactgctaaggagttaataaaaagcttgcatggg

SEQ ID NO: 685896 - DNA, 1438 bp, Homo sapiens
tgagaccatgtgggtgaatgaggtccctttgagaaagtgaaacttaaagataagagaagtagttgcagatccaagaaagggcagtatctcaaacaccagagagtacagaatttttagaagacagtgatcaaagtaatgccttagagatatcagctaagtaatagaatggcaggaaacttttaaagttttgtcattggaataatattggaaataattcttattctgttttttaatacaaataatttgtattatgtcaatatcttattgaaaattcttataatattttccttaacattatgtactaaacccatttatcaatrgttagttgacagatgagattttctcagctacatattttgagaatggagggatggaatagaagaagataaagaagattgattaataggaggaagaagagctaaagacaaacctgatctactatattgtcttacatggggcactacttgccattaaaccaaggatgtgtgttaggtctatctgtatttagtactatctgtacttggtaagtttcccagaaaacaattttataacataggcaccaattatacctctgtccccagcaaccatcttgcaaatgcttactttgggatttaaggaatgaataagggactttgtaacccatgacttacacaggacaagtgtcaaatgtttgttggattgaattatatctttaacacttgaaaacatatttattgctgagcagattaacagcttcaactttaaattcagaagtcagcaattcagatttacatacctgaacttgataacctgagacttgacaaattcttcccttaatggagatttataaaatgcatttttcacctgtttgtaaaaatattcaaaatatatcagcaagaacaactttctgaaattccacaaattaattcaaagctttttagaaaattaaaaaacaaaacagagcaaaaaacattgacatttcacagtgagtggaactgaggaagcttgaggaatctattgtggttttctcagtgatttcaactgaacgctgtcttaggaatgataggagtagggaaccgcagtggggccagaagtgatatctgctgtactaatgctcagaaagagaccaaagaaaatgaacatgctgtttcttcaaaattaagagtgagaaattttactctgaagtaaggacttttactgcccatagacaaaggaaatgaaataattctgccacataatacttggattatagaaatgagtgcatgaccatgtcaaatgcttcccaaacctagtgacaaagttgtcagttttcctggcataatgtacacgaagttcagcactccaagtgctcttagaaaggcccaggtgaactgggatacttagcctaacacacctatgagttttactctactaaagtgaaagagtctatttttgtagagacgttagttattattctaaa

SEQ ID NO: 685897 - DNA, 657 bp, Homo sapiens
attgggattttgaatttcctcgcccattcttaccaaatgttgattttgttggaggacttcactgtaaaccagccaaacccctgcctaaggtaaatgtgttcttgtttcatttgtttgcttgacattttcagaaggaatggctggwtatgtttctttcagagtgtttaactcagagtgaggggaatatgggaggtcaaaaacaaggacttgccattagaaaatcatatatttctgtagtatcacaagtatgtgaatgttattatcattaaagaccaaagaggtttactagggagattttgaaaacagggttggttaaagtaaggccttcattgtgccacccaaaagatagtatgattcatttcttcaaaaaatatttgtagagtgattaatacaaaccacaggtaagtgctggattttcagagaataaaggtagcacagtttctgctccctcatgccttacattgtactttgaaagatagaataaaaacaatgaaaaagaaaagtctaaaaagtgttataaggaaagaccacaatgataaagaaatatgcagaagagatcccaaactcattgacaattaaagtgagtactcaataatgtgcagagataggtgaaacgatgaggggatgagaaacacccaaaaagaaaaccagaggcca

SEQ ID NO: 685898 - DNA, 618 bp, Homo sapiens
tgctaaaagtattcaaaggtgtctttgtaaactgagacccctgcaaggtagaatagtgttgtctgcagctgtgtaaaacaatgtaagatatttctgctataaacatgacacatacctccgaaagatgttatattctgccaaatgatggactaaaaaaccacaaggcttataggaaagaggagttcagggccaaactctccttgaggctataaatggctaaccccataaccagagccctaattaaaaacagctgcctcccgatgtgtatggacccctctccactggctcggccaccacttttgacccactgttkttgctcctcagagtggcggagctttaagaacacttattctaatagaaacctgtttcatcaaaattaaaaatacaactcagggataaccttttcatcagttagtattttgacacaggagaaaagcaatatcttggttagattgacattttttatttgccctgtctacaccctccctttcccaaaatatgtgcccatgtggattacaatggaatcacagttggtggctgagtcttccattttgaaaatatatactttacgaaatactcagcccaatagatatacatactaaacaacctataaataaa

SEQ ID NO: 685899 - DNA, 622 bp, Homo sapiens
aaacgtccttacagcctcacatatctagaaacacagtcaatgtctgtcattcttgttactcacagacaatgatattgctcaagggaggtggtaacattgttgctccttggtttttatctgtctggaagtaagcagttcacagagaagagttatgttggattccatttgcttgtcagcgttgtcacatctttttcctctggctatatattttgtgattgtgttttcatcatttkctgctgattatattactgagagtgcttttcccagtgacaatttcagtttgacattaattttaaccatgaatctgagtttggaggcaggttaaaaaaatagaaaagaatactgcccttttaggtacacaattttcttatgattagaagttctatcacatagttcaaaatgacataaagttgtaaaatgtgtgtatttgagctgttacaaatttatgcatgctattttcagtaagttattgttaggttttataaacgtatttcttcaattcatttttgtattatgcaagttaccttgtggtcgatttgttttaagtattgttatagagtagaataaaattgggtcggctataagaggacagattactgaatttggcattccatcctactga

SEQ ID NO: 685900 - DNA, 622 bp, Homo sapiens
aaacgtccttacagcctcacatatctagaaacacagtcaatgtctgtcattcttgttactcacagacaatgatattgctcaagggaggtggtaacattgttgctccttggtttttatctgtctggaagtaagcagttcacagagaagagttatgttggattccatttgcttgtcagcgttgtcacatctttttcctctggctatatattttgtgattgtgttttcatcatttgctgctgattatattactgagagtgcttttcccagtgacaatttcagtttgacattaattttaaccatgaatctgagtttggaggcaggttaaaaaaatagaaaagaatactgcccttttaggtacacaattttcttatgattagaagttctatcacatagttcaaaatgacataaagttgtaaaatgtgtgtatttgagstgttacaaatttatgcatgctattttcagtaagttattgttaggttttataaacgtatttcttcaattcatttttgtattatgcaagttaccttgtggtcgatttgttttaagtattgttatagagtagaataaaattgggtcggctataagaggacagattactgaatttggcattccatcctactga

SEQ ID NO: 685901 - DNA, 596 bp, Homo sapiens
gattcaaccaattgcagttagaaaatattcagaaaaaaatcgctgaacatgtacagacatttttcattattattttctaaacagcatagtataacaactattatatagaatttacattgtactaggtattataagtaatttagagatgatttaaagtataaaagaggatgttcataggttatatccaaatattaacagtgttctatataaaggatttgaactttcatggattttggtatccatgggaggtcctggatggtattcctcatggatactgaggaatgactgtatattattttggtaggaatctatgataaaaaatttagccattattcatctggcaggtgagcatatggataaaccttgaatctcargaaatagtgtttattcactttagtggtaaatattgatatctctgattttagaggttccatgataaaatgtattctgaattgaaaataagatcttattgaagtttggtcactctattttatattagacctctagtgcattctaacttaccggttgaaaatattgtatagttgaatttctcttttcctattgcatttatactgaagtctcaactactaaaagat

SEQ ID NO: 685902 - DNA, 596 bp, Homo sapiens
gattcaaccaattgcagttagaaaatattcagaaaaaaatcgctgaacatgtacagacatttttcattattattttctaaacagcatagtataacaactattatatagaatttacattgtactaggtattataagtaatttagagatgatttaaagtataaaagaggatgttcataggttatatccaaatattaacagtgttctatataaaggatttgaactttcatggattttggtatccatgggaggtcctggatggtattcctcatggatactgaggaatgactgtatattattttggtaggaatctatgataaaaaatttagccattattcatctggcaggtgagcatatggataaaccttgaatctcaggaaatagtgtttattcactktagtggtaaatattgatatctctgattttagaggttccatgataaaatgtattctgaattgaaaataagatcttattgaagtttggtcactctattttatattagacctctagtgcattctaacttaccggttgaaaatattgtatagttgaatttctcttttcctattgcatttatactgaagtctcaactactaaaagat

SEQ ID NO: 685903 - DNA, 1516 bp, Homo sapiens
ccgggtgatagcagtcactgggctttagggaactctgttggagagcctgcaggcaagtggatcaaaaaatcaaactgttgagaggggtgtaacatacaaagcaaggttacatcccttacagtccgtctccttaccacatcccactctctggaaaccaccattgacaagagtttcctgtttattcttataaaaaactcctgtgcgcaaacaggcacacattgcttttaaacacacatgatttgtttgttctcattattcagattgtaccacctgacacccttgactctgctgttcccttttgccagtcagtccagctcggtccgtcccacagctgcrgggtagagtccaccatgatccagtttgtttcaccaggtttccgtgagaaacagctggatgtttttggtttccagcctttgggggttgaatgataaccctcatcccccaaaaagatatgtccacatcttaatcctcgaacctgtgaatgagatcttattggaaaattaaggatctagagatgagatcatcctgatgtaaccatgtgggttctaaatccagtggcaagtgcccttagaagacacagaagagaagacacagggagaggagatcttgtgaggatagaggtagagattggagtaatgcagccacaagccgagaaatagctggagcccctagaagctggacgaggcaagggatgattctcttttagagctgccagagggagtgtggctctgctggtccctggatttcagacttctggtctccatacccgagagagaatacatttctgttgttttaagccacctagtttatggcaatttgttagagcagccctgggaagttaatacactgcccaaactctgatctaatgaacatttttcttattatgagaaataatggacaccttctctggacacatctgggcacatctgctcaagtttaccttcaggacaggtttccagaagtagaattttggttctaggtcctgaaatattttccccttcagatgtatttcatatcacatgcatccttgccttaggaataataatgcaagtaacagtagcaattactgtgtgttgagtgctttttgtgtgtcaagcattgtacctacattatcttattcatcctgacaataaccctatgacacatttattattatcctctttttatggatgcaacactgagatttagagtattgaagtcacttgcataagatcatatgcttacataagaggcaggggggccaggattcaacccaccctctaactccaaattctgtgttcttagctatgttgctgggttgggaagataaaccacattttagactttttggccctgtgttgtatggacgtggtttggcatgttctggccactgggtgtggtgggttctgggaggtgacagactcagttataattacaggaagaagtctggtctggcaggcagcatgtggaatcaatccatagtgcattgggagtctggtgaaatagcaccatgcagatggtccatcttggcgtaatg

SEQ ID NO: 685904 - DNA, 663 bp, Homo sapiens
ttcttaacatactatgaatggttcatatgactagcactattatcaacatgtataatctgtttgaaaagttgacttttattttcatcaggcaaaaatgttaaacaagaaaagcttttttgaaaactggggcaataaaaaataagctttataaaacagaaatgactgccaacttgcaaatcaacatctgaaacttggtttcaaataaagggaaaaaaaagactaagaaaacataacttactttgattagcgagtgtcatatagtsgctaaagccagagtccactgaagccggacagtcaaaaccaagccccagctcaacactgactagctgtgtggccttgtttctattatctttttacatctcaatttttctatctgtaaatggaaataatacaaagagcgcttatatgtagattaattaatacatgcaaagcacttagggacagttcctggttcagagtagcaccagacagatgtcaattattattatcctatgcaccaaattcatcccccacacgctccaaaataaccttcaaagaagctcttgagaggcaagtcacatttgtatatgggatagaattttctttctactattggaattctacattaacctaaaacagcctttctcaatgagtcaagcacaatatgctaccattttgttcttt

SEQ ID NO: 685905 - DNA, 663 bp, Homo sapiens
ttcttaacatactatgaatggttcatatgactagcactattatcaacatgtataatctgtttgaaaagttgacttttattttcatcaggcaaaaatgttaaacaagaaaagcttttttgaaaactggggcaataaaaaataagctttataaaacagaaatgactgccaacttgcaaatcaacatctgaaacttggtttcaaataaagggaaaaaaaagactaagaaaacataacttactttgattagcgagtgtcatatagtggctaaagccagagtccactgaagccrgacagtcaaaaccaagccccagctcaacactgactagctgtgtggccttgtttctattatctttttacatctcaatttttctatctgtaaatggaaataatacaaagagcgcttatatgtagattaattaatacatgcaaagcacttagggacagttcctggttcagagtagcaccagacagatgtcaattattattatcctatgcaccaaattcatcccccacacgctccaaaataaccttcaaagaagctcttgagaggcaagtcacatttgtatatgggatagaattttctttctactattggaattctacattaacctaaaacagcctttctcaatgagtcaagcacaatatgctaccattttgttcttt

SEQ ID NO: 685906 - DNA, 602 bp, Homo sapiens
gagccctcgtgacctaaacatctctcattaggccccacctcccaacacggtcacattagaaattatgtttctaacacaacttagaaagggaggacacagtcaaaccatagcaccttcattttatatgtattttaattgttttwaaaaaaacatgtattggctctagtaccagtggaatccaaaaatgaaaatagcaaatttccttctctaagggaatccacagtgtaaagggaaacagataaatgcataagtatcatatagcacttttttgcaccctgattacccatgaatggcctcctctaagggcttagggaaaagaagacagggaagcagattatgcaaacagaaggaagggaggagagattaggatgccttcttagggaaattcacattagagctggcccttgcagagagaacacagtgctgtggacaatgggtggatatgctcacatcactctggaattcaccgcagcagccacatgaaataattacgtatgtggatccagcactttctgtatgctttagcagtgtgtaaggaacttggaggactaaagaaatatctacaaattatgccttaaagaaatgaacttaaaatttagaga

SEQ ID NO: 685907 - DNA, 583 bp, Homo sapiens
ttctttgtcataaatagcaagtagtgcacagagttcaaaggaagttcaagtgatatacacactaaggcaaaatatctcatgtkaaaatttccctgaataggtgaatacttttttcctggccatttccttaatgagcatatacttccaatgcaatagagcagtaattttattgtattatgatgacactataaaaacataaaggaattaaaagttccattgtagatttctatcccgtcagtgtcaatatacaatttacataagtttttaaagctaaattataaacttaattattcatatcattttaagacactgtttggaatttgaaactgtgatacatagtttaaaataaattagccatttcctatttgaaaaataaaatcctcaatctgttaagagaacacatcatgatactgatgagaatcacttgttttgaaatgcttatttggtcagcacaccagaccattagtccaaaagcacaggactaagtcttgtctattctgtggcccatgccatacatacttagtcacccagtcctctacctggtagaaggcttcaatcactacactggagctgaagagaaaca

SEQ ID NO: 685908 - DNA, 583 bp, Homo sapiens
ttctttgtcataaatagcaagtagtgcacagagttcaaaggaagttcaagtgatatacacactaaggcaaaatatctcatgttaaaatttccctgaataggtgaatacttttttcctggccatttccttaatgagcatatacttccaatgcaatagagcagtaattttattgtattatgatgacactataaaaacataaaggaattaaaagttccattgtagatttctatcccgtcagtgtcaatatacaatttacataagtttttaaagctaaattataaacttaattattcatatcattttaagacactgtttggaatttgaaastgtgatacatagtttaaaataaattagccatttcctatttgaaaaataaaatcctcaatctgttaagagaacacatcatgatactgatgagaatcacttgttttgaaatgcttatttggtcagcacaccagaccattagtccaaaagcacaggactaagtcttgtctattctgtggcccatgccatacatacttagtcacccagtcctctacctggtagaaggcttcaatcactacactggagctgaagagaaaca

SEQ ID NO: 685909 - DNA, 665 bp, Homo sapiens
ggtccagggtagggcctgggaatttgcacttataaagagttctcagrtgctgctggtgctgctagtccagagactacattactcttctctactaactgtaaattgcagaactctagacaaaaacttggtttggtctgggataagaagcatacaggttatggagctaatctgaaagattcaacccttgagcccagcctagtgtggaattcaggtaacaagcagtacacagtgacataacacaattcttggttttcatgattgcaagtcacaggcaagtatcaagtgagaaattcagtttcatttgcaaggcttagagaggccaggtgattctagaaaaatgagccttgtatttgttttaaaccagtaaagagctttgagtgcttattaaattgaaagctctttaaatttattttgtattttattttattttatttcttttgagatggagtttcgctctgtcacccaggctggactgcagtggtgtgagcttggctcactgcaaactccgtctcccgggttcaagtgattctactgcctcagcctcctgaatagctgggattacaggcacccactacctcacctggctagtttttgtattattagtagagatggggtttcaccatgttggccaggctggtctcgaactcctgacttcaggtgatcca

SEQ ID NO: 685910 - DNA, 665 bp, Homo sapiens
ggtccagggtagggcctgggaatttgcacttataaagagttctcaggtgctgctggtgctgctagtccagagactacattactcttctctactaactgtaaattgcagaactctagacaaaaacttggtttggtctgggataagaagcatacaggttatggagctaatctgaaagattcaacccttgagcccagcctagtgtggaattcaggtaacaagcagtacacagtgacataacacaattcttggttttcatgattgcaagtcacaggcaagtatcaagtgagaaattcagtttcatttgcaaggcttagagaggccaggtgattctagaaaaatgagccttgtatttgttttaaaccrgtaaagagctttgagtgcttattaaattgaaagctctttaaatttattttgtattttattttattttatttcttttgagatggagtttcgctctgtcacccaggctggactgcagtggtgtgagcttggctcactgcaaactccgtctcccgggttcaagtgattctactgcctcagcctcctgaatagctgggattacaggcacccactacctcacctggctagtttttgtattattagtagagatggggtttcaccatgttggccaggctggtctcgaactcctgacttcaggtgatcca

SEQ ID NO: 685911 - DNA, 2010 bp, Homo sapiens
aaatattatttgcattggtaataaatattagtcgtaacttgaacatttatttcttcttttttagagatggagtctcactacatggctcaggctggtctcaaacttctggcctcgtgcgattctcctgcctcagcctttcagagtgctgggatatgagcgtgagccactgtgctcagccaatattataacaaactaaactaaacactctgttagtctccattgctcagccaataacttgaatatttctttttccatttctaggctttttcttcctttcattatcattcctttaaatcatttgggctgaattaagaaatgccaagaaaccagtgtattagttttatagggctgccatgccacaaacttagtggcttaaacaataacaattttaataccttacagctctgtagatcacgaggccgacacaggctcagctggactagaagcaaaacaccaacagtgctgtgtttcccctggaagctctacgggaaaattcatgtacttgtcttttcagcttctagaggctgaccccgttccttggctgctgggcgccttcatctagtatctgagagtcctgtatgtcacacatctcatcactatgatactgacttcttacgatttgactgtgaatgctctgtacggttacattaggcacatacaattaatcgaggatagactctacattctaccatcagttgatacacaggcattattgccatttacaccctgaattccacttgatcatgtaactgaacatattcatagtttctaggattagaatatggacatctttggggaggaggcattattctgtccaccacagccagcaatcatattatcagcctgtgaaatctcgtgtctaactgggtcattacagtaccaattatgtgataaaagtgataaattcctctttgcctacaaatgctgaagaacagggtaaagatcatgggttttctatgcacaagttgaagcagacaatgccaaaagtattttatatatcattaaatctttaggaaattttgacctcgagaaatttatttcattttatttttgttttattttttgagacggagtcttgctctgtccccaggctggagtgcagtggcacgatctcggctccctgcaagttccgcctcctgggttcacgccattctcctgcctcagcctcccgagtagctgggactacaggcgccgccaccacgcccggctaattttttgtatttttagtagagagggggtttcaccgcgttagccaggatggtctcagtctcctgacctcgtgatccacccgcctcggcctcccaaagtgctgggatgacaggtgtgagccaccgcgccagccggcctcgggaaatttttagcactgggaacaaaactgaaagagtggattttcacatggcctttaaggaaataagcgtccatttggtgtgaatacttgatgtgggtaaagacctcctcatcctttcaaacaagaagcagccaagtgtcaagatttatcagcttctatgacagctgtatttgtggatggcatcaaacactccctgaaagttttgctaatatactagatcttaaagttcartcatgaagaattttaatgtgtcatcaaatatttgttatatgttatcatcctctaggtcaaccatagcaaaaaagcaaaaaacctaaactcagaatgaaatggaataagtttgacaaatttggtaatctcttcaatattcttatttacatatttacattttttggcattgtgatatttagctcttgcagtttggcttttctgattgggaattggaaggtgggatcaaaatgcagcaatacaactgaagaacaaattcttaccttctaggtgaggacacagaatacactggagcattggtggatttgttatttagtctgttactgcagaagaccaaaccataacactagagccagattatcatgaaaatcaagaaaaagctaaaatatgtttaaggaaaattccatttatttgctaatggctggactgactta

SEQ ID NO: 685912 - DNA, 2010 bp, Homo sapiens
aaatattatttgcattggtaataaatattagtcgtaacttgaacatttatttcttcttttttagagatggagtctcactacatggctcaggctggtctcaaacttctggcctcgtgcgattctcctgcctcagcctttcagagtgctgggatatgagcgtgagccactgtgctcagccaatattataacaaactaaactaaacactctgttagtctccattgctcagccaataacttgaatatttctttttccatttctaggctttttcttcctttcattatcattcctttaaatcatttgggctgaattaagaaatgccaagaaaccagtgtattagttttatagggctgccatgccacaaacttagtggcttaaacaataacaattttaataccttacagctctgtagatcacgaggccgacacaggctcagctggactagaagcaaaacaccaacagtgctgtgtttcccctggaagctctacgggaaaattcatgtacttgtcttttcagcttctagaggctgaccccgttccttggctgctgggcgccttcatctagtatctgagagtcctgtatgtcacacatctcatcactatgatactgacttcttacgatttgactgtgaatgctctgtacggttacattaggcacatacaattaatcgaggatagactctacattctaccatcagttgatacacaggcattattgccatttacaccctgaattccacttgatcatgtaactgaacatattcatagtttctaggattagaatatggacatctttggggaggaggcattattctgtccaccacagccagcaatcatattatcagcctgtgaaatctcgtgtctaactgggtcattacagtaccaattatgtgataaaagtgataaattcctctttgcctacaaatgctgaagaacagggtaaagatcatgggttttctatgcacaagttgaagcagacaatgccaaaagtattttatatatcattaaatctttaggaaattttgacctcgagaaatttatttcattttatttttgttttattttttgagacggagtcttgctctgtccccaggctggagtgcagtggcacgatctcggctccctgcaagttccgcctcctgggttcacgccattctcctgcctcagcctcccgagtagctgggactacaggcgccgccaccacgcccggctaattttttgtatttttagtagagagggggtttcaccgcgttagccaggatggtctcagtctcctgacctcgtgatccacccgcctcggcctcccaaagtgctgggatgacaggtgtgagccaccgcgccagccggcctcgggaaatttttagcactgggaacaaaactgaaagagtggattttcacatggcctttaaggaaataagcgtccatttggtgtgaatacttgatgtgggtaaagacctcctcatcctttcaaacaagaagcagccaagtgtcaagatttatcagcttctatgacagctgtatttgtggatggcatcaaacactccctgaaagttttgctaatatactagatcttaaagttcaatcatgaagaattttaatgtgtcatcaaatatttgttatatgttatcatcctctaggtcaacmatagcaaaaaagcaaaaaacctaaactcagaatgaaatggaataagtttgacaaatttggtaatctcttcaatattcttatttacatatttacattttttggcattgtgatatttagctcttgcagtttggcttttctgattgggaattggaaggtgggatcaaaatgcagcaatacaactgaagaacaaattcttaccttctaggtgaggacacagaatacactggagcattggtggatttgttatttagtctgttactgcagaagaccaaaccataacactagagccagattatcatgaaaatcaagaaaaagctaaaatatgtttaaggaaaattccatttatttgctaatggctggactgactta

SEQ ID NO: 685913 - DNA, 2010 bp, Homo sapiens
aaatattatttgcattggtaataaatattagtcgtaacttgaacatttatttcttcttttttagagatggagtctcactacatggctcaggctggtctcaaacttctggcctcgtgcgattctcctgcctcagcctttcagagtgctgggatatgagcgtgagccactgtgctcagccaatattataacaaactaaactaaacactctgttagtctccattgctcagccaataacttgaatatttctttttccatttctaggctttttcttcctttcattatcattcctttaaatcatttgggctgaattaagaaatgccaagaaaccagtgtattagttttatagggctgccatgccacaaacttagtggcttaaacaataacaattttaataccttacagctctgtagatcacgaggccgacacaggctcagctggactagaagcaaaacaccaacagtgctgtgtttcccctggaagctctacgggaaaattcatgtacttgtcttttcagcttctagaggctgaccccgttccttggctgctgggcgccttcatctagtatctgagagtcctgtatgtcacacatctcatcactatgatactgacttcttacgatttgactgtgaatgctctgtacggttacattaggcacatacaattaatcgaggatagactctacattctaccatcagttgatacacaggcattattgccatttacaccctgaattccacttgatcatgtaactgaacatattcatagtttctaggattagaatatggacatctttggggaggaggcattattctgtccaccacagccagcaatcatattatcagcctgtgaaatctcgtgtctaactgggtcattacagtaccaattatgtgataaaagtgataaattcctctttgcctacaaatgctgaagaacagggtaaagatcatgggttttctatgcacaagttgaagcagacaatgccaaaagtattttatatatcattaaatctttaggaaattttgacctcgagaaatttatttcattttatttttgttttattttttgagacggagtcttgctctgtccccaggctggagtgcagtggcacgatctcggctccctgcaagttccgcctcctgggttcacgccattctcctgcctcagcctcccgagtagctgggactacaggcgccgccaccacgcccggctaattttttgtatttttagtagagagggggtttcaccgcgttagccaggatggtctcagtctcctgacctcgtgatccacccgcctcggcctcccaaagtgctgggatgacaggtgtgagccaccgcgccagccggcctcgggaaatttttagcactgggaacaaaactgaaagagtggattttcacatggcctttaaggaaataagcgtccatttggtgtgaatacttgatgtgggtaaagacctcctcatcctttcaaacaagaagcagccaagtgtcaagatttatcagcttctatgacagctgtatttgtggatggcatcaaacactccctgaaagttttgctaatatactagatcttaaagttcaatcatgaagaattttaatgtgtcatcaaatatttgttatatgttatcatcctctaggtcaaccatagcaaaaaagcaaaaaacctaaactcagaatgaaatrgaataagtttgacaaatttggtaatctcttcaatattcttatttacatatttacattttttggcattgtgatatttagctcttgcagtttggcttttctgattgggaattggaaggtgggatcaaaatgcagcaatacaactgaagaacaaattcttaccttctaggtgaggacacagaatacactggagcattggtggatttgttatttagtctgttactgcagaagaccaaaccataacactagagccagattatcatgaaaatcaagaaaaagctaaaatatgtttaaggaaaattccatttatttgctaatggctggactgactta

SEQ ID NO: 685914 - DNA, 2010 bp, Homo sapiens
aaatattatttgcattggtaataaatattagtcgtaacttgaacatttatttcttcttttttagagatggagtctcactacatggctcaggctggtctcaaacttctggcctcgtgcgattctcctgcctcagcctttcagagtgctgggatatgagcgtgagccactgtgctcagccaatattataacaaactaaactaaacactctgttagtctccattgctcagccaataacttgaatatttctttttccatttctaggctttttcttcctttcattatcattcctttaaatcatttgggctgaattaagaaatgccaagaaaccagtgtattagttttatagggctgccatgccacaaacttagtggcttaaacaataacaattttaataccttacagctctgtagatcacgaggccgacacaggctcagctggactagaagcaaaacaccaacagtgctgtgtttcccctggaagctctacgggaaaattcatgtacttgtcttttcagcttctagaggctgaccccgttccttggctgctgggcgccttcatctagtatctgagagtcctgtatgtcacacatctcatcactatgatactgacttcttacgatttgactgtgaatgctctgtacggttacattaggcacatacaattaatcgaggatagactctacattctaccatcagttgatacacaggcattattgccatttacaccctgaattccacttgatcatgtaactgaacatattcatagtttctaggattagaatatggacatctttggggaggaggcattattctgtccaccacagccagcaatcatattatcagcctgtgaaatctcgtgtctaactgggtcattacagtaccaattatgtgataaaagtgataaattcctctttgcctacaaatgctgaagaacagggtaaagatcatgggttttctatgcacaagttgaagcagacaatgccaaaagtattttatatatcattaaatctttaggaaattttgacctcgagaaatttatttcattttatttttgttttattttttgagacggagtcttgctctgtccccaggctggagtgcagtggcacgatctcggctccctgcaagttccgcctcctgggttcacgccattctcctgcctcagcctcccgagtagctgggactacaggcgccgccaccacgcccggctaattttttgtatttttagtagagagggggtttcaccgcgttagccaggatggtctcagtctcctgacctcgtgatccacccgcctcggcctcccaaagtgctgggatgacaggtgtgagccaccgcgccagccggcctcgggaaatttttagcactgggaacaaaactgaaagagtggattttcacatggcctttaaggaaataagcgtccatttggtgtgaatacttgatgtgggtaaagacctcctcatcctttcaaacaagaagcagccaagtgtcaagatttatcagcttctatgacagctgtatttgtggatggcatcaaacactccctgaaagttttgctaatatactagatcttaaagttcaatcatgaagaattttaatgtgtcatcaaatatttgttatatgttatcatcctctaggtcaaccatagcaaaaaagcaaaaaacctaaactcagaatgaaatggaataagtttgacaaatttggtaatctcttcaayattcttatttacatatttacattttttggcattgtgatatttagctcttgcagtttggcttttctgattgggaattggaaggtgggatcaaaatgcagcaatacaactgaagaacaaattcttaccttctaggtgaggacacagaatacactggagcattggtggatttgttatttagtctgttactgcagaagaccaaaccataacactagagccagattatcatgaaaatcaagaaaaagctaaaatatgtttaaggaaaattccatttatttgctaatggctggactgactta

SEQ ID NO: 685915 - DNA, 2010 bp, Homo sapiens
aaatattatttgcattggtaataaatattagtcgtaacttgaacatttatttcttcttttttagagatggagtctcactacatggctcaggctggtctcaaacttctggcctcgtgcgattctcctgcctcagcctttcagagtgctgggatatgagcgtgagccactgtgctcagccaatattataacaaactaaactaaacactctgttagtctccattgctcagccaataacttgaatatttctttttccatttctaggctttttcttcctttcattatcattcctttaaatcatttgggctgaattaagaaatgccaagaaaccagtgtattagttttatagggctgccatgccacaaacttagtggcttaaacaataacaattttaataccttacagctctgtagatcacgaggccgacacaggctcagctggactagaagcaaaacaccaacagtgctgtgtttcccctggaagctctacgggaaaattcatgtacttgtcttttcagcttctagaggctgaccccgttccttggctgctgggcgccttcatctagtatctgagagtcctgtatgtcacacatctcatcactatgatactgacttcttacgatttgactgtgaatgctctgtacggttacattaggcacatacaattaatcgaggatagactctacattctaccatcagttgatacacaggcattattgccatttacaccctgaattccacttgatcatgtaactgaacatattcatagtttctaggattagaatatggacatctttggggaggaggcattattctgtccaccacagccagcaatcatattatcagcctgtgaaatctcgtgtctaactgggtcattacagtaccaattatgtgataaaagtgataaattcctctttgcctacaaatgctgaagaacagggtaaagatcatgggttttctatgcacaagttgaagcagacaatgccaaaagtattttatatatcattaaatctttaggaaattttgacctcgagaaatttatttcattttatttttgttttattttttgagacggagtcttgctctgtccccaggctggagtgcagtggcacgatctcggctccctgcaagttccgcctcctgggttcacgccattctcctgcctcagcctcccgagtagctgggactacaggcgccgccaccacgcccggctaattttttgtatttttagtagagagggggtttcaccgcgttagccaggatggtctcagtctcctgacctcgtgatccacccgcctcggcctcccaaagtgctgggatgacaggtgtgagccaccgcgccagccggcctcgggaaatttttagcactgggaacaaaactgaaagagtggattttcacatggcctttaaggaaataagcgtccatttggtgtgaatacttgatgtgggtaaagacctcctcatcctttcaaacaagaagcagccaagtgtcaagatttatcagcttctatgacagctgtatttgtggatggcatcaaacactccctgaaagttttgctaatatactagatcttaaagttcaatcatgaagaattttaatgtgtcatcaaatatttgttatatgttatcatcctctaggtcaaccatagcaaaaaagcaaaaaacctaaactcagaatgaaatggaataagtttgacaaatttggtaatctcttcaatattcttatttacatatttacattttttggcattgtgatatttagctcttgcagtttggcttttctgattgggaattggaaggtgggatcaaaatgcagcaatacaactgaagaacaaattcttaccttcyaggtgaggacacagaatacactggagcattggtggatttgttatttagtctgttactgcagaagaccaaaccataacactagagccagattatcatgaaaatcaagaaaaagctaaaatatgtttaaggaaaattccatttatttgctaatggctggactgactta

SEQ ID NO: 685916 - DNA, 643 bp, Homo sapiens
tggtgaaatttgatttgagtgccacaggcaagaattaatggagagctcagtagttattaaatgagctagtttagaaaaaaaggaaacatggaaaagggcaaggaaaattcaggctggatgatcagtgtgtgaatgacagagactcaaatgctgtcctaatgcacataagctttcttcctgttttatttgaaaatcttttactttgtatgaacaaccgatattcagtaaaatacttaagaatggcatttactttttaattcacaaacgagtatatttaagtacattcctacaggagaaaacaatgttcttaataaagttgatgtgagaggtacattgaagacatgggacagtgtcatttctatgtcctattacagacttatttccccgtcctttaaaaatcttgaagccaaagtgagctcctgctaacgtttccccatccacttatattgatttggttaagtatatatrtgaaaaggagacaaacatttccaacaaacgtaaaagccctaaattttctttagttaattacatgtacagtagaactacagaatcttcaacatttgattgaaatgccctctgtcattttccaaaatagtttaataatctatttggtatgatttccttttatctcagttttgctttg

SEQ ID NO: 685917 - DNA, 599 bp, Homo sapiens
aaataaattatacttgaaaaaatatcacttttcccttaaacatcaaattctattttagagtactttcacactgtattttacatttaataaggttgttaccacccaaattttcactattctttcatggaaatgtaaataatgaatagataagataaaatatattttagagaaaaggacagttgattacaccttgtccttacctaaagtattttcatttatccatctggtrtatcataaatcatcaccttgtgaaataaagatgactagacctcagcatagcaagatacatctatttttaatcagtgcaactgaatgatgctgctacgccaaactgatccaggcaggttgcttataatatgcagggcattgtcatccagctgcagttatagtgacaatctgaataggaagtggaaactcaaaagcctttcaccagatgggagattttatttattcctggcaagcagatgtcaccaacttctctttctgactaggccatgtacttattttacagagagaggcggtagttgttgtagggtatgtttattgagaatttcaatttccagttaaataaaaaaactcctcatgtaataacagctaat

SEQ ID NO: 685918 - DNA, 599 bp, Homo sapiens
aaataaattatacttgaaaaaatatcacttttcccttaaacatcaaattctattttagagtactttcacactgtattttacatttaataaggttgttaccacccaaattttcactattctttcatggaaatgtaaataatgaatagataagataaaatatattttagagaaaaggacagttgattacaccttgtccttacctaaagtattttcatttatccatctggtatatyataaatcatcaccttgtgaaataaagatgactagacctcagcatagcaagatacatctatttttaatcagtgcaactgaatgatgctgctacgccaaactgatccaggcaggttgcttataatatgcagggcattgtcatccagctgcagttatagtgacaatctgaataggaagtggaaactcaaaagcctttcaccagatgggagattttatttattcctggcaagcagatgtcaccaacttctctttctgactaggccatgtacttattttacagagagaggcggtagttgttgtagggtatgtttattgagaatttcaatttccagttaaataaaaaaactcctcatgtaataacagctaat

SEQ ID NO: 685919 - DNA, 599 bp, Homo sapiens
aaataaattatacttgaaaaaatatcacttttcccttaaacatcaaattctattttagagtactttcacactgtattttacatttaataaggttgttaccacccaaattttcactattctttcatggaaatgtaaataatgaatagataagataaaatatattttagagaaaaggacagttgattacaccttgtccttacctaaagtattttcatttatccatctggtatatcrtaaatcatcaccttgtgaaataaagatgactagacctcagcatagcaagatacatctatttttaatcagtgcaactgaatgatgctgctacgccaaactgatccaggcaggttgcttataatatgcagggcattgtcatccagctgcagttatagtgacaatctgaataggaagtggaaactcaaaagcctttcaccagatgggagattttatttattcctggcaagcagatgtcaccaacttctctttctgactaggccatgtacttattttacagagagaggcggtagttgttgtagggtatgtttattgagaatttcaatttccagttaaataaaaaaactcctcatgtaataacagctaat

SEQ ID NO: 685920 - DNA, 599 bp, Homo sapiens
aaataaattatacttgaaaaaatatcacttttcccttaaacatcaaattctattttagagtactttcacactgtattttacatttaataaggttgttaccacccaaattttcactattctttcatggaaatgtaaataatgaatagataagataaaatatattttagagaaaaggacagttgattacaccttgtccttacctaaagtattttcatttatccatctggtatatcataaatcatcaccttgtgaaataaagatgactagacctcagcatagcaagatacatctatttttaatcagtgcaactgaatgatgctgytacgccaaactgatccaggcaggttgcttataatatgcagggcattgtcatccagctgcagttatagtgacaatctgaataggaagtggaaactcaaaagcctttcaccagatgggagattttatttattcctggcaagcagatgtcaccaacttctctttctgactaggccatgtacttattttacagagagaggcggtagttgttgtagggtatgtttattgagaatttcaatttccagttaaataaaaaaactcctcatgtaataacagctaat

SEQ ID NO: 685921 - DNA, 1907 bp, Homo sapiens
gcattgactgaacattgacaaagtacagtgctgttaggatcattcacagcaaacacatcagtgattttctagataaaatgccaacaatgtagctaatcttttcagttaaacaatgcttttagaagtgccttaagagctaaatgaatatctaaaaattctttcaaatgctataaggccattagtagattaacacatttgtcaacaatttaattaaatatttttaagtcatctcaaagtcacatagtggtagagttttttgttttcaaagcatcacacttgttattgatatgctatataacagataatacattcagaatttttctttgtttattaacaagcccttgtaattaacttgcttttaaatcataagtatgatactattttaatttccctcacattcactaccctatcatttgaaatcacattaagctgactcttagaaggccacctggtgtaatactatgacattgaagtgagctgttctagtatgcaggaaatattgacagtcttccatgctgaaatccatttctctaactgatgacagaactaggggaaattaatttttgctattcataaatacctgacaggtttaatgtaaatgttttgaaaaagacctcagcatatgctgcacatacattatatatgcggcactgcactggaacattgtatttgaaacccatttaatttctagatcactactgctgaaagtgttgaaatttctcaaattactcacagattgcaattttctccatatacatgtaaataacaacagaagtccacatgaaaccttttagttactggaaaaatcagcaatttgacacttaggacaaatttctttgatagaaatactatgaaaatgcaggtaaatctgacaaatcactgagtgttagcccagctggtctcctgtggtcagagctgaagaatgtgttccaaggagactgtgctggtttttaaggtacagaagggctgctgcagaatggctgccacctcagaagcaaccctagcccaaagtacatgactccagatttcttgtataaaggtgaacatgtattcattccttagagtatcatagactgtcttagataaccacactaacacatttatttcagtgtatatgcataaataaacccctgtgaaagttcaacccactttacatggtaggtatactcctgaacattcatgtgtaactacacagggaagcttttcattttcataaattctagggggaaataatttataataaaaccacctttaagtgatacaatttttaaattttatggtgattttcaagtttgagtatcagtagaataataactgtatttgattgaaacacatgaaataggttaaaaaatctakgagttcataatgatattaaagaaacaaaccaaacaaaacctgattggtctcctttggaggatgctagtgaaccaattcattattctgaaaactagcggttaaagggaaagaaatcaagcatttaatctgccttttctatacaaactatacctcaggttattgataagtttctctttatagaaatagtccaactaataaatgaagaaagataaacacattagaatatcaccactttgcaaacccctaacgaaataatggccactaacatcataaaatagacaaacagaaacttagtagaaattaaaatgcagtgtaccatcaatgaagtattcttaccaaaacaaaacagaacaaaaaaacaccctggaatcagatcaaacttcttaagtaacctgccagttcacaggagaaaaatgcattaaataccacagagatgcaataagcaaatcctgtgtgcaagaaacaagatgaatagtccagtttcttcaacaaagaagaagcaagggagaagaagcaaacaagggagggaagctatagattgaaagagacaa

SEQ ID NO: 685922 - DNA, 1384 bp, Homo sapiens
cactttgtgcgtcggtttccttgtccacataaaaggaacaatgatgcacctaccaaatagagttctagtgagaagtagaaatagtttctgtaaagcgtcgatcacagtgcctggcactagtagtcacacaataagggttgttgctattcaatttatgtgcttaatacttgatttatttcgcaaacatttgcgaagctcttgctatggccaggcaaattgctcgagttacacaggcagagtggacaaacctctgccctcaatgcatttaggctctagtcctggcatcctctgacctcctcttgccatccccacctctcgccccaaatacacacataggcacgacatggcaatatgaagtggaaaacaaagaagtgaattttggaagggacaaatgcaaaaggggcctggggccagatttcttctcttcctctaggttgttacatgggatcaggtagtccttccttaaggaatttctccctctaagtccaagggttggcaaaattctctagttagaccctggacaggagaagtcaaatctcagaggtctctcaggagagaagcgaatctttagttgcagcttctgcctgactcccatggtctgaaggagtctggggagacgggagaggtcagagttcagattcattgctctgcttctctggagtggagatgagggaagctgaagtcttacaaagtgttaagaaggggcacagataattaattatatgtccacacatgtgttgttattctaattgtaaaatctccagtagtcattccacacacaacacagcaaagcctttaaggacaagcctaagaaggattaatttacaaagactcaacaactggaaacctctaaaatcattgtaaaggaagaaatgatactcaaaatcacagagtttaagagctggagagaccctcgacggtcatctaacgcagattctcaaatgccaatccatgacgaaatttccactggtccatgatgaaaacaattaacaattttttgtctttccgtgcaatacattttattcattttaaatgatttatcttttattctaatattatggtcatcctagttttttggtgctgaaatattccttgtattacagaatgaagatagtatctagatggtagtttgtttttagtttttattttttgtacgtggatttttaaaaatctctacctttaaaaacaaaaagttggcaattctrtgtcatctccaagttttttgaaattttattgtttgctgaaattcataatctagaaacgactcatcaaactcaaccaccacgtataatatactaacccttatctcgtcttccctgaaaattcttgccgtgacacttgaggctgctccatttaccctgagataactttgccacgaaatatc

SEQ ID NO: 685923 - DNA, 1277 bp, Homo sapiens
tttttcaaattagaatatttctgggtgtgctggctcatgccagtaatccaagcactttgggaggctgagacaggagaatcacttgagcaaaggatttgagaccagcctggacaacatagtgaaatcccatctccacaaaaaacaaaaatattgactgggcaaagtggtgcacacctatagtcccaactactcatgagattgaggtgagagcactgctagagcccaggagttcaaggctacagtgagatatcatcacatcactgcactcaagcagcctgggcaacagaaccagaccctgtcttcaaagcaaaaccgatcacacaacaacaaattaggatatggacagttagtattcaagtgcaaaaaaaaaaatcatctgtgtagtagctgcaaatccttatctaaataaaatatagcctatctttagtttttttctgaacctgactaggctccaacaattagtgatgatgatgaaaaagtacatatagatgtaacatgtgctatatttgactttatttcagcaaataaaatatttagcaagtagtttatcctggtacaccagagaataataagatgataatagaattaacagtgctctgtttatttagtcaagagcattagaaagaatctggcctaaaggcctaaatttataatatattttctcaatctcaagcatataggttagtgcttgyattttgaaggaataataaagcttaaagtgaacagtggtttgctttattagtaaaatgctgttttatcctcagaactaaaaccaaaagccaattgacttttttaaacatttcaatcagtatatttaaaatgcagaaacatttaaagctgattaatgcaatttaaattagtggaaggaacaggtaatgtgtaaatttgccggatgagtctctgggagttaatccaatttagcagttacggagaaggggccgttttaatagcgggcctttaaatgcgtcacgaccaaattaccagttgctctgagaagaggatgatgaagagggatactagactgttatgttaaaaaatagaaagactccccccaagattcaagaagcagctttgttcactaaaattcacacaggtagacagcatcaagtaacatttttaagcagtaacagtaacaacaacaaaaaatggttgaaacaatgataaagtgtttccagatgaggaagtttggaaacatgaaagttggtaggcttttttttttttttttttttttttttgagatggggtctcaatctattgcccaggctggagtgcagtgg

SEQ ID NO: 685924 - DNA, 1277 bp, Homo sapiens
tttttcaaattagaatatttctgggtgtgctggctcatgccagtaatccaagcactttgggaggctgagacaggagaatcacttgagcaaaggatttgagaccagcctggacaacatagtgaaatcccatctccacaaaaaacaaaaatattgactgggcaaagtggtgcacacctatagtcccaactactcatgagattgaggtgagagcactgctagagcccaggagttcaaggctacagtgagatatcatcacatcactgcactcaagcagcctgggcaacagaaccagaccctgtcttcaaagcaaaaccgatcacacaacaacaaattaggatatggacagttagtattcaagtgcaaaaaaaaaaatcatctgtgtagtagctgcaaatccttatctaaataaaatatagcctatctttagtttttttctgaacctgactaggctccaacaattagtgatgatgatgaaaaagtacatatagatgtaacatgtgctatatttgactttatttcagcaaataaaatatttagcaagtagtttatcctggtacaccagagaataataagatgataatagaattaacagtgctctgtttatttagtcaagagcattagaaagaatctggcctaaaggcctaaatttataatatattttctcaatctcaagcatataggttagtgcttgtattttgaaggaataataaagcttaaagtgaacagtggtttgctttattagtaaaatgctgttttatcctcagaactaaaaccaaaagccaattgacttttttaaacatttcaatcagtatatttaaaatgcagaaacatttaaagctgattaatgcaatttaaattagtggaaggaacaggtaatgtgtaaatttgccggatgagtctctgggagttaatccaatttagcagttacggagaaggggccgttwtaatagcgggcctttaaatgcgtcacgaccaaattaccagttgctctgagaagaggatgatgaagagggatactagactgttatgttaaaaaatagaaagactccccccaagattcaagaagcagctttgttcactaaaattcacacaggtagacagcatcaagtaacatttttaagcagtaacagtaacaacaacaaaaaatggttgaaacaatgataaagtgtttccagatgaggaagtttggaaacatgaaagttggtaggcttttttttttttttttttttttttttgagatggggtctcaatctattgcccaggctggagtgcagtgg

SEQ ID NO: 685925 - DNA, 1277 bp, Homo sapiens
tttttcaaattagaatatttctgggtgtgctggctcatgccagtaatccaagcactttgggaggctgagacaggagaatcacttgagcaaaggatttgagaccagcctggacaacatagtgaaatcccatctccacaaaaaacaaaaatattgactgggcaaagtggtgcacacctatagtcccaactactcatgagattgaggtgagagcactgctagagcccaggagttcaaggctacagtgagatatcatcacatcactgcactcaagcagcctgggcaacagaaccagaccctgtcttcaaagcaaaaccgatcacacaacaacaaattaggatatggacagttagtattcaagtgcaaaaaaaaaaatcatctgtgtagtagctgcaaatccttatctaaataaaatatagcctatctttagtttttttctgaacctgactaggctccaacaattagtgatgatgatgaaaaagtacatatagatgtaacatgtgctatatttgactttatttcagcaaataaaatatttagcaagtagtttatcctggtacaccagagaataataagatgataatagaattaacagtgctctgtttatttagtcaagagcattagaaagaatctggcctaaaggcctaaatttataatatattttctcaatctcaagcatataggttagtgcttgtattttgaaggaataataaagcttaaagtgaacagtggtttgctttattagtaaaatgctgttttatcctcagaactaaaaccaaaagccaattgacttttttaaacatttcaatcagtatatttaaaatgcagaaacatttaaagctgattaatgcaatttaaattagtggaaggaacaggtaatgtgtaaatttgccggatgagtctctgggagttaatccaatttagcagttacggagaaggggccgttttaatagcgggcctttaaatgcgtcaygaccaaattaccagttgctctgagaagaggatgatgaagagggatactagactgttatgttaaaaaatagaaagactccccccaagattcaagaagcagctttgttcactaaaattcacacaggtagacagcatcaagtaacatttttaagcagtaacagtaacaacaacaaaaaatggttgaaacaatgataaagtgtttccagatgaggaagtttggaaacatgaaagttggtaggcttttttttttttttttttttttttttgagatggggtctcaatctattgcccaggctggagtgcagtgg

SEQ ID NO: 685926 - DNA, 2200 bp, Homo sapiens
gactaggagtaaagaagaatggatttcatttatccagatggaagtgtgttactataatccagaaaatagacractgtattaggatagtgaagtgagggtgaaaaggtgtttaaataaaggttgaaataaatgtacttacagattcaatagaagtaggaggcaacacaaatgactctcagatttcaagtttgagcaaatgcgtaatgagtattgccattttatgagtatacagaactaaaagagaagatgctgggaaatatataatgtatatattttagacattccaaatttgagattcttgcagatattcaggtgaaaatatacattattatgtagctaaaaatatcataactcaaaaaaagaagactggaaaaatagatcaaatgttgcatacctatagattaattaaaactgttgaacatatgagatcactttgtatggatgaagaagagacctgagacaaaattctgtaaattgcctacattctgaagaagtcagcagaaaagactgagaagaaccagccaaagatagaaagggcaaacttagaaagggtggtgtcttggaagatatgaaaagggagtcattctaaaaaggaagtcatttaaagatttcatagtatttgcttgaaacttagaagtttcaagtttattagattatctaatggcgagctcagaatgagcaaccttagtaaagtgtttgggtatagaccagaaaacagctgggaatagagtacgaagtaaaaaatatatatataagcagttgtgaacaatttattcctggaaatttgttattgaatgaaaaaaatggaaaaagaagttaaaagtgacagaacacaaaggagagtattttaaagtgatcaagacatgagaattttaagtgctggtaaaatataatcagtagagaggaaatattatgaggtgaagtttgaagaaatatgagttacggcaaaattccctgagaatgtggatgggaataaaatcaagaacaggttttgatagtaaaacaatatcatttcaaaaaatatttaggggccaggtacagtggctcatgcctgtagcttcagcactttgggaggccaaggcaggcagatcacctgaggtcaggagttcaagaccaacccggttaacatggtgaaacttcgtctctactaaaaatactaaaattagtcgggtgcagtggcacatgcctgtaatcccagctacatgggaggctgaggcaggcagatcacctgaggtcaggagttcaagaccaacccggttaacatggtgaaacttcgtctctactaaaaataccaaaattaatcgggcgcagtggcacatgcctgtaatcccagctacatgggaggctgaggcaggagaatcacttgagtccaggaggcagaggttgcagccagagcaatcaggtaagagaaagaaagaaaggacatccaagtcggtatagaggaagtcaaactgtcactgaattttcttttcttatccgatttgtttcacttagaatgccttcacaataactgtcttattcctttgaggttcaagtactatcatatacctaaagtcgcccttaagctgcgtatatatatatatatatatatatatatatatatatatatatacacatatatatacacacacacacacacatatgcagcatatatataatacatgtatattatatatatattaacatatatatggagagaatatatatagttgataaatatatacatatatatgctttttaaaattctctcttttgttctatctctcatctgtttgacacttagcagaccccacctggtgctctgtgtagtatagatacaaataaaacataaataagagacacttagccgaccccacctggtgctttgtttagtatagatacaaataaaatataaataagacatttagattcaggcagatattctttggtggtgactaaacttggcattgtgtctagttgtttcagtgctctaaatttagttttgagatctgcaaaataaagactatacatattgtttcaatattcaaatgaagtatcatatgaaataccgaataaatgctagttccttcctagagaaatttggagagcagaaatcggtaaaagcaaacagtatagtatttgtatctattatatatatttaatatacaatattccattgtgtttgtaaatatagaaaatatgtattttttgattttatgta

SEQ ID NO: 685927 - DNA, 1457 bp, Homo sapiens
tgtatatgtatccagatatattgtgcgtatatatgcatatttatctgtgtgtgtgtgtgtgtgtgtgtgtgtgtgtgtgtgtgtgtgtgtgtgtgtttatataaaaccatgcaatgccaagtacaagccatttggcatttggatctgggttcacattgaaaatcaaacttaatggacacaataggctttaaacaccaccaggtttacttagctttaagaaataatacaaaaaaaaaacacacaatccacaacaatattagtacataaaactcctgttttttaagttcagctcccaataccccagttctcccaattttatacttgggccaggaatgataaagagagaaagttaagtgtgcgtaggtacctcaaccctgtgaagttaagtctgggactttatcatgtttcttacccagctaaccatgtggctcactcagatayatgtgactggcactattctccagatcagcagcttctcattaatgcctgttcttaattactctataaaaaccttgaatattaattataggtacatggttcagtgcatagctctggctggattttcagttatttggtatcaggtatgagtaagctcctaacaatttcttgaaatcatgatcatatgagtttcctagggctgctgtagcatataccgtgaattgaatggcttaaagcaatgtgaatttatcatctccatactacagtccaaaatgtagaaatcaggtgtcagcaaggtttgtttcttttgaagacattgagggagaatctgtttcatgcctctctctagtttctggctttttggcaattcatggtgacccttggcttgtagacttatcactccaatctgtgtctgtcttcacttggctttctgtttctgtttcttctccactacttacataaattcttataactaattggatttaggggccacattaaatccaggatgatgttgtctcaagatctttaattatagctataaagattcttttccaaataaggccccattttgaggttcagggtgaacatgaatttggctgagggggttaattattcaactcatcacaatcatgcaatgagaatggccaaaggtcaatccaatgtccttaagtctagagggaagattaataacactttttaaatatgtttcttttaaattatcttatttttaaggaagtcttgagaccacctgaaattgataggcaataagaccagtaggttagagtgaagtaatatggtaactagaaacattccatgtgcagagaaagaaatttttgtcattatgctcagttccattttcccatcagaaaatgaaaattaagagtaccagtaattaaacaaaaattccttaataatttttacaaaacaaggtgggatcaaaaatcgatgcctatttactactgagaactactgttttacacaatttttagtttttcatagaaaaacatcatattcctcat

SEQ ID NO: 685928 - DNA, 1457 bp, Homo sapiens
tgtatatgtatccagatatattgtgcgtatatatgcatatttatctgtgtgtgtgtgtgtgtgtgtgtgtgtgtgtgtgtgtgtgtgtgtgtgtgtttatataaaaccatgcaatgccaagtacaagccatttggcatttggatctgggttcacattgaaaatcaaacttaatggacacaataggctttaaacaccaccaggtttacttagctttaagaaataatacaaaaaaaaaacacacaatccacaacaatattagtacataaaactcctgttttttaagttcagctcccaataccccagttctcccaattttatacttgggccaggaatgataaagagagaaagttaagtgtgcgtaggtacctcaaccctgtgaagttaagtctgggactttatcatgtttcttacccagctaaccatgtggctcactcagatacatgtgactggcactattctccagatcagcagcttctcattaatgcctgttcttaattactctataaaaaccttgaatattaattataggtacatggttcagtgcatagctctggctggattttcagttatttggtatcaggtatgagtaagctcctaacaatttcttgaaatcatgatcatatgagtttcctagggctgctgtagcatataccgtgaattgaatggcttaaagcaatgtgaatttatcatctccatactacagtccaaaatgtagaaatcaggtgtcagcaaggtttgtttcttttgaagacattgagggagaatctgtttcaygcctctctctagtttctggctttttggcaattcatggtgacccttggcttgtagacttatcactccaatctgtgtctgtcttcacttggctttctgtttctgtttcttctccactacttacataaattcttataactaattggatttaggggccacattaaatccaggatgatgttgtctcaagatctttaattatagctataaagattcttttccaaataaggccccattttgaggttcagggtgaacatgaatttggctgagggggttaattattcaactcatcacaatcatgcaatgagaatggccaaaggtcaatccaatgtccttaagtctagagggaagattaataacactttttaaatatgtttcttttaaattatcttatttttaaggaagtcttgagaccacctgaaattgataggcaataagaccagtaggttagagtgaagtaatatggtaactagaaacattccatgtgcagagaaagaaatttttgtcattatgctcagttccattttcccatcagaaaatgaaaattaagagtaccagtaattaaacaaaaattccttaataatttttacaaaacaaggtgggatcaaaaatcgatgcctatttactactgagaactactgttttacacaatttttagtttttcatagaaaaacatcatattcctcat

SEQ ID NO: 685929 - DNA, 1710 bp, Homo sapiens
tctccaagttgtatatggatagwtgatcatccagcaagagtatgtcactcttaagtctctacttacctcatcaggactgacaacaaagaacttaaagataagcatcaatctgtagaccacattttgagtaacttcattctgtaatgcgaagtgactttctcaaagacgcttccaaccagctatcggcagaatctgaatattctgttccttggaaatctccttccctccctgcgcttcagaggtgcttcatcagtttatggataccaaaattgaaaaggagctcataagactgtgaagacaacttatttctagctttatgataaagattagaaaatcaagccttgaaagcgaagtgcttttcctgtgttcacactactagttaatggtggagagggtgacaaagaccatagcacaaggcttccataatggagatccccagtacctttcatgtctgactcttcagttgtcaataactcctgactctttaacctccagtttctttggtatctgaataagatgtgaagctctggaaatataattttttaaacctttcttgaaagaaaggcatgtctctttgaagagagaacactgggagcagtcttttcttcactgcacttcacacgcaagaagattcagatgcaaaatgtttatttagatgctagacctgtatcatcgtgatgtatgtgatctctagatgatcctttatctgataaataaggcaaaacaatactagctctttggaagagtcaacttttagaattaaaatgatattttttcactgaataattgcacaattttacttgacttgttttagggcttcatttctattttttaaacacgtattattccaacctcatcctcttttactcattctcattccctgagctctaactaaactagatgttagagcttgtccctatctccatatgtcttgtccaacctgttatttttcattttgtctttttgtggatatatatataaaaatatttatatatatataaacttataaatacatatttaatataaatgttaactatatatttcatataagtattaaatatatatacttaatttaaatattaaatatatatatttaatttctaactctgtaattaataacttttcccttcagcctttctctcagttttttcctaatttgtttgtaagacaatcactaagaaagaaattgcagttaaacacatagccccatatgactgctcctactttaaatgttgattactaactttaggtagtgttttaatgatgcaaccatagtatatttagaccattaaattttcttttcctttctcagatgactattatattgttcattatctttccttaaatttctaacatgtgcttttttttccatattcttacagtgtccttgagtaagttagtagaaggacaaaatcaaaacacaaaaagatggaccttaacagaccagtgctcctcaaagctctgatgtctctcttgcaaccactactgtcactaatgcatatttctggatcttgctgtcatcactgtggtaccaaatgtacaagaaaagaaatatttttctatcaataaaatgtttagttagcaatatcactaatgcatatttctggatcttgctctcatcactgtggtaccacatgtacaagaaaagaaatatttttctataaataaaatgtttcattagcaatattccacagctatatcacaaatacc

SEQ ID NO: 685930 - DNA, 645 bp, Homo sapiens
tatwcatcaatcgctagaaaatgggcactaatttccagctgttgccatggaaatgggtggtgacttccatacgttgcgatggcattcataaactatcatagccctggtggaaatgtcctgtgctgatgagcagccagggcaactagaggttactgtcggtgccgcttgttggtggttttggcctgtcgtcacctggtcctgccaggctcctacctccctcctgctatgattattctgttctgtagacactaaaactaggtaaaagacaccagggcatttagataataaaaacaatatatattattattgtctaattctcctgaaaaaatagaattagaggtaagaaaatggacagattcaaatctaataacccatgtaagcattgaaaatgatgattaaatataaaaatattaaaataaataaaatatgttattatttaaagcaaaaattaattttaatttaatattaattgttaatactgaatgttaaaatactgaaggctgtttcacccccttagatgagtatttaaactcgggaacaattcttatctaaggaaacagttcaaggatattcactttcccaaatttgattagacactgtactggagagtctagccaagtgcaataacaatgttaattaactaaa

SEQ ID NO: 685931 - DNA, 668 bp, Homo sapiens
atgatatgtgaccttttgggttgtccttttatttagcagtttcaactgagttggatatgcttctcactacttaattggaaacaacagagtgtcaagaggctccttacctagtgttgtaaattagsctttataaaactaaaggggtttgaagtgaagatttagctttatatctaattgagattaacatttgccaagatagctgccaagaatattctgcatttagttcaataatttctgtagttacgtaatgaaggaagatctattttgctttatatgatttttaagtctattttgtagttatacatttgattttcgtgcttgtgtatgattttctttttttttcttattttacctaggacaccattttaaggctcacaaggctgttttggctgcttgtagtaagttcttctacaaattctttcaggagtttacccaagaaccattggtggagatagaaggtaaatgattcttgttgtttttttatttaataaatcaaagaagccattttatttaaatgcttgttttaaatacaatacttagcaaacaattggtgaagcagttttagacagtttatcaagacaccataggaaataggcatcagtagttcctgtaggtaaaggtagataaattgttcttttgatacctgagaagtcttactttcagtgaag

SEQ ID NO: 685932 - DNA, 1226 bp, Homo sapiens
aatggcttccataaagggagtttatttgcaggaataatcctaccaaggagaacaggatagtaggggctggaaaagggaaaacagggaagggcagaggccaattcaaaggggacataattgggctggttactattaagggycaataagggccaatgaggtccctctgaagaaccatgtagaatgcactttagaattgttcatccaggacatgggaaaggttaagtatttatccattggctctcagctcccattgagtcaagtttctcacacttccatatttgtgcatgcttgagcatggctggacagaggtagagaaagaataatagatgatagagatatggaggagctgaagcttgaggctgacagatcacacctgtgcacgactggatgccatacaatagagtacaaaggaagaccaagattatgtgagccagggtttaatatccgcagccaatgtatgtaaatttatatataaatgtatgtgttatgtgctaacccatattaaattttagtaaagttcatttcattgttttccttgggtaagatagaaatggcactaaaattttggtttccataatcggttaaggattgtgctataattattcctgtctctagtttctttttctcacttcctgactcaccctagtctttgttcttctgtcaacatttttcacagaagtgtgtcggggagagaaagaggtggctttgtgggcctgaacaccagcacaaagggaagggtccagcattgggcgggcacaggagtttccagggggtgaaaaacctctgttgatctctcccttgccttttataaaaatgagatttttttaaatctgccaaatgtcttatgcagcactaggtaaatgttctgaattttagagtatgaaaatatttcagattgtccagtcttttggcaatatcttcaactctacattttatttaaaatgcgtatattcatcttaaaattatttttaccatgttgagttgctcatctataaatctatgctgcttaagtagtagtttaaatgtaaattttaatgaatgctatgaatcagtgcctaatttgcacattttgttaattacctgtggtttgggataatccatccaagatgttccctattatatcaccctgggtaattaagagttgacctattttcaaatttttgtggctcaaatagaatgaattccagtcaattttctttcctaatagaaaaaccatcatttattta

SEQ ID NO: 685933 - DNA, 1226 bp, Homo sapiens
aatggcttccataaagggagtttatttgcaggaataatcctaccaaggagaacaggatagtaggggctggaaaagggaaaacagggaagggcagaggccaattcaaaggggacataattgggctggttactattaagggccaataagggccaatgaggtccctctgaagaaccatgtagaatgcactttagaattgttcatccaggacatgggaaaggttaagtatttatccattggctctcagctcccattgagtcaagtttctcacacttccatatttgtgcatgcttgagcatggctggacagaggtagagaaagaataatagatgatagagatatggaggagctgaagcttgaggctgacagatcacacctgtgcacgactggatgccatacaatagagtacaaaggaagaccaagattatgtgagccagggtttaatatccgcagccaatgtatgtaaatttatatataaatgtatgtgttatgtgctaacccatattaaattttagtaaagttcatttcattgttttccttgggtaagatagaaatggcactaaaattttggtttccataatcggttaaggattgtgctataattattcctgtctctagtttctttttctcacttcctgactcaccctagtctttgttcttctgtcaacatttttcacagaagtgtgtcggggagagaaagaggtggctttgtgggcctgaacaccagcacaaagggaagggtccagcattgggcgggcacaggagtttccagggggtgaaaaacctctgttgatctctcccttgccttttataaaaatgagatttttttaaatctgccaaatgtcttatgcagcactaggtaaatgttctgaattttagagtatgaaaatatttcagattgtccagtcttttggcaatatcttcaactctacattttatttaaaatgcgtatattcatcttaaaattatttttaccatgttgagttgctcatctataaatctatgctgcttaagtagtagtttaaatgtaaattttaatgaatgctatgaatcagtgcctaatttgcacattttgttaattacctgtggtttgggataatccatccaagatgttccctattatatyaccctgggtaattaagagttgacctattttcaaatttttgtggctcaaatagaatgaattccagtcaattttctttcctaatagaaaaaccatcatttattta

SEQ ID NO: 685934 - DNA, 2346 bp, Homo sapiens
gttgccccgactggtctcaaacttctgggctaaagtaatcctcccaccttggcctcccaaagtgctgagattacaggcgtgagccactgagcctggtctatttttctttatttattatattgatttataaataatatatacaaacactcttaaaattttaatttgtcaggcccctgttggctgttgatatttcagtcaaataaatcttttggtataaacttgtttctaaagttaattcttgagcacttagcatgagacgggcactgctctgaagtgtttacttgtgtaaacttcttcaattctcccttcagccctatgggatattcattattatgactcttttttgagaggagaagaaactgaggcacagatagtttaagtcatttaccgaagatcacacagccattaaatgacaatgccgggatgaaacccaagggacgagcttcagtgtctgtgttcctagccatatcgcagtggagcagtggttaatatgcacgattatgaagagggcacattgtctccttactttctgtctccattcaaaacctagtgattattactggcaaaagtttaggtagacctgagccagggttctcactaacacagaaagaaagtacaaataagcggccgggcgcggtggctcacgcttgtaatcccagcactttgggaggctgaggcgggcggatcacgaggtcaggagatcgagaccatcctggctaacacagtgaaaccctgtctctactaaaaatacaaaaaattagccgggcgtggtggcaggcgcctgtagtcccagctactcaggaggctgaggcaggagaatggcgtgaaccctgggggccaagatcgcgccactgcactccagcctgggcgacagcgagactccgtctcaaaaaaaaaaaatacaaataagcaagagggaagtgtcctgtcatacaggattaggttggagacatgggtatgaactcatgcatggatggatagatagatagatagatagatagatagacagacagacagacagacagaaaatgagatatgtgtgtatatgcttgggttagcatagacacatgagtttctgagcttgtgttcctaggtttagaagcaatgccactccagtcataaggaggatacccagcacccagatcttggttgctaaataccattctctaataaaagaaatcaggggtccttggaaaaatggctgatttgattctagagatagaggagggaaaatacaaggtgagcctgggaatcttgcaggctcagagtaaggaagtgcccaagaaacaaaacaaggagggtgcatcaaagtcacacaggagtcatctttaaaaagtctataatgatcaaagctgacacaattttgagcaacaaaataaatacacagaattggattatgtattaatcagggttctgtagaagaacaggactaataggatagatgtatatataaaggggagtttattaaggagtattaactcatatagttacaaggcgaagccccacaataggccatctgcaagctgaggagcaaggaagccagttggaatcccaaaacctcaaaagtagagaagctgacagtgcagccttcagtctgtggccgaaggcctgagagcccctggcaaatcactggtgtaggtcaaagagtccaaaagctgaagaacttggagtctgatgtttgagggtgggaagcatccagcatgggaaaaagatgaaggctggaagactcagccaatcaagtcctcccaacttctcctgcctgctttgttctaccagtgctggcagctgattagatggtgcrcactcagattgagggtgggtccgcctctccaagtccactgactcaaatgttaatctcctttggcaacaccctcacagacacacccagaaacaatactttgcatccctcaatccaatcaagttgacgctcaataataaccatcatagattataacccaaaacaaaataaatgtacgtgagtccaaacgcattacataaatgaatgaataaataaataaatggggagaaaggacaaatcttccccacatatttctaaatgatacatgtagatacttctccctccatgaaacaaagcctaatcccttccctcttggttgtgggctggagttagtgacccatgttttaaaaatagagtaggagccgggctcagcgtctcatgcctgtaatcccagcactttggaaggctaaggcaggcgaatcatctgaggtcaggagtttgagaccagccaggccaacatggtgaaacctcgtctctactaaaattacaaaaattagctgggcatggttgtgggtgcctgtaatcccagatactcgggaggctgaggc

SEQ ID NO: 685935 - DNA, 642 bp, Homo sapiens
ctatcacaaggacaaagaaccaaacactgcatgttctcacttataggtgggaattgaacaatgagaacccttggacacaggaaggggaacatcacacaccggggcctgttgtggggtcgggggaggggggagggatagcattaggagatatacctaatgtgaatgacgagttaatgggtgcagcaccccaacatggcacatgtatacatatgtaacaaacctgcacgttgtgcacatgtaccctagaacttaaagtataataataataataaaaatatatatatatatataaaagaycagggtgagaatccaggtctcctgtctccttgaactaccactattacaaagactcaagaaatcgagtattgattaactgaattaggaattcatagggtttcttgtttggttgcaaatttcattttttacttggagagtggccactctaaattactgatacctactcttttactgtatatggtttaacactgaagactactcacgttatttcactgaaataggttgtctcacaagaaacagtgctcactgggtttctctcacctgctgactggctatccagatagctattttttagagactagatttggcagtcaatgccattgtaaaaagtataatctattttaa

SEQ ID NO: 685936 - DNA, 642 bp, Homo sapiens
ctatcacaaggacaaagaaccaaacactgcatgttctcacttataggtgggaattgaacaatgagaacccttggacacaggaaggggaacatcacacaccggggcctgttgtggggtcgggggaggggggagggatagcattaggagatatacctaatgtgaatgacgagttaatgggtgcagcaccccaacatggcacatgtatacatatgtaacaaacctgcacgttgtgcacatgtaccctagaacttaaagtataataataataataaaaatatatatatatatataaaagaccagggtgagaatccaggtctcctgtctccttgaactaccactattacaaagactcaagaaatcgagtattgattaactgaattaggaattcatagsgtttcttgtttggttgcaaatttcattttttacttggagagtggccactctaaattactgatacctactcttttactgtatatggtttaacactgaagactactcacgttatttcactgaaataggttgtctcacaagaaacagtgctcactgggtttctctcacctgctgactggctatccagatagctattttttagagactagatttggcagtcaatgccattgtaaaaagtataatctattttaa

SEQ ID NO: 685937 - DNA, 642 bp, Homo sapiens
ctatcacaaggacaaagaaccaaacactgcatgttctcacttataggtgggaattgaacaatgagaacccttggacacaggaaggggaacatcacacaccggggcctgttgtggggtcgggggaggggggagggatagcattaggagatatacctaatgtgaatgacgagttaatgggtgcagcaccccaacatggcacatgtatacatatgtaacaaacctgcacgttgtgcacatgtaccctagaacttaaagtataataataataataaaaatatatatatatatataaaagaccagggtgagaatccaggtctcctgtctccttgaactaccactattacaaagactcaagaaatcgagtattgattaactgaattaggaattcatagggtttyttgtttggttgcaaatttcattttttacttggagagtggccactctaaattactgatacctactcttttactgtatatggtttaacactgaagactactcacgttatttcactgaaataggttgtctcacaagaaacagtgctcactgggtttctctcacctgctgactggctatccagatagctattttttagagactagatttggcagtcaatgccattgtaaaaagtataatctattttaa

SEQ ID NO: 685938 - DNA, 664 bp, Homo sapiens
agagacacaggagcacaagacaccccggagcacttggggacctttggtatccctggaggctcagtttggcagaagtagaggattggggtggaagaaggggcagggccaaagtgaatgccgtggagccaggcagcagggccctgcatgctatgctaagcagtttagacttttccaaagatcactccgtatgctcaagccgacagcctaggaaagaatacacactttgtgacattgtgttacagacyccaaggaattttgaaaggttatttattccaggctggcctagcacaaccctttcaaggagccccatccactcccaagatacaggccaggaatggcttaaaaggagcaatctatcacatgtgcctttctcacagatctggcaaaccacggacccctcttttagttaagcttaatttttaaaaaactgtcctggctacagacatatgttcttatacaaccactctgccccccgccccactgcccttctctgcctcagttgtcttcctcttcaaccaaaaggaccttattccctcctgattctggctcttaaggtcaacctattgcccttcttgttccaagtaacccatggaatcacctttccacgcaccccttcgtctacccagggtcctcctgccctctgcccaccaccaccacgcaccct

SEQ ID NO: 685939 - DNA, 664 bp, Homo sapiens
agagacacaggagcacaagacaccccggagcacttggggacctttggtatccctggaggctcagtttggcagaagtagaggattggggtggaagaaggggcagggccaaagtgaatgccgtggagccaggcagcagggccctgcatgctatgctaagcagtttagacttttccaaagatcactccgtatgctcaagccgacagcctaggaaagaatacacactttgtgacattgtgttacagaccccaaggaattttgaaaggttatttattccaggctggcctagcacaaccctttcaaggagccccatccactcccaagatacaggccaggaatggcttaaaaggagcaatctatcacatgtgcctttctcacagatctggcaaaccacggacccctcttttagttaagcttaatttttaaaaaactgtcctggctacagacatatgttcttatacaaccrctctgccccccgccccactgcccttctctgcctcagttgtcttcctcttcaaccaaaaggaccttattccctcctgattctggctcttaaggtcaacctattgcccttcttgttccaagtaacccatggaatcacctttccacgcaccccttcgtctacccagggtcctcctgccctctgcccaccaccaccacgcaccct

SEQ ID NO: 685940 - DNA, 664 bp, Homo sapiens
agagacacaggagcacaagacaccccggagcacttggggacctttggtatccctggaggctcagtttggcagaagtagaggattggggtggaagaaggggcagggccaaagtgaatgccgtggagccaggcagcagggccctgcatgctatgctaagcagtttagacttttccaaagatcactccgtatgctcaagccgacagcctaggaaagaatacacactttgtgacattgtgttacagaccccaaggaattttgaaaggttatttattccaggctggcctagcacaaccctttcaaggagccccatccactcccaagatacaggccaggaatggcttaaaaggagcaatctatcacatgtgcctttctcacagatctggcaaaccacggacccctcttttagttaagcttaatttttaaaaaactgtcctggctacagacatatgttcttatacaaccactctgccccccrccccactgcccttctctgcctcagttgtcttcctcttcaaccaaaaggaccttattccctcctgattctggctcttaaggtcaacctattgcccttcttgttccaagtaacccatggaatcacctttccacgcaccccttcgtctacccagggtcctcctgccctctgcccaccaccaccacgcaccct

SEQ ID NO: 685941 - DNA, 1144 bp, Homo sapiens
tcctgcagggaagccccacccagtgaggcaggatgggtcaggtttatgcctgaagaggcactctggctgcagacttccacagctgctgtgttgggccatggggacaagccttggaaccaagctgtccagcctccctggctccagcaggggaaagtgctacctgtagctattgaaatgggtgctgccctccccctgcccagggagcttaatgtgttatcaactttaagcgttttatcactcactaaaaattattttaaacatcaaaaaactaacatgttttgaataccttagctaaggtttgttatgtttgtttattattttgaggggtgaatattttaatctagaaattctgccagtctgacactttcagctattttagggcttaagagtttttgaccatgaaggtagaaaaattatgtatacctatacctatatctatatctatacatatatgtatgtgtgtgtatatatgtgtgtgtgtatatatatatatacctacacacagttatatatatatacagttatacacacccagttttatatatatgtcctggtggtgtatatatatatatacacacacacgtgtgtgtgtgtgtgtttttatacatgtatacatgtatttctggttcscaatgatcttgaccaagagagtatcattcttttatgtcacagtttctataatcaacagcatattagagaactcaacatgcaactccttagacctaacggtaaaacttgagtttttaattttaacaaattagataaatagcagtgtttatataaaccagagaggataaaaccctaatttataaggtatgtaatattgtctggctacatgagccacctttccccttcctcgagttaaaatttctagctttgcttcttataatgatttaaatagagaggtaattgcatacttttctttaatgtaacacatacaaaattaagctttagaaattgcgtgtttaaccctcttactatgatctgctcattgagtaaataatttgttcaattttggctgagcatggtccatattgttgattaactattatcaaatgaacacttgtaaattggtaaaaaacttgagtaaaatattggcacaagaaatcccgtggtaacagcccataccagccaacaacattag

SEQ ID NO: 685942 - DNA, 1144 bp, Homo sapiens
tcctgcagggaagccccacccagtgaggcaggatgggtcaggtttatgcctgaagaggcactctggctgcagacttccacagctgctgtgttgggccatggggacaagccttggaaccaagctgtccagcctccctggctccagcaggggaaagtgctacctgtagctattgaaatgggtgctgccctccccctgcccagggagcttaatgtgttatcaactttaagcgttttatcactcactaaaaattattttaaacatcaaaaaactaacatgttttgaataccttagctaaggtttgttatgtttgtttattattttgaggggtgaatattttaatctagaaattctgccagtctgacactttcagctattttagggcttaagagtttttgaccatgaaggtagaaaaattatgtatacctatacctatatctatatctatacatatatgtatgtgtgtgtatatatgtgtgtgtgtatatatatatatacctacacacagttatatatatatacagttatacacacccagttttatatatatgtcctggtggtgtatatatatatatacacacacacgtgtgtgtgtgtgtgtttttatacatgtatacatgtatttctggttcgcaatgatcttgaccaagagagtatcattcttttatgtcacagtttctataatcaacagcatattagagaactcaacatgcaactccttagacctaacggtaaaacttgagtttttaattttaacaaattagataaatagcagtgtttatataaaccagagaggataaaaccctaatttataaggtatgtaatattgtctggctacatgagccacctttccccttcctcgagttaaaatttctagctttgcttcttataatgatttaaatagagaggtaattgcatacttttctttaatgtaacacatacaaaattaagctttagaaattgcgtgtttaaccctcttactatgatctgctcattgagtaaataatttgttcaattttggctgagcatgrtccatattgttgattaactattatcaaatgaacacttgtaaattggtaaaaaacttgagtaaaatattggcacaagaaatcccgtggtaacagcccataccagccaacaacattag

SEQ ID NO: 685943 - DNA, 644 bp, Homo sapiens
tgatctcagcctcttgacctcaagtgatccacctacctcagcctcccaaagtgctgggattacaggcatgagccacgatgcccagccaaaactatagagtttttgaatggtgaatttctaattaaccacctttcaaaacttagtttactcagttcatgttcttgggttttctaggttaaaaaaaaatcacaccatcagtaaaggacagtttatttccaccttttcaatcttgcattacatttctatttctttacttgctgcattaacaaatagaaatggagacarcagatatccttctcttgctgttctctaatagaactgcatttaatgtttcaccattaatgcatgatgtctgctgtaattttctgatagataccatctatgagacattcccttccatttctattcaatgtctgaatgggtgctgaactttacccagtattatttatttcttattttttttatttttttgaaggcagtctccctctgtcacccaggctgaggtgcaatgctatgatcatagctcactgcagcctttaacttgtgagctcaaaaaatccttctcagtctctcaagtagttggaactacagatgtgcactaccacacccagctaacttaaaaaaaaatgttctcattgttcaat

SEQ ID NO: 685944 - DNA, 570 bp, Homo sapiens
tacccttcttctaccttttatttctattttctttattctacatttgaatcccttacatacctctcatctatgactgtctcctattcacacactgaccacatttagacctagaaacactttagagatacctggtttcaccataaatcagaaagccaaagttcaaactagtaatctgcctaggatcctagagctcttttactcttttagtttttccttttataggatcattcaagaaaacaaagaaaagtctgacttaaaaaaaaaggttgcacctgggtgcggtggctcacacctgtaatcccagcactttgggaggctgaggcgggcagatcacgaggtctggagatcgagaccatcctggctaacaaggtgaaacctcatctctactaaaaatacaaaaaattagccaggcgtggtggcaggcrcctgtagtcctagctactcgggaggctgaggcaggagaatggcatgaacccgggaggctgagtttgcagtgagccgagatcacgccactgcactgcagcctgggcaacggagcaagactccatctcaaaaaaaaaaaagaaaaaa

SEQ ID NO: 685945 - DNA, 1959 bp, Homo sapiens
ccaataagtagcacagctagaactgaacccaagtctatgtctatctgacataaggctcaaattcattccactttactacacatggctgtattattcaatcattcaacagaaatatatcaagaatgtactgtgtgtcaaacactgtcctaagaatacagagacaaaagatagagtccctggcttcaggaaactcacagcctagtcaatagagtcaagcaaagagtcaggctggtttgtgcctataatcccagaactttgggaggctgaggtgggtggatcgcttgagaccagcctgggcaacacagtgaaactccatctctacaaaaaatacaaaaattagtcaagcatggtagcgcgtgcctgtggtcctaggtacttgggaggctaaggtgggaggatagcttgagcccgggaggtgaaggctgcagtgagcggtgatcatgcccctgcactccagcccgggcaacagaacaagaccgtctcaaaaaacaaaaacaaaaacaaaaaaaaaaaacaagcaaacaaacaaacaaaaaagggcagatgacttctgaagtcccttcaaacccaaaattctaaaggaaaagccataacaagtttatcacaattaccaagtgttccaagtacagctctctataactatctaatagggttgaatcataaataataattccaaatattgttctgatactattaacaattttctcagtacttaaaatcctaagacatccatattttcaaccgtttgggtaatatgaattggacgtttttaaaattttaggagtatgaaattaactacaatgtcacaaattccttaaaaactcacagcaagtaatattcaaaactggctccagaattaaatgacatctcaaacaggaaaataattatttctacttcactgtcaccaagccctacaactgataacaataaagaaaaaagatttcaatccactgaagtaggaaaatgccctacagcgtacagaagagctggcccatcattccagatctctgaatagctttcctcttccttcccattagtttaagacgattgaagtcatgttacaagttctaacagagattatttgcttcaaaaagctactcaatgaaattcaggattcatctctgaatacagtaaatctcaagtcagtgaaaagacttcaaaattgtgaggcagagtcagtaaacagtgtcatgaagaagttagctcttcactttcagagtctgggtgcaaaacagcaacaacagagtcattaaattaatcaattttcttagtcttaataaacattttagatgaaaaaacttatataataaggttcctggccaggtgtggtggctaatgcctgtaatcccagcactttgggaggctgaggcaggcggatcacgaggtcaggagatcgagaccatcctggctaacacggtgaaaccccgtctctactaaaaaaatacaaaaaattagccaggcgtggtggtgggtgcctgtagccccagttactcgggagcctgaggcaggagaatggcrtgaacccgggaggtagagcttgcagtgagttgagatcacaccactgcactcccgcctgggcatggagcgagactctgtttcaaaaaaaaaaaaaaaggttcctataaaaaaagtccatctcacatctaaaagcagtaatataagactagcagagcaaaaatgtaattaaaagtatataaacagccaggcattgtggtgcgcgtgcctgtagtcccaactactcagatgtttagggtgggaggatggcctgaccccaggagtttgaggccataatgcactatgatcacatattccagcctgagcaacatagccagaccccatcttgaaaaacaaaaaagtatacaaacatatttctactggtggccagagaccaaatttgccctcctccctgaaacaactggggggaaaaaaagacaaaatacataaaacgtttttcaagac

SEQ ID NO: 685946 - DNA, 1959 bp, Homo sapiens
ccaataagtagcacagctagaactgaacccaagtctatgtctatctgacataaggctcaaattcattccactttactacacatggctgtattattcaatcattcaacagaaatatatcaagaatgtactgtgtgtcaaacactgtcctaagaatacagagacaaaagatagagtccctggcttcaggaaactcacagcctagtcaatagagtcaagcaaagagtcaggctggtttgtgcctataatcccagaactttgggaggctgaggtgggtggatcgcttgagaccagcctgggcaacacagtgaaactccatctctacaaaaaatacaaaaattagtcaagcatggtagcgcgtgcctgtggtcctaggtacttgggaggctaaggtgggaggatagcttgagcccgggaggtgaaggctgcagtgagcggtgatcatgcccctgcactccagcccgggcaacagaacaagaccgtctcaaaaaacaaaaacaaaaacaaaaaaaaaaaacaagcaaacaaacaaacaaaaaagggcagatgacttctgaagtcccttcaaacccaaaattctaaaggaaaagccataacaagtttatcacaattaccaagtgttccaagtacagctctctataactatctaatagggttgaatcataaataataattccaaatattgttctgatactattaacaattttctcagtacttaaaatcctaagacatccatattttcaaccgtttgggtaatatgaattggacgtttttaaaattttaggagtatgaaattaactacaatgtcacaaattccttaaaaactcacagcaagtaatattcaaaactggctccagaattaaatgacatctcaaacaggaaaataattatttctacttcactgtcaccaagccctacaactgataacaataaagaaaaaagatttcaatccactgaagtaggaaaatgccctacagcgtacagaagagctggcccatcattccagatctctgaatagctttcctcttccttcccattagtttaagacgattgaagtcatgttacaagttctaacagagattatttgcttcaaaaagctactcaatgaaattcaggattcatctctgaatacagtaaatctcaagtcagtgaaaagacttcaaaattgtgaggcagagtcagtaaacagtgtcatgaagaagttagctcttcactttcagagtctgggtgcaaaacagcaacaacagagtcattaaattaatcaattttcttagtcttaataaacattttagatgaaaaaacttatataataaggttcctggccaggtgtggtggctaatgcctgtaatcccagcactttgggaggctgaggcaggcggatcacgaggtcaggagatcgagaccatcctggctaacacggtgaaaccccgtctctactaaaaaaatacaaaaaattagccaggcgtggtggtgggtgcctgtagccccagttactcgggagcctgaggcaggagaatggcgtgaacccgggaggtagagcttgcagtgagttgagatcacaccactgcactcccgcctgggcatggagcgagactctgtttcaaaaaaaaaaaaaaaggttcctataaaaaaagtccatctcacatctaaaagcagtaatataagactagcagagcaaaaatgtaattaaaagtatataaacagccaggcattgtggtgcgcgtgcctrtagtcccaactactcagatgtttagggtgggaggatggcctgaccccaggagtttgaggccataatgcactatgatcacatattccagcctgagcaacatagccagaccccatcttgaaaaacaaaaaagtatacaaacatatttctactggtggccagagaccaaatttgccctcctccctgaaacaactggggggaaaaaaagacaaaatacataaaacgtttttcaagac

SEQ ID NO: 685947 - DNA, 1959 bp, Homo sapiens
ccaataagtagcacagctagaactgaacccaagtctatgtctatctgacataaggctcaaattcattccactttactacacatggctgtattattcaatcattcaacagaaatatatcaagaatgtactgtgtgtcaaacactgtcctaagaatacagagacaaaagatagagtccctggcttcaggaaactcacagcctagtcaatagagtcaagcaaagagtcaggctggtttgtgcctataatcccagaactttgggaggctgaggtgggtggatcgcttgagaccagcctgggcaacacagtgaaactccatctctacaaaaaatacaaaaattagtcaagcatggtagcgcgtgcctgtggtcctaggtacttgggaggctaaggtgggaggatagcttgagcccgggaggtgaaggctgcagtgagcggtgatcatgcccctgcactccagcccgggcaacagaacaagaccgtctcaaaaaacaaaaacaaaaacaaaaaaaaaaaacaagcaaacaaacaaacaaaaaagggcagatgacttctgaagtcccttcaaacccaaaattctaaaggaaaagccataacaagtttatcacaattaccaagtgttccaagtacagctctctataactatctaatagggttgaatcataaataataattccaaatattgttctgatactattaacaattttctcagtacttaaaatcctaagacatccatattttcaaccgtttgggtaatatgaattggacgtttttaaaattttaggagtatgaaattaactacaatgtcacaaattccttaaaaactcacagcaagtaatattcaaaactggctccagaattaaatgacatctcaaacaggaaaataattatttctacttcactgtcaccaagccctacaactgataacaataaagaaaaaagatttcaatccactgaagtaggaaaatgccctacagcgtacagaagagctggcccatcattccagatctctgaatagctttcctcttccttcccattagtttaagacgattgaagtcatgttacaagttctaacagagattatttgcttcaaaaagctactcaatgaaattcaggattcatctctgaatacagtaaatctcaagtcagtgaaaagacttcaaaattgtgaggcagagtcagtaaacagtgtcatgaagaagttagctcttcactttcagagtctgggtgcaaaacagcaacaacagagtcattaaattaatcaattttcttagtcttaataaacattttagatgaaaaaacttatataataaggttcctggccaggtgtggtggctaatgcctgtaatcccagcactttgggaggctgaggcaggcggatcacgaggtcaggagatcgagaccatcctggctaacacggtgaaaccccgtctctactaaaaaaatacaaaaaattagccaggcgtggtggtgggtgcctgtagccccagttactcgggagcctgaggcaggagaatggcgtgaacccgggaggtagagcttgcagtgagttgagatcacaccactgcactcccgcctgggcatggagcgagactctgtttcaaaaaaaaaaaaaaaggttcctataaaaaaagtccatctcacatctaaaagcagtaatataagactagcagagcaaaaatgtaattaaaagtatataaacagccaggcattgtggtgcgcgtgcctgtagtcccaactactcagatgtttagggtgggaggatggcctgaccccaggagtttgaggccataatgcactatgatcacatattccagcctgagcaacatagccagaccccatcttgaaaaacaaaaaagtatacaaacatatttctactggtggccagagaccaaatttgccctcctccctgaaacaactgggggraaaaaaagacaaaatacataaaacgtttttcaagac

SEQ ID NO: 685948 - DNA, 642 bp, Homo sapiens
tactgaggcatttccccatgtcaggcgatccatctgtcttttccatttrtgttgccataaaggagtccctggggctggatgattcataaagaacagaggttgacttggctcatggctctgcaggctgtacaggaagcatggtgccagcctcaagctgcctccactcctggtgggagggaaggggagctggctgtgctgtgctcacatggcgagagaggaggaggaggagggacggagggccagggagagagagagaggaggtaccaggctccttttagaactcactcactactgcaaagccacaccatgagagatctggccccgtgactcaaacaccttccacctccccaccaacaacattggagaccaaatctgggggacaaacatatccaaactctaggaccatccatccatcaaaaatatagtgtatagttgctttatgttggatgtttcaggagatcataaaaaaagtaacgcaagacacaaccttcttgccaatttgattgggaaaagggtgcactcagacgaaggaggggaaatgcaaggtgacgtttcagtaatgaattaggtgatcctcttgacacctaatatggaggcagcgcagtgaacgcaagttgcagagggaggaggagtgtgatggga

SEQ ID NO: 685949 - DNA, 1420 bp, Homo sapiens
ccttggttctagcctaccctccacactgtcagtcattccccactccccataagaactgctggtcatatcctactttttatatcaaccactggtcatcccatactcttcaagccaacctctgagactccaactgattcatttaagaagaatcaagttctgagtttctttgttgattcaattattttatttcatttcaactaagtccaataacctccttgaggaaaaggactctgttgatctcaatgttgtattcccattgcttgtctagcaaaatacttctcacatagcagactcagtagtatttgttgaatgaatgtcaaatggaagaaggaaagcatgtcctaaaagacataattccaaatgtgatgtgaaacactgacataaagttcactcaggttaaaattcttttcaataataaaatgcatctttttttaaacatacatgaaaatttgagycttctattttatttgaattttttctgaaaattaccagttctactgctatctcttttatatgtcaaattgtaatcctagttccactttatatatatatcacccattatatcacaaagtaatacctgataacacataaaatcaaataagatatgcatctgttttccttggacgacctttgtgaggaaggcacaaacatatcactcagaaaggtttttttgtctcagtgttaagctccatgcaggcagagacctacttttttttgagacagagtctcgctctgccgcccggactggagtgcagtggtacaatgtcggctcacggcaacctctgtctcccgggttcaagcgattctcccacctcagcctcctttaaattttctacttgttatttttgcttatggcagattactgcccagctaatttttgtatttttaatagagatggggtttcaccatcttggccacgctggtcttgaactcctgaccttgtgatccacctgccttggcctcccaaagtgctgggattaccggcatgagtcaccacgcctggcctaccttttttttttttttttttaactagtagcaccagcacctaacacattgcctagcacatagcaaatagtaggtatttaataaacataaaataaatgtatgagttaaatgaaaattgtccagtcatttgcttctgcccttcctcattgtgaaagacctgaatcttttattattcccattaaattccattctctccaagaagctgcccactcaaaagtaatctctcctttctttattttcttgtaacacatggtttgtacttctcaattaggttataagcgcctagaaaacaaggacatctccattttaaaatttttatttacttcacagtaataagcacagtgctttgaatgtagaagaggcttgatcatagtaacaatagctaacttttaaaaggcccattttaagtgatggg

SEQ ID NO: 685950 - DNA, 599 bp, Homo sapiens
cttttcagttgctatataacatatctataagcttacattcagttagagaggttattcaaagcactttgtataacccagatgctgttatcttcattcatgcacccaataaatatttgctgaagtctaccatataataggctctgctctgggcactgcagatgcagaagtgggcaagtagacaaaactgcctgccctaatgcagcctctactccagaggggagggacaggcaagcaaggaargggataagctttagaaggtggtaagtgcaaggaagaatataaagcagggcaggaagatcaggagtgttgtattttaaatacattggtcatggaaagcctcattgagaaaggcgatatttgagcaaagacttgaaggaagtgagagattgagccatgtacatacttggtgtaagagcatcccagatggagggcacaagtgcaaaggctcagggtgggtgcttcccaggcatgtttgagtgagaatggggagcccaatgtggctggagctgggagcaaagagactataataagagatgggctcagagaggtgaggaaattataaacttcagcttcttgggaccattaaccatgtaaaaaca

SEQ ID NO: 685951 - DNA, 668 bp, Homo sapiens
ggccatgcccagccctcctcttgaccctgtgggctcacctccctgccttgcccacacctgtttctgccttcctggccagctcctgcagccctcctctgggagcaggtctccctggcctcctccaccatctctttgctcctaccctcccacacccccaccagccattactggatgctttcactgcagagaaagcctcaggctccaaacctcagccctgcctgcctgaggtcttccacaggttcctatcaggcctcctccaggccacctgccctccrgaaacaggggccacctgccttttccttctctatgtcccctcctgggaccaaactctgtgaggctggtgtctgacccacattcactgaaaggaagaaagagcaattgttctcctgaggcctcatgcccagagacaaggcctgacttggggcaaccaacccatgagtgccttgggcaacagaagctggtgatagggaatttagagggtccagaggaggcccctcgcagtgggcaaacaggaccttcggcaagaggcccaagccacatctaagggaaaagcagagtccattaagtccattaactttaacactgaaatcaatgttgcagccaccagaagtaattagcgtaattcacatttcagatcaggagatttttgaaaaccaagtttaattaca

SEQ ID NO: 685952 - DNA, 644 bp, Homo sapiens
gcattaatggggtgtcgcttctctagagctgggatcaggcccagatcctccctgagcagctcctgccctgcacggcctctccctgaagctgccccttcctcagcagcagccagcttccttctcctttttttcccatccatttgccatccctccttccttcctccctccatccctctctttctgcctctctccctccctctcttcctccctccctccctcttccttcctctctctctcccttccttccttcctccctcctttccttttttccttccttcctgagagagactgaggagacaagggtgacagggtcacgcactgcacacctgaagggagtgagcctggggagggttctgggtgagcttgggctccagggtggagcaggtgccccttgggcgggaccagagcagcaggtgatgaccgaagtgggagaaagtgaagattagcgctgagaagtccggcatgggctgaggagtagccagagagagggaagggcaaccaggagggccggattactgggggcgggcgagggaagagagtgaagaaggggaaaaaggccagccacatggaatactgtcaaattcttgaagatggagctgcayaaaattcacaggatttctccacttaaaaatttatttatttaa

SEQ ID NO: 685953 - DNA, 1503 bp, Homo sapiens
  misc_feature 807, 808, 809, 810, 811, 812, 813, 814, 815, 816, 817, 818,819, 820, 821, 822, 823, 824, 825, 826, 827, 828, 829, 830,831, 832, 833, 834, 835, 836, 837, 838, 839, 840, 841, 842,843, 844, 845, 846, 847, 848, 849, 850, 851, 852, 853: n = A,T,C or G
  misc_feature 854, 855, 856, 857, 858, 859, 860, 861, 862, 863, 864, 865,866, 867, 868, 869, 870, 871, 872, 873, 874, 875, 876, 877,878, 879, 880, 881, 882, 883, 884, 885, 886, 887, 888, 889,890, 891, 892, 893, 894, 895, 896, 897, 898, 899, 900: n = A,T,C or G
  misc_feature 901, 902, 903, 904, 905, 906: n = A,T,C or G
taagacagaaggaagctgggtctctaagtggccttgtggagtagccctaccaacctagactttttatctcctgttatgacagataaatgataaagttccatcttctttaggccattgtaacttaggacctctttgttatagtagcttaacccttttcctaatgaatacattgatcctctgattccccaccaataaatagtctgaatgtgttctccaagttccaagtttccaattctagactctgctttgccaggctccttgtttccaaagagcttcccaggatggaaacctggagccaaggttgagccttgatgtgctccctgctttctccttgtttcaagaagttccctgatgctcacgaaaggcctgatcctgggagagatggaaggaaggacatgaagaagcatccgaagttctttctttttggctggaccagggagctaagggcaggtggattaggataggctactgcctatgtctaaggctgcttcatgttcagggcctccagttgagcccagatgggtatttatcctgaccttacgtttcagctcagctgctccaactgtagggaatctggcaaggctcacccttcactctctctttctgctattgtagaccagactctctgaaactaaagatgtggtccaggcctatggacacaaaaaaaggtctgggggctgctttttccaagctctacatcataggaccacagatgggtccctggctcaacaggttaggacctccaactttatgccttccttgcctgagggtcctagcaacttggctctgcaactcttagaataatgnnnnnnnnnnnnnnnnnnnnnnnnnnnnnnnnnnnnnnnnnnnnnnnnnnnnnnnnnnnnnnnnnnnnnnnnnnnnnnnnnnnnnnnnnnnnnnnnnnnnccccttttctgagtgcctagagttcctccaccaacatgtcttcttaactgggaatcggtgtcctttcctgaaggcgtcatagaggaagactttggtgtcttctgaccaaagggtcacaaagtatgggaccctagcagtcctgagcgcacacctgcctcctttacagatgggacctgggtggtgccagatgttagcccctaggggaagagggcaggctccctccaggatgcagccaccaaggacacggtgaccaggcagagccgatcacacgtggggaagaaccggccagagagccctttggcaggaacctcaggaactgaggcaggaatgccaacgaatccctgccccaatgggggttttggccgccgagacacatccccacattgctgccaagagacctgggtcctggggggmtgaccctggagattgggggtggggtgagggttgggcagcctggaatggagggaagggcccaagagaaggaggcagggcctccaggggtggaacacagatgtcttgaagagcgctgtgggaggcgaggtgcggtggctcatgcctgtaatcccagcactttgggagaccaagacgggtggatca

SEQ ID NO: 685954 - DNA, 1518 bp, Homo sapiens
cattttaatatagctaccaaaggtctcctttgctaatgtttagaatcttggtggaattcaaaacatgatgttgctatagacttgatttgtagataggagctattttacagtactattaatggaacagaaacactagaattcagagtgatgtaaaattagagtaattaaaatgggaggtatgaggttatactttttggcgtaacttgtcttgctgttttacagctaaaaaaactgtgggtactacctagatgtgttttattccataaatatgaagatgtccttcaaggcatgaagtatcattatcatttataaatcatttcccatttattgaatataaacaatgataatatgccttgacagtatccgagaatgtttattttagtactttttcagaggaaattttatcagcaaacaaaagcagttttactcctccctgtgcatacgatgatttcctttgaatgtaaaatgttttaatttgaagtagtaggatataaaagcataaaatatagttttcttgtaacctatttcaaaatgtcttaatgttgattataactattttgatttgtaatacataaaaatttgtcagtggaatcaagctattgaaaaacgtccttaaaagcaagtaataacctcacattctagcaaagtaaaatagggtcaatgattactaagatatttaatttgaactctacttgactataatttgtcatattccaaagtaccaatttacaaaagaatttaattagaaggtaaattgtgagacaatttctacaccttagactccttactatatactttcagccagacatttctacaacttattttaatgacatacagaaaacacaattaactatcttggaaatataatgtggataattagaatagcagattatcttaaagatgactagttttgctgcttagaactttggggaattaagtagcaaatttcccatctaactataccttgagaaggaaaaatgttttggtatttttttctcaacatacatgagacagtccagaagcaattattcaaactcaataaaacccataattcacatgtttatactcaagattttaccaattaatttattgtggttcttaaatataagtgttttggtgaagagcaacagttctaaaacaaattttctgaatcaaacagtggcttttccatttcagccatttattgcacaaataattrtagagttttttacatgccgacatcatgccgagtttgaagacatatacatggtccatacactaatgaatcatctatcagtcaaatggatgctcaaataagtaaagatgcatgataccatgaaagcataggtatctgaggaggccctgccccatgtgaggggggttgcagcaggcttcccaagaagatgagatctgagaggagttaaggtttacttgtttactttgtggctttgggaaagttacttatattaaataagcctcagggtttttttaatctaaaaagtaatagtacctgtctcataagatactgcaagaattaaa

SEQ ID NO: 685955 - DNA, 650 bp, Homo sapiens
aacatgtacagctgcttagctcttggcaaagaaattgataaatgagaatgtgtgtcagaattttaggaggaaaaacatctatccacaaatttttaaaaaatgagttaccagctctctatcagctaaaaaaagttaataaagcattaaaatattcagtcatttaaaaagtcatgaaactgaggtaattatgtattgcatgtatatgacataattatcataactaatcaaatgaaataagcataacatgaaatgtgctaattagtttgataccatccaaaggattgacaaattactttatttactagataggatagaactattaccaaattaataattccacattaaaaaaaagtttctttctatacctatgtgtttatttgctgctttatgtttttgttattgttgtgatgtgttattttttttaatgggatgccaaccattataaattttatctttttttttttttagtttttttaatactttaagttctgggatacatgtgcagaacatgctggtttgttacataggtatacaaatgccatggtggtttkctgcacccatcaacccgtcatctacattagttatttctcctaatgctacccctatgtttttaaggaaatatctgtagctctatcctctagttgcccaaa

SEQ ID NO: 685956 - DNA, 1671 bp, Homo sapiens
gcatcagcactgtgcctggcctgtaattgatatgaatccttagttacccattcaatagcctaaacctgctcttagttcagggagtctaggaataatagaaatttttttccagccatttttgtagctcagggggccatgagacatgattctggaaattactatgtagaaaatatctgattgcttctggaaaatattccagccttaaaaaaagagatatacacgttgagtgatcccatttaacccctgctctttcttttttctctagatgccatcacactgggactaatgtcaggagctgcagcagtcctctgtgactgcacttgagccaaaggacaaggccagcatcctgacagaggctgaaaatgtctggattcttcgctggcatcaccaagctaattaagtattcccatacagcctacttctgggcttcctattcatcaacttgaacatcctaatggtttaagacatccttagttttctgttacctgtagtcaaagcagtcttttttatttattgagcatctgttttctgcatggatctcaaacacaaatcactttcccgctaaagaaaatgaattataaaccctaccttcacatagtgaaccagagaaagtagacagcagaaaatatgttgacatagatacatagataaaaaattgttcagagagctaccgggtcaattaaacacactaaaatgatttatcaggttgagcagtcaggatttctgcagagtatataagggtgaagcaaagtgattgtataaattaattgataaagactataatttgatcaagtgcattaaaaaattagaataaagacctgaaactgaaaagagacaattccaagatttctatgggattgccaggaaaaaaaaaaaggaagaacagtgataacacaaaaaatgagagtcccaactgatcagaaaagcctccttcttggcccctctagtcttatctccagtacctagcaatatcattagtccatgaagaagtatctatttttttaattgtgtgtttaaattaatttataatgaaactaacataggtattagtcttttttaagatttaggcatattaaataaatcacttcattaatcccaaattcaaagaccgctgtttatggtttcacactggtatcttgatggattgaattctacctaaaaaaatttccctaattttgttgcatatagtaaatatctcctccctccccaaattctatacctagataaagctatttctcttatatatgtccattcacaatatctctacctggagcaagaagtagagtttgggtcttatgataactagctgggcactycatgaaacgtctgtgaaatgaggtatgagctctcagcccataaaacaatcattcccattctttaccactagattcagaaaacatggactcatttttgaaacatttcatgaggtagaggaagaactcctaacatgtgatatagtatatctagctccttgatgtgctgaagccaagatagatttcagagtttgttaaacaaaagtataatagctgtactgaggtatcaccctgtgtcccaaacattctctcactttctttctcactgtatctcagagcttgaattttcacatggcaaaatcaagctcagagaattattgtatgcacagtggagaacactggagaaagggatgacttc

SEQ ID NO: 685957 - DNA, 2578 bp, Homo sapiens
agagttctactttgccaaggaagatactatcttacataaacagcaaagaatagggtatatttaatcacggtatataaaattaatactatgtcataacaataatctaagagatggaattattggtaaaagttgttaaaattattatatttttattcagcagttatccaggactatttagtagtaatacttaacacaccttgaatatttagtatatatcatataaacatgctgtttggtgggacaaaaatagttgacattgagaaatattgtatggttcaaaccaatatttatgtcacttaaaacttttgttagaaaatattattgtaacaatacatagatgaggatactgacatatcattgaatatggaatatgctcgaaatcaaacagtgaatggtggaaccaggaagggaacctttatctgtccaaagctgaaccactgtgttatactgtcgctaattagatgaagcagtttggtatgacagaaaaaaaatgccctgtactgagttataagactgctatttgtgttacagttctgctcctggcccagtgatcattaacaaatcatttaaactttataactttcagttttctaactatcatgtggggataattacacttgtgttctctacttcacagacataaaaatgaagtgcaaacttcaaactaaagtatatgaattrtataggcagagtaaataaactgaatgggatgagaataatttgggcaaaaaaaaatcagtagtaaagaaaggaggttaggagaatccttctgaggataatgcaagcagaaattgaaagtgtggtagtcatataacattcagtttatttgagatttggagagcaaaatgcttgaactttttcttaagttcaatatgaaagacagcattacaaagaagtgtgtgtggtaggataaaaggtttttttcctccactttcaaacagaacaggtttagagcagtgaatacatggctgagtagcattttaaggaaaataaataagaaaaatccctgaatgtagcatcagtaattgcaatacacatttctcaaggagcaggaaagaaataccgtaactataatacagagatcaagcagaatggtactggggtggtagatctctccatagcaggaaggaaaatgccagaaaatacaatgatcaaaatgaaggaatgtatttgaattatttacatctccaacgtatccaattatcagaagccactttaagcttgtgcagttaaaaggtgaaacttataattgatataggagatcagaatatgacatcccaaaatatgccactttagcataagaattattatgaattaaaggaaaatgacaattaaacacatggaaagctctctgccttctccctgtttgcctaaaagcaggacataaatttacgaaagcaaaaggatgcctccttacctctctaccaggaagaaaaaaggttgacccactgaagacaactttagaccctttcaattagagaccaaaggaatctacattagcaaactttgctaactcctattctcaaatttgctgtccctagagattcaaagttcttttaatttgtcttatcacttctctaaaactttaccgttttttgttgaagatgctatataagctaaaattcaaaaccacctcttttagaattattcatttctttggtatcttccatgtatatgtgaagtacacagggtagtaaatttgtctcttttttttcctcttggtaatttgtcttttgttacaagggttcatctcagataagaagtatgaaggataaagagaaaattggttttgtcttacctacgtcaccatggtatcccatgaaattcaaggaaaaaacaaacacaagcaaacataacctaataaaacaaatgcattcaaagtcactttgagaagaggaaaaagaatcaaacttttggcagacaaaagataaaacccaaaataatgaaagagaactgttacttgactctcccacataattaaaagagcattttcagttatgaattaaacatttaaatatcaaagatagaaacaaacaatagtaagattagaaatggaatctaaactctgaagaagctgaagaaaacaattatatcacctcagaatttaaaaacaaagctgccaagtatagtacaacttactatacaaaatagtatgatagaagctaggaaagaataaagccaacaccatgaaaatagggcataaaagagatgaaatgaaacagagaaaaggatagtcaaaaaaaaataccccactctccaaaatgaccagaatacttaaagcaaaacttctagataattttcataaaagaaaagacatccccaacatgcatattaaaatgacacctatgttctttgtaaaactgactcagaatagttcataccttagacatactgctgagcttaggaaaaagttataaatgagcagtaacgtgaggaaatactatacaaatacaaccttttaaggagtcaactaatggatgccttttattcaatgaagagttgaatgggaaaacttaaaataactataagtgagtatgagtcactgggtaaatgaaaatccaggagttcacagtgatca

SEQ ID NO: 685958 - DNA, 1831 bp, Homo sapiens
aggtctcattctgttgcccaggttgcagtgcagtggcccaatcatagctcactgcaaccttgaactcccaggctcaagcaatcctcccaccacagcctcctgagtagctagaactcttggtgcacattttgttttccttttttttttttctttatagaagagacttcactttgttgattaggctcttctcaaacttctaggctcaagtaatcctcatgtcttagcctcccaaactgctaggattacaggagtgagccactgcacctggcctgcctagaacgttggatttacagatgatcttatccttacttcagagccgttcaaaaaacaaagctgttataaataaacagcaattatgcatagggtatctttcaataaagacacgtaaagtgatgataataatcttgaacattattgaactcctcttgtcttcaatattatatttcaaatgctggaggcaatatagacacaatcctatggttagggtacttgaaaaacagtgaagataaactaaacagtatgtagaaaattataattaaacctaacatatgagtagcctagacccaaaactatatagcttcaaaaagagtcaaagtttatctatatcaagtttgtaaatcaagcaagcatcagaacattattcacttgagataaaacttgaagaagaaatattatttgcataggtaggaattataggaaatatattttagaagagagaaacacaatttactactcataatctgatgatgattaaaattcaggttcacctcttgcaaatatgtatgaactatcctagggctttgatgagatactaaaggataatgataaatacattacacaaaaagagtccaacaatatggttgttacagtgaagattttgggcattagtaaaatcttataaaatctactttctaaaaatttttcagcaacaacctagtattaactgcataagttttgcattgcttctttgttaacctagcaattttactgctgatttttaccctcaaaatgtaagcattatattgataatatctagcaaatattaataattatgtactacacattggcatttattatcaaacccaatcttcacaaaacccctggagctagattctatccctgtgttacaggcatataaacagagactccaacagcttgagtaatttgaccccccaaaatagagctaacataatgtagagcctacttacaacattcagtctgattttacaagttatgttctgaacaatcaaggaatgatttaagcttctctgagtaggcatatatcaagtttattaggaaacacaaacactaccaatgaaaagcctattcaaatacatgttaaaactaatttaaatattataaatattaatacttgatttatccatcaaatcctttggaaattataagctaattttatctcaactgttactttaggtacttgtcaccttagcataatcaaataagactaagagaacaatcaggtagttcttaggctgatcttgttatttctgaacaatatgatggttcagttctatgtgaaggtcaaaataatataaaaattgaccaatagtgtgtaaaccttgtcaygaaaaaaaattttaaatgtatgctgacagtaaatgtatgctgacatcatgcatggtgagtgactcacaattttgtactacataagaccagaggaaatagagcttagcaagttatttgtcctggagacaactaagtgttcttggaataaccaggcctgagaagaaatagtaacccagggtcactattgattaatttaatttctatcccaaagtttctcagtaagagtctgaacctattgttcatc

SEQ ID NO: 685959 - DNA, 1194 bp, Homo sapiens
tcctattttattttattcatttatttatttttgagacagggtctcactctatcattcagctcactgcaacctccacttcccaggctcaagtgatccttccacctcaggctcctgagtakctggcatacagacgccaccacaccaggctaattttttgtagagatggtggaggggggtcttactttgttgcccaggctgtttaacttctgagctcaagtgatacacctgcctcggccttccaaaatgttgggattgcaggcacgagccaccacacctggctgctttgttctattttaatattcacttggttattgttatcacaaggtctagagcacaaatgataccctaaatgtgaaaatctagtgctgcatcttttaataattaattcctaaagcaatctgaacattgcctgttgaccaatactatcataatactctaattacaagataaaggggagagctttttggtagcttggcttgcttattctgaaactgaaacattttgtgacaagtttactacattgaaactgagacataaactgggtcgctgaaggttaatttccacactatgctcctattcagtagtgaaattcatatctagaacaaggtattgttgccatttatacattgtcatatataaactttttgtttaagcaaattggactatatcttggtgatgtttgtgttaaaaaaccaaatcatagcaatgcttttaatgtcaaaggcattcctgaataaatctgtagaatgcaatttttatttgtaaaagtaatggattgaaattaatttcttccttttgaaatgcaaacaagtttaacttttatcatttattcagttaccaccttaactaaatactaacaaactttatcctaaactttagataaaatcaacaaggattatttaagactttgctcaaatctccttcaatctgccctgtttattaaatattataagtttcagccaccttactcacaaccttcttttttttacactgacaattttccccttaaaattatcacgttcgaatattatatataatttacttgttttatttgtgttgcacattgtttatttcctgggtattgctgccaagtaagtgccgaagtaaaagacttttaaaaatgtgtttactgatatattccagttgtctaggaagatggcagatacacctggtatatagtgatcaataagtttg

SEQ ID NO: 685960 - DNA, 1194 bp, Homo sapiens
tcctattttattttattcatttatttatttttgagacagggtctcactctatcattcagctcactgcaacctccacttcccaggctcaagtgatccttccacctcaggctcctgagtatctggcatacagacgccaccacaccaggctaattttttgtagagatggtggaggggggtcttactttgttgcccaggctgtttaacttctgagctcaagtgatacacctgcctcggccttccaaaatgttgggattgcaggcacgagccaccacacctggctgctttgttctattttaatattcacttggttattgttatcacaaggtctagagcacaaatgataccctaaatgtgaaaatctagtgctgcatcttttaataattaattcctaaagcaatctgaacattgcctgttgaccaatactatcataatactctaattacaagataaaggggagagctttttggtagcttggcttgcttattctgaaactgaaacattttgtgacaagtttactacattgaaactgagacataaactgggtcgctgaaggttaatttccacactatgctcctattcagtagtgaaattcatatctagaacaaggtattgttgccatttatacattgtcatayataaactttttgtttaagcaaattggactatatcttggtgatgtttgtgttaaaaaaccaaatcatagcaatgcttttaatgtcaaaggcattcctgaataaatctgtagaatgcaatttttatttgtaaaagtaatggattgaaattaatttcttccttttgaaatgcaaacaagtttaacttttatcatttattcagttaccaccttaactaaatactaacaaactttatcctaaactttagataaaatcaacaaggattatttaagactttgctcaaatctccttcaatctgccctgtttattaaatattataagtttcagccaccttactcacaaccttcttttttttacactgacaattttccccttaaaattatcacgttcgaatattatatataatttacttgttttatttgtgttgcacattgtttatttcctgggtattgctgccaagtaagtgccgaagtaaaagacttttaaaaatgtgtttactgatatattccagttgtctaggaagatggcagatacacctggtatatagtgatcaataagtttg

SEQ ID NO: 685961 - DNA, 645 bp, Homo sapiens
tgctatttgcaaatctaactacaatataaaatcaagcatatatctgggaatttctaagcctcctccaataaacaatgagatttctcatggctgtgatttcattaggacaataaaacatgtatcatatgaataaattaaagtgtaaaacattacttgataaggggctagggttgtaaatgatttgtttaagtaataaaaatacatttaaaatttaagatgatcatgatttctattatataatgattttatctcctaaaataatttacttggcattctatatcttctataaaattttcagtaacattttctttttttagtgtttttttctcaagtcattttatttaaagaaaactgttaactctgatggtagtttctttcgctgtgcagaagctctttagtttaattagaccccatttgtcaattttggcttttgttgccattgcttttggtgttttagacatgaagtccttgcccacgcctatgtcctgaatggtaatgcctaggtataaatcatgctgctataaagacacatgcacacgtatgtttattgcrgcattattcacaatagcaaagacttggaaccaacccaaatgtccaacaatgatagactggattaagaaaatgtggcacatatacaccatggaa

SEQ ID NO: 685962 - DNA, 659 bp, Homo sapiens
agcttttccaactgattttttttttactaacctgcccactttattttttaaatgtgtatatatatatatattwtttttttatgtcctacctttcttgaagttgcactttctaattcgaggagtggtttggcaatttattactattcgatattgttgaacagcaaacacaattgtcacctttttcctgtgtagaatataacattatgaaatggtgaaggaatgaatttgatccactatactagcgatacaaacatgtccaattctttctctttttctaagtaaaactttttgtgagttcccacacacaggggctgatggaaaatccaaactctgcaattttcaaggctgtatctatgtatctatttttcagaccttcattttatcttccttaattcgttgaaaagagtgagaggtctgttttagtgccacagtcctctagcatttttgtctatgtctcgaaattttacattaataatattagtttagtaaaccttgatcaaaatatggttattgaaatgttttcaacatggaaagatgattatttttaaaatacaggtgaacatttatcaattaaaaacagtttaatatttacccttgagaattcagatttgtctgaagttaccacagcagttattttgacctacattattttccatatt

SEQ ID NO: 685963 - DNA, 2707 bp, Homo sapiens
aatcgaaccaaacctgtagaatgattctgagatgcactataatggtaatcacctgaacttgatctacagctcaaactacctggtttttaaaaaaatagtcagtttatttccacatattttgactattttctacctgtcagaatgtcactatagacggccgaggaggggtatggaagacataccctttatgtgctcagacctcagagggcacaattaattcattgctattcttactttctgtattagatattactcctgttactgttattttttaattatagattttttccctagaaatatgtgttctatatgcaaaatgaagcataggtttttataatttgtatatgtttgtaaagtttgcatatgctttattttaaaccatttgcttatggtttgggtgaataggtttcctctgtttcatttcaccctttaagaatgaagaaaataattaccccaccctctttggaatagctgccatttgaaaatgggaaatgcttctattgtgatctacttatttatttatttttacttttggtattaagccaccaaacgacttagctcagaaaaaaaattaagtgtctaaaaataaattttacaaattacagccctgagtttaccattctgttgtagtgtgtcattaagaactggctgcaaagtaccatgcagcagggtgaggagcagctaaaatctgggctattgtttggtcctttgaatagtgaatgtaattgttaaactatattttaagtggttgagccaagtttaaaacagtaaaatgtgtgtgtgtgtgtgtgtgtgtgtgtgtgtgtgtgatttcttcctaatattaaaggaaattcaagaaaatagaaaaattttwaaaacacttattctataggaaatatcaaatatccatatctcaaacctacgtttttaggtacatacatacaagtgctacactggagctattgtatcaataaaccaagaacttataaagttgcctttatatttcaaagtattttccaaacatttacattttcaaaaaatgctgtaacaaacagttctatatgttcagtgccatatgctcaacataataatataactgtagttaaactaatgataactaagtcacagtaacatggatgactttgcaggctgctggagcagcaggttttctttgcagaacaaagcttgaagctttgaagctcctctgacaaaagtgttgtgagcggggtagggagaagaggagcaggaggcagaagagggcttggtccattccaaggagattttagacctgagggaagtcacctgtcaatttctgaatgtcattggattatctgctataattcatgaatgtgggtttgaaaactcaacgttagtacctcccagaaaatgtcttttggagatgaaaggcaggggctggtcaaggctgacatcctagaaaatccctcatatcctggctgtggaattgaaaatagaggatttaacttactgtcattttcctttttatttattcatttgtttgctattgtaacacttttaggttttgcttggtagacagagaatatctaaatagtattgatttttccacagttatatgaaggaaagaatggtccaattatctaaacgttgcgaaacatattaaatttttttaacttaaagattttttctacttcattgtctgatctaaacaatagatggagaaactgtaatgctactctcatttacctgaggttcataagattttctcatacaaaaatccaattttcatccaagtaaataataaagctgactgtacaataaatcatatcataccagtgaagacatcaataggctctcccagctcttccaattctagtaaaaatacttttttaatatatgaaaatgatctacaagaagcagaataattttagattaattttttcaggaaaaatggaaacattgacttttattataatggagtaaaattcaattttattgtaggaaattgtatgtcataattcagtctaactttgaggttaaaaatggtgtttaaccacctggaatatgaattgagggcagattataataactcagtacaataaaagagaatgaacatgactcatattgaattcagtagatgcttaaagtaacccactctgcacgcgtctggtttgaactgcagtcaaggtgagtgtggtgtgagcagctgtcatcttacccgggcgtccacctggagcctccttcttgcctcgttccagaacccatgtctccatgaataaagttagcatgtggccaactcactggattgaatgtagccatcagttaggaccaaggaagagacccgggatacttcagtgccttggggtaaattggggcagctgttctcctgccagaccatgttctgagtgctgggactagaggcttttccctacaattctgcttttaatcattcagtcttgacttggggataggagacaagaaggcctggctgaaaaaggtgaggccgttattctccttttcttgatgaatatgtttggagccaaaatacattatgaattcaaataattttctactaataaacatttttagtgaaaaatgttaccatttattaaacattccttctgaaataagatgaaatagtcaggcccatggtggttaaatttgctcctgtgatctcttctactacctgtccagaggaaatgagctgggagagccacttacctcctcactccctcggaggctgtggtca

SEQ ID NO: 685964 - DNA, 1385 bp, Homo sapiens
tgattctacattatggtgagttgtataattatttcattatatattacaatataacaataatagaaataaagtacacaatgaatgtaatgtgcttgaatcatcctgaaaccatcccttgccccctggtctgtggaaaaactgtcttccacaaaatgggttcctggtgccaaaaaagatgaaaaccatgaagaccactgatgtaacatattcacwgtttccagagattgagaagtagacatgtctgggggcccattattctgtcttccacagataaaaaggcaaaattcctaaataaaatacttttatcaaaactaacagtgtataagacacaacaaattggccaggcacggtggctcacacctgtaatcccagcactttgggaggccgaggcaggcagatcacgaggtcaggagatcaagaccatcctggctaatacagtgaaacctgtctctactaaaaatataaaaaattatccaggtgtggtggtgggtgcctgtagtcccagctacttgggagactgaggccggagaatggtatgaacccaggaggcggagcttgcagtgagccgagatcgcgccactgcactccagcctgggcaacagagcgagactccatctcaaaaaaaaaaaaaaaaaaagacacagcaaatcatcttgaatgaatagatattattccaagagttcaggttaactcaacatcagaaattataaaggagaaaggctgtcagagatcctcaatagctcaagaaaaaccttccttcattcatagtaaacattaagactcattcacaatgaaatatttagttaaaatggtataattataaggtatagaagtatatcacattatgctccaaagtaatttgccaattttcatttctttcaggaagatatacgagttcctatttttgcatatcctcacccaatatttggtattgtcagatttttaggatttgcaatctaataaatcaattattatttcaccattaatctctgaatactggatcactgtttagtaatgggtttcttttttctttttgattcagtttaactcttctccaaatccctggtccatacctttggcccatttttctgatgttctgtcattttgtttccttaggtgatttaaaggactttttaatattttctgaataataattcttcccatgtacattttatgtaagcaacaggggtgcaaaatatacacagaaaatgtgctgaaggatacataggcacattcacaatggtaactgggggcttcaacacctcattttcgaaaaggatagaactactaagtagaaaaatgaaggtatggaataactggacaaaaccatcaaccaacaagatttaaatgttatttctagaacactccacttaacaaccgcagca

SEQ ID NO: 685965 - DNA, 2941 bp, Homo sapiens
ggctgcctttgtgggcattgcagaccaaattcgggtgcagggccctctgcaaactcaggttgaaaatgcaaatcaggtaatggagtcagtgataaattgatgagcgaagatgaagtatatctagcttttaaaaaataaaagggaggatctgccacaagtggtaacccttagagacagtgaacatgggaaagaggcagctagctcagcccagcacctctgcacacagggttcactctgcagagctgctgggagtggagagggagtgggcattccacagctacatctgcaaggcaggaccgttgccctgggtgcagtgcagaggcaaagcatctttatgaccaaggcacatcctcagcttattctgacatttacctccatccgtgtgtttttaaggcaaatccaccgcacatttctgaaacaccctcctgggaatcgatcgttagtcaccaaatttcaatggaactcaaagcagagctcatgctgtgatgaatgccttttctgtttctaccagtgtgatcttccaggctttaaacttgccattacttctgaccaattcatttctttttttttttttattttttatttatttatttaatttatttatttattttttaatttttttttttattatactctaagttttagggtacatgtgcacattgtcaggttagttacatatgtatacatgtgccatgctggtgcgctgcacaactaacgtgtcatctagcattaggtatatctcccaatgctatccctgccccctcccccgaccccaccacagtccccagagtgtgatattccccttcctgtgtccatgtgatctcattgttcaattcccacctatgagtgagaatatgcggtgtttggttttttgttattgcgatagtttactgagaatgatggtttccaatttcatccatgtccctacaaaggacatgaactcatcattttttatggctgcatagtattccatggtgtatatgtgccacattttcttaatccagtctatcattgttggacatttggacatttgggctataaagacacttgcacacgtatgtttattggggcactattcacaatagcaaagacttggaaccaacccaaatgaccaattcatttcaattaaggaatttttgagtgtctcctatggccctttgtaatatgatcagtggactggaagtgaagccccagccaacactgctctaggtatctgacggagagcttgatgtctcttctgtttcttttcacccaccagtgggtatcatgcttctgagacactggccccactgccctggcttcctggccctacatgggaccttctgatggtcttgtccatttttattgtcctgtgggatctgccccaggttctagaaatgaaagctctgcccagcccagcagggagcctccaggatcctgctccgtgctgtggcctcagaattttgtatctcaccctttcttactccatgtagtgctttgtattttacacaccaacgagtatcatagttaagtgcactctcactacgatttgagtcactggcacacacagagggacgaaggaaagcaaaacattctactctcaacataggcacacatagtgtcaaaaagaggacttggctgtcctctcctggcaaggccacgtgtggcacaccctgaggttagacacaggccaagtcgccacaggtgccttcttcccagcggacggctgtcctgcctctccctgagctggttattgatgggaggagggtgaactgcaaaccagccgcagggacagagtagggaggcggaggagaaccagggccagtctgtcgccttcagaggtgacctgaatttgggaactccccacttctccgaactgcaggggagcttcccgcgctgtctcccaggctggagtgcaactctgcgattacagctcgctgtagcctccaccctccagcctcaagtgatcctcccacctccgcctcccaagcagctgggactacctacagatgtgtgctaccatgcctgcctaatttttttttaatgtttaatatttgttaaagatgaggtctcaccatgttgcccaggctgtccagcctcagcctcccaaagtgttaagagtcacaggtgtgacaaaagcacccagccctgttgtcaacgttctgtcttattcgtggcaggaaactcccttaagaggggttttatggcaatcctcatttctcagaattttatgctcttattcagaaaaggggaattctgagaaggcatctttctgcacttgttgattctcaatgaccttttgctcaaaataatccacatcccaaagtgacatattttggggtgatgtcttctgaacccctttactcagcagtgatggaggcttatgtcccagggctgctgctgcttgtgtttccgttgctcagcgtctccactcggttcccatctgtctgactcagttgagtgtggtgtcctggctggatgcctcctgtccctgctgaggccgagctctgagagtgattctcacatctcattcctaccctcaatgcaaatcttatgtgctgggtttttcatataaggaaatgaggtttagcatagtgctcgggagtcagatgtcattgattttgaaccgctgcgactgatggtaatgggtggtgaccgtggccaggtcaccttccagaggagtctgcctttcctcaccccacagtatgataaaggctctgcatccatycacattcacacacggagaggaagttagcttccattattgtgaatcacagagtaatgaggaaatgaacaaatggatgcaaatcccctggtctcctctctccctgatgaccctggccataccggggtctgggagggcaagcattctctccaccaatctcccaatggaaccacgcgtgctctgacctggccttctcctctggctacagccccaagtcctagcttcttcccctgagac

SEQ ID NO: 685966 - DNA, 611 bp, Homo sapiens
gaaaattatctgggagaggaaactaaatagccctgaatggttgatctcaagaaccatcagtttttggtatgtcaaattctaaattctatatttttttcaaatttcactagtaaaaatattcagaagcacttttgccatcctaaatgtcttggacaacatttatatgaatggtttgaaaaaagttcttatccaagattgattactgatctgcttttggaactggctttytaaacacttcatgaagcaacatcgcttgatacgagagacatcactttccactgagaggagcccacctgtattaatatcacttccttattttgtaaagaactaatgaatgtgtacagattatgatgagaagatcccctttcaaaacagtagtcagtgcaatacttgatacttaatgtctaaaatgatttcaccaatgtgatattacagccacaaaaggttcgacgtaaatctcatcatcatagagctatcagatattgcagaatgcaggacattttacccgtctaacagataactgccctggaatcttcaggaaagtaaatgccatgacaaatacatcaaattgaataggagggtgccaatctagatcaaaagagcctggagag

SEQ ID NO: 685967 - DNA, 611 bp, Homo sapiens
gaaaattatctgggagaggaaactaaatagccctgaatggttgatctcaagaaccatcagtttttggtatgtcaaattctaaattctatatttttttcaaatttcactagtaaaaatattcagaagcacttttgccatcctaaatgtcttggacaacatttatatgaatggtttgaaaaaagttcttatccaagattgattactgatctgcttttggaactggctttctaaacacttcatgaagcaacatcgcttgatacgagagacatcactttccactgagaggagcccacctgtattaatatcacttccttattttgtaaagaactaatgaatgtgtacagattatgatgagaagatcccctttcaaaacagtagtcagtgcaatacttgatacttaatgtctaaaatgatttcaccaatgtgatattacagccacaaaaggttcgacgtaaatctcatcatcatagagctatcagatattgcagaatgcaggacattttacccgtctaacagataactgccctggaatcttcaggaaagtaaatgycatgacaaatacatcaaattgaataggagggtgccaatctagatcaaaagagcctggagag

SEQ ID NO: 685968 - DNA, 669 bp, Homo sapiens
gcaatcttggcccactgcaacctctgctacccaggttcaagcgattctcctgcctcagcctcccaaatagctgggagtacaggtgtgtgccaccacgcccagctaattttttgtattttagtagagacagggtttcaccgtgttagtcaggatggtctggatctcctaacctcgtgatccgtccgcctcagcctcccaaagtgctgggatgacaggcgtgagccactgtgcccagcctagcacacaatcttgacaaagaatttcggtgcgacttggggtactgtggtgcctgctctatcatcatgcttcagcaggaaatgtgggtgaatagtgcctggtggcatggcaggtaaagaaatgttttgttttgtttttttttttgagacagtcttgctctgtcacccaagctggagtgcagtggcgcaatctcggctcactgcaagctccatctcccgggttcacgccattctgcctcagcctccccagtagctgggactacaggcgcccgccacacgcccggctaattttttgtatttgtagtagagacagggtttcaccgtgttagccaggatggtctcgatctcctgaccttatgatccacccgccttggcctcccaaagtgctgggattacaggcgtgacgaccgcgcccakccgcgggtaaagaaat

SEQ ID NO: 685969 - DNA, 629 bp, Homo sapiens
ccataaatagctttgggtagcatctgacaacctgaccatcatgtagtatggaggaaagggacctagttttggaggaaagggacctagttttagagccaaaagaccttggtttgcattctgactcatctattagctgttgattaagtttcttcatttataaagtaaataagtaaatgtacataacatatattattttaaataatactgacctgctttctagaaggaaaacaaatacttataggtttgtttgaagaacaaataataataatttaaaaaaccataatgcttaacataagccagtaataattctaagagctttatacagatttcaactcacacagyccttgaagtgggtaccagtattaactttgttttacagagaaggaaaagaatcagagagattaggttatagatctaagatcacactgctaacaagtgatggatccaggatggaaactcaggaagtcgtgtctcatggtttagaatggtgcattgccaaatataaaagcaaatggtaaatgtaaggtgtttgtattatgaacattcttaggaaaagaacaaaacaaaacaagcaaactgtctattactatcccttctttccaagctactatcatttcttcctaggagaa

SEQ ID NO: 685970 - DNA, 629 bp, Homo sapiens
ccataaatagctttgggtagcatctgacaacctgaccatcatgtagtatggaggaaagggacctagttttggaggaaagggacctagttttagagccaaaagaccttggtttgcattctgactcatctattagctgttgattaagtttcttcatttataaagtaaataagtaaatgtacataacatatattattttaaataatactgacctgctttctagaaggaaaacaaatacttataggtttgtttgaagaacaaataataataatttaaaaaaccataatgcttaacataagccagtaataattctaagagctttatacagatttcaactcacacagtccttgaagtgggtaccagtattaactttgttttacagagaaggaaaagaatcagagagattaggttatagatctaagatcacactgctaacaagtgatggatccaggatggaaamtcaggaagtcgtgtctcatggtttagaatggtgcattgccaaatataaaagcaaatggtaaatgtaaggtgtttgtattatgaacattcttaggaaaagaacaaaacaaaacaagcaaactgtctattactatcccttctttccaagctactatcatttcttcctaggagaa

SEQ ID NO: 685971 - DNA, 1164 bp, Homo sapiens
gtactttttctaagacatgttgcrtaatttacaacacaaagattgtaaaagagaaaaaaggttaaagaatattagttaatttttggaatttaagcattgaagcttgtaaatatgtcttatttttagtttttgactttattacactatgtgaaattctgacatttaatgacaacacaatttaggcacttgggattatccatacttcataatgctatggatactactaaccttccaatagttattagtgttttaattaattaatggtgattataatttttcaattctgtataatgcctactgtgtcttcaccttgattgtacattaagttttcaaattattttatttatgtatttttaaaatatgctttttatgctgggtgtggtatttcatgcctgtaatcctagccctttgggaggctgaggcaggaggatcacttgagaccagcctgggctacatagcaaaactatgtctctacaaaaaatacaaaaattagctgggcatggtggtgagtaccccgctacttaggaggcccaagtggaggatcacttgagccccagaggtggaggctacagggagtccagttcgcaccactgcactctagcctgggtgacaaggtgaaactgtgtctcaaaagaaaaaaaaataaaagcttttaaagcagattttctatatggctctagaatgttggttatgtgaatgaattttgaaatcagattgaaatttatgttgtggcccaactacctacaagctttatggtttaaccaaattaataaccctcctggtcttttgtttcatcatctttcaaataaaagttaggaggtggtgaattaagaagaaggtgaaaaaaatcacacagcattgacacagatgtttttgaaaaacacaaataattttttttttatttccaggaaagcaaaaactaaaatggttaacttcaggttgattttattacatgaaaacctaacaaacctgtaactaatcccttttacggcagtctaatttatattaatagtaacaatagataatatttattgaaggattatatgtattaagtgctgtgtggatttcatccttgcattattcctgaagctatattgattgaatttaaatcccagctcggccacttttcacttacatgaccttggacacattgtataacctcta

SEQ ID NO: 685972 - DNA, 2450 bp, Homo sapiens
tctcccatgtaatttttttcttccttttaagttggaaagcttcacccttactgatgaagagtataaatagattaagcactatactcactgtcttgcctgtaattgtgtatttataatacaacttttattaatggaayttctctagttcttagcttaccctatgaagtactgatttctttggtaattttttaaaaatcaattaatactgataatatgtcccctgaattgaagataaactaatgtgttctaagtaatttcaagtacattaacttcaaggtaattgaaagaagtttttcttatgtatttgattcttaggaaaatgttgtcaacacatttttgcatatgaatgaatatatacaaggggaaagaactgataacatatttatgggaatattacaaagtcacatctcatacttctagaagttttatgtaatgatatctattttagttttttattgatacattcatttatctaattaattctgccagttgagtacctactaagcataaggcatttataactccaatatctgagaactgttcaatcttttagaaactttgtaatgaaaatgtgatttttgtaagaactgtgtataatacaggaatatatcatgcagcatcctgccctttaaggagttaacagtttaaaagtaactataaaaccggataatatgtgtagatcatgggtgaaatggctgtctccattgcctcaaagtgagacttatcctatgttgcaattcatgctccattgtttttcttgaaatcagactgcagctttaccccatctgagactatttctttggttagcttcttttcctgtcctatcttgcttccctcacttccttataggtttctattgcgtgcatttcttcaataaattacttgcttactctggttttaaaaaatctgtctcaatatatccattttaggcagtcttcataggtattaaataattaaatcctaacaataaccctaaaatataggtactataacttttcctactttatagatgagaaaagtgagacaagaaaagttaaataatttgcccaagaagtggaagagctagaaaacaataaaagctatgtttattgagcatgtagtatactccaagctttttactgattatgttcttataatgatgatgtgagatcaattacactattaattcaatttaatccattcctgatgaagtacatattagtggttaaccactccagtaactctgattgcttttctatttcatagccgagtaatattggacatgcgttacttacttcagtaactcagtttttaaaatttgtatatgagaataacaataatatactgtaaatcatatacagtcattatgataattaaacatgataatacgcaaagtgcttataacacttactagtgtgtagtgaatacgtaataagttttagctggtattgttattaatattagcattcttacaatttttagagtagttaattctgaagatcaaataactaataaatgttgaaactgcaattcaagcccaaacaatttaggagactaaatttaagagtcaaatatatagatggtatctcagtagttggaatgttatatattttgaaaaaatgacagatttttttgcagaccttttctttaacatggtatctatatggtgaaaaactaacttgaaaaactgatacaaaactggataatggaaaacattgagcaccatgcaaagactgtgagatttaggactaattttctccatgagcaaaagaagcattaaagacctttttaacagtggtatgactttggatattaatgtagttcattttggattgatgctattgatgagcagtaaaatgttgaaaattgaaatgcagaagaacactcaagaaggtatagaaataggcatatggtaggcatatagatgtagtaggcttggctttaatgtgtcaaaaaaaaaaaaaaaagtcctgggataggaatccatgtccgtctcatcacaaaacctggacccttaaatacaatcactaccacacacgatatggtacaaagacagaatttgtgagagacagtaagatacggtgttgaatagtattgcgtttgcaatatactttatagttcaaaaacttgttctattttcaaacttgttaaataaatatgccaattaaaaatagtttgtaaagctcatttgggtaatacagccagaaagaggaaattactaattcagtgaacacatagaataactgatgtaattttaaaatccaagcaaagatgcccatcagtaacaagaaattttccaaactaaggaacacactgaaagtttaaaatttgtattatgaaattcacttacctagaagtagctgttgaatttttgaagccagcttgattatcagagaaaattacttcagtgtgaacattttttttaaaaaaagggaagggaagtaaatatgaagtaaagaaaggcctggaaa

SEQ ID NO: 685973 - DNA, 1071 bp, Homo sapiens
tacactctgcactcttaaaagaaatagttttactatatattttatctacccttttcccattggcatacctagtatgcactttctctaaaataatttgaaacaagttttcctatttaaatttcttcagcgagatttgttctacttctatgtgttaattctcttgacagttcaattatgtcaaatacaactatctaatactaaagataataccttagtcttgtggcatggtacgtatgctaaaatctcaagctctttcacgcccttatgatatatatattccttatgatagcccctttagggaatgagtcatatcattgcctgtgaaatgctttaaaaatctgaggataataaaaaataggttttaattgtgtaattgacaacagaaagcaaatcacatttttaaaatctaatggtacccatacaaaatgaggctagtgaaaatttaagttagaaagctcagttgtttggattagtcaagacacatgtataacaaatagtaacatttccaaattaaggaacctatcctgtcaactatttgcacccccaacggagaaaaatatttacagcggtaataagagagtgaagaaatgttaggagaaaaacagttctgtttaggaataatcgaagcacagcctggaatagctgtgctcctcatttcacgtgatactttcaacttttgtccataaaacactttactaggttttgtttttatttcctactttacctgtgcttcactaatttatttgttatatgttctcagatatgtatgtatctttgtaaaacacatggttttatttcacatgtatgattcatgtaagtgtatttgctattaactcattcactcccattttacctaacattgtattaaattctgtgtatgttgctatacacaaactagttatttgtgttgtgttcaatagtgtgtatatatcacatttcatttgttcatttccctaatgatgaacacataggttgctttcagctcttcgttagtatatgttggaaagaatattcccacacaagcttttggactaatgtgagttggtatrtatatatatatatatatatata

SEQ ID NO: 685974 - DNA, 2245 bp, Homo sapiens
cgagatttatctgaaaaatattttagtctaacttggaaaaaaaatgataaaggcttgaccacccagagagggcaatacacttgaagagattaaaaaatcaggaaacacttaaataagagaaatgaaagaaagttcctccggctacagctgggattctgtctctatggaaatggaagctgattacagggcccttcaaaatcaactttatcaaccagatgaagacagctgctgcttgggaaagagtttctgcagtgaaatctctttaataaaaagaataaaatcagcagcattacgattatgctgggaagctttttttttttttttaagagacaaggtcttgttctgtcacctagtaacacgatcatagctcactacaaactcaaactcctgggttccagcaatcctcccaccgcagcctcyctgaaagctgggacttgcacatcaccctcagctcattttttaattttttgtagagatggggtctcactctattgcccacactggtgttcttggaagctttaacgagaatgtgtgtgcaaattacatgccatgttaaaacaaaatgatggaaaataaataagattaggacaaattttaaataaatagctatctaaatcaattagaaccttaggcaaaagtaccaaacactacaggttctaataagccacacaaaaaattccaacacctgatacaaatgccttacccagtcgagttaacaaagtaaagttcttggttcaggctactgactatgttggaactgggtatgtctgagacatatgggtctatagctggatattcatattaatagttaacatttaatgtacattattggatctaacactagttaataactaacatttaatgtgcattattgcatttaacgcaaaccattaaaccagtcttatgaagtggtttcttaggctaccaattattaagtaacttgaggatcagagaggttaagtagcttctctaaggttacacagtactaactagcagaatttgaatccacgtctatccaaatccaggttcccctcctatgtgctgtactcctctgcctctcatggtaggaagtgagcatttctagaatctggctggactactacaaaactgtacaacctgtctgatacctgtctccagactaagaagttttccccatcagaaagttgttggtacctaaactcctcaaaacatcttttaaaagtaatttgctgtctctaaggaagggctgcgttagaagatacaactctcccaggaaaaaagacgggcatctcatatgcttagtagtacaaaaccttacttttatcttcaaagcttaattctaacctcttgagaaattaaacaaagtaagaataataaagggaaaacttgagatgcaagaaacagctattctctgtacatacaagtttaagctgtgtttaagctggatactagtatataaaacttcctggttacagctaaaagtttatcagtaaagaaacatggaggttgggtgtggtagctcacatgtgtaatgccagcactttaggaggccaagatgggggcactccttgagcccaggagtttgaggccagcctgggcagcatagcaagaccccatctctacaaagaaataaaaaataaaaccattagccaggcgtggtggcgtgtacctatagtcccagctactcgggaggctgaggtgggaggattgcttgagcctgggagggtgaggccccagggagctgtgactgcaccactgcattccagcctgggtgacagagcgagaccctgttttcaggaaaaaaaaaaaaaaaaaagaaaaaaaaattcttacacttataattaatgtagccatgtgaagtattttaatacttgtatatattaagcactgtgtcagtgtgtgtgcactgctgagaagtgagccctggtggaggcttcgaagagcatcctggaaccccctaggctccgagaagtcctgaggtcagggagtttgcagagagcagccttggctcaatgctacagaagccagaggaggtggaatctgcaaatctccaaattcacttccacccaacttcccaaaaagtactattatccgttgttagctacttctttaggaaaatttaagaatgatctcgcttttcaccacccaatgttataccggaaatatatttcaggaagcaagtggctatcttttcttccttaataaaagccaaggcttcaaagagataacggagctgaaccgaaatagctaagccattctccccatt

SEQ ID NO: 685975 - DNA, 620 bp, Homo sapiens
tcgagtgaaaaaacatatacacacacatgtacgcatatacttttccttctgctgattgtgcctggtgtgtctgccaaacaaccacattctaggtcctgccactttggggtttagagggcttaggaatttaaaaaagaggaaaatgagggtggggtggaatatgggacaccactgtgtctcaaatgacagaaaggaaaccactgtgaagggctttccaacagtctggcctttgagaaaccaggactaaaagtttctctggactctagaaatgctagcccctgttaagctcaacatcaggaaatcatagtgaaaaaacagggaagataggagagtgaggacatgaaggagcttggctggcaggagagagggggcacagcagtcagagaagtggcatgagaatgttgggaaataggtcacataaaaagcatactttgctgcccaacagtgcyggtaagcgtctacctagaaaagggaaaagatggtttgagccttggggctgatgtcaggaacaatgacaaaggaaagacacagacaaggcatcatagcatcatctacattaaaagtagccagaaaagcttccagtatagtgccccacactaactgaccctcaaatgtgctat

SEQ ID NO: 685976 - DNA, 3593 bp, Homo sapiens
gcttgtgacttgtcttttccctctttatgacgtctttttttacttttattttttatttattcttattattttttattttttagtagagatgaggtttcgccatgttggccaggatgatcttgaactcctggcctgaagtgatccctttgctttggtttcccaaagtgctgggattacaggcatgagccgtagcacccggcctttatggtgtcttttgataacagaagttcataaatgtaacgcggtcaggctggtcgatcttgtccttagggttggtgctttttggttttgtgcttgaggatcctcccccagctgtggtcccragcaccccctcacccagagcaggcagtgacttggatgtttgggtagcgagctctgggtcaagttcctggcccacacctgccaggaacactcagctctgacttgccgtggagccccctgtgcctactttgctgtccaccctgggtgggtgtgcccctgatgcactgctgtcagcttcccctttggatctggaattttatttttctgtctaacgtgcttgtccccggttggactggcctgtattccttgggcaacccagcaggtggcttggcctttggacaattagctcctctgctcccctgaggaagggaaggaaagccccagcgagtggtggagttggcttccgagacactttccagtgacaggtctctccggagctggggtctcagggcagggcctgcagggaaacgtggactcactggggaggaagtatagcttggctctgggtttgacgacaatgacgatggtgacgatgatgatgacgacgatgctattttgttgttgttttggggttcacaggagctgagaggaagagcaagggtttgcaaatgaggaagaaagctgggaagtggtttcatgcatttcctcctctctccacgtgccagaaggtgccactcggaggctgtcttcccagcctcttgaggacaggcagaagtccttgtggcctcagttaaaggaaagaagagagaaagaaaagaatgaaagcaagaaaaggggccaggagggagtgtgagctgcaatcccagcatcctgacatgtgccctcatgcctggtcacatgcaggcacgttgcacgcccgctgggcacaggccgcttgtgtaccttggtcacttatattcttaacagccatccaggaccccgtcgagtgcataatacagccgtgtactaatatagccatccttagcagccgtccgtgcactaatacagccgtgcgggtgggctgccgtgcgctaacctagccgtccttttgatgttgggcatggggtcatttccagggtcaggttagatgttctagacagacccagcagtgggtagctttaactagtactttagtccttcctttccattatttccttaagctacattctcataaatgaaatttctgggtaaatgatgaatatttttatggttttaaaaagacagcatcaaatttcttttcaaggacaggtgctaatttggaaaatcccaaatacatgtatctattagagatggcatcctgctatattgcccaggctggtcttcaactcccggcttcaagcagtcctcttgctttggcctccccaagtgctggaactacaggcgtgagccacagtgcctgacccctcgtaatttttaaagatagagtggggcaggaaaagctcaccagaatgtctctccagcccgtgaagggctccagtcttggtgtctggaaggctctaatcagcagctctgtttttacggggccaggctggagcagacaggaaggctttatgctatctgactgataaggttgtctggggactgtttccacaccaccggtttctgtgcttgttgctgtgggcttgggtctggggacctgggacctggcacggagctatgggggctctgactgtctcagaccctgcctctgccatcttagagctcacactttaggtaggggggaatgaagcaaccggtgctctctaagcagagtcgggaagcctcatgtacccagggccttgctttggcctctcaggggtcgcaggcaagactggcttggtcaggcccagagggtgccctgggaaggtgggcctctcagttcaggctggaagcccagctagggtggtcaggccctgagggctggaggtgtaggtagaaaggtgccctcagggaaacaacagaaacgcccagtccagtggcaataaagccccaaggacaggcaggcagtgcagggcacccccaggccgccagcccagaacctttcccactggggtctgggcctttccatgggcagacagagccccacgggccagggctgagggatccattgtccccacactagcagggcccctgacccactcgcatccagcaagcgcggctgacctttctctgggtgcttggccggaatccaagcccattcttccgagcacctcagaggggggtcagggcctcagcagggacctgatcaggacctgagggtggacagtttcactttccctcagatacagggtgggaggctatttggggacaggagcccaaaagggcctgtctgctcactcagaccaaaagtgggataaaaccaaaaccacttcctgggaggacagcgtctagggtgtcagagcccgacaccgctgccctccacgcctgcctccgctgaagtgggttctgggggctccgaaggtcagcagggttccggacgctttcctgggactgcccctcccagctgtgcaggctcagaggctcctccacccactccagcatccacaacaacaacaaaaataaaaatagctcacacaggactttccccatcccagctctgtggtagatgccactctcattactcccattttacagatgaggaaactgaagcacagagaggtcaagaaacctgctccaggtcacacagccagtgagcagtggaaccggggctcagagggaggcagtctgactccagagccagaatgtacaggcttttcatgttgtgagacgacaaatacatacacacgcgcccaccagaagaaacctacaggctggggctgggggcagagtggggctccaaagccagcagacctgggactgcatcctagcactgctgatccccagacaggtgactttggtcgattatcttttacatttagagacaggatctcacactgttgcccaggctggagtgcagtggttgcaatcatagctcactgcagccttgacctcctgggctcaagcgatcctcccacctcagccccccaagtaggtaggactacagttgcataccacgcctggctaggtttttaaactttttgtagagatagagtctcactgtgttgttcaggcttgtcttgaactcctgggctcaagcgatcctcccacttcagcctcccaaaacactgggactacaggtgtgagcatctcgcccagctcattatttctgttcacttgttacttcatctgtgaaacaggagaataaaccctacgggagctgtgagaatgaaaggagatcagtcacattcacaaacatgggtggcactgtggcctctccagccatggtagataggcaggaagtgtgagttcccatccccagtcctcctccttcccag

SEQ ID NO: 685977 - DNA, 3593 bp, Homo sapiens
gcttgtgacttgtcttttccctctttatgacgtctttttttacttttattttttatttattcttattattttttattttttagtagagatgaggtttcgccatgttggccaggatgatcttgaactcctggcctgaagtgatccctttgctttggtttcccaaagtgctgggattacaggcatgagccgtagcacccggcctttatggtgtcttttgataacagaagttcataaatgtaacgcggtcaggctggtcgatcttgtccttagggttggtgctttttggttttgtgcttgaggatcctcccccagctgtggtcccaagcaccccctcacccagagcaggcagtgacttggatgtttgggtagcgagctctgggtcaagttcctggcccacacctgccaggaacactcagctctgacttgccgtggagccccctgtgcctactttgctgtccaccctgggtgggtgtgcccctgatgcactgctgtcagcttcccctttggatctggaattttatttttctgtctaacgtgcttgtccccggttggactggcctgtattccttgggcaacccagcaggtggcttggcctttggacaattagctcctctgctcccctgaggaagggaaggaaagccccagcgagtggtggagttggcttccgagacactttccagtgacaggtctctccggagctggggtctcagggcagggcctgcagggaaacgtggactcactggggaggaagtatagcttggctctgggtttgacgacaatgacgatggtgacgatgatgatgacgacgatgctattttgttgttgttttggggttcacaggagctgagaggaagagcaagggtttgcaaatgaggaagaaagctgggaagtggtttcatgcatttcctcctctctccacgtgccagaaggtgccactcggaggctgtcttcccagcctcttgaggacaggcagaagtccttgtggcctcagttaaaggaaagaagagagaaagaaaagaatgaaagcaagaaaaggggccaggagggagtgtgagctgcaatcccagcatcctgacatgtgccctcatgcctggtcacatgcaggcacgttgcacgcccgctgggcacaggccgcttgtgtaccttggtcacttatattcttaacagccatccaggaccccgtcgagtgcataatacagccgtgtactaatatagccatccttagcagccgtccgtgcactaatacagccgtgcgggtgggctgccgtgcgctaacctagccgtccttttgatgttgggcatggggtcatttccagggtcaggttagatgttctagacagacccagcagtgggtagctttaactagtactttagtccttcctttccattatttccttaagctacattctcataaatgaaatttctgggtaaatgatgaatatttttatggttttaaaaagacagcatcaaatttcttttcaaggacaggtgctaatttggaaaaycccaaatacatgtatctattagagatggcatcctgctatattgcccaggctggtcttcaactcccggcttcaagcagtcctcttgctttggcctccccaagtgctggaactacaggcgtgagccacagtgcctgacccctcgtaatttttaaagatagagtggggcaggaaaagctcaccagaatgtctctccagcccgtgaagggctccagtcttggtgtctggaaggctctaatcagcagctctgtttttacggggccaggctggagcagacaggaaggctttatgctatctgactgataaggttgtctggggactgtttccacaccaccggtttctgtgcttgttgctgtgggcttgggtctggggacctgggacctggcacggagctatgggggctctgactgtctcagaccctgcctctgccatcttagagctcacactttaggtaggggggaatgaagcaaccggtgctctctaagcagagtcgggaagcctcatgtacccagggccttgctttggcctctcaggggtcgcaggcaagactggcttggtcaggcccagagggtgccctgggaaggtgggcctctcagttcaggctggaagcccagctagggtggtcaggccctgagggctggaggtgtaggtagaaaggtgccctcagggaaacaacagaaacgcccagtccagtggcaataaagccccaaggacaggcaggcagtgcagggcacccccaggccgccagcccagaacctttcccactggggtctgggcctttccatgggcagacagagccccacgggccagggctgagggatccattgtccccacactagcagggcccctgacccactcgcatccagcaagcgcggctgacctttctctgggtgcttggccggaatccaagcccattcttccgagcacctcagaggggggtcagggcctcagcagggacctgatcaggacctgagggtggacagtttcactttccctcagatacagggtgggaggctatttggggacaggagcccaaaagggcctgtctgctcactcagaccaaaagtgggataaaaccaaaaccacttcctgggaggacagcgtctagggtgtcagagcccgacaccgctgccctccacgcctgcctccgctgaagtgggttctgggggctccgaaggtcagcagggttccggacgctttcctgggactgcccctcccagctgtgcaggctcagaggctcctccacccactccagcatccacaacaacaacaaaaataaaaatagctcacacaggactttccccatcccagctctgtggtagatgccactctcattactcccattttacagatgaggaaactgaagcacagagaggtcaagaaacctgctccaggtcacacagccagtgagcagtggaaccggggctcagagggaggcagtctgactccagagccagaatgtacaggcttttcatgttgtgagacgacaaatacatacacacgcgcccaccagaagaaacctacaggctggggctgggggcagagtggggctccaaagccagcagacctgggactgcatcctagcactgctgatccccagacaggtgactttggtcgattatcttttacatttagagacaggatctcacactgttgcccaggctggagtgcagtggttgcaatcatagctcactgcagccttgacctcctgggctcaagcgatcctcccacctcagccccccaagtaggtaggactacagttgcataccacgcctggctaggtttttaaactttttgtagagatagagtctcactgtgttgttcaggcttgtcttgaactcctgggctcaagcgatcctcccacttcagcctcccaaaacactgggactacaggtgtgagcatctcgcccagctcattatttctgttcacttgttacttcatctgtgaaacaggagaataaaccctacgggagctgtgagaatgaaaggagatcagtcacattcacaaacatgggtggcactgtggcctctccagccatggtagataggcaggaagtgtgagttcccatccccagtcctcctccttcccag

SEQ ID NO: 685978 - DNA, 3593 bp, Homo sapiens
gcttgtgacttgtcttttccctctttatgacgtctttttttacttttattttttatttattcttattattttttattttttagtagagatgaggtttcgccatgttggccaggatgatcttgaactcctggcctgaagtgatccctttgctttggtttcccaaagtgctgggattacaggcatgagccgtagcacccggcctttatggtgtcttttgataacagaagttcataaatgtaacgcggtcaggctggtcgatcttgtccttagggttggtgctttttggttttgtgcttgaggatcctcccccagctgtggtcccaagcaccccctcacccagagcaggcagtgacttggatgtttgggtagcgagctctgggtcaagttcctggcccacacctgccaggaacactcagctctgacttgccgtggagccccctgtgcctactttgctgtccaccctgggtgggtgtgcccctgatgcactgctgtcagcttcccctttggatctggaattttatttttctgtctaacgtgcttgtccccggttggactggcctgtattccttgggcaacccagcaggtggcttggcctttggacaattagctcctctgctcccctgaggaagggaaggaaagccccagcgagtggtggagttggcttccgagacactttccagtgacaggtctctccggagctggggtctcagggcagggcctgcagggaaacgtggactcactggggaggaagtatagcttggctctgggtttgacgacaatgacgatggtgacgatgatgatgacgacgatgctattttgttgttgttttggggttcacaggagctgagaggaagagcaagggtttgcaaatgaggaagaaagctgggaagtggtttcatgcatttcctcctctctccacgtgccagaaggtgccactcggaggctgtcttcccagcctcttgaggacaggcagaagtccttgtggcctcagttaaaggaaagaagagagaaagaaaagaatgaaagcaagaaaaggggccaggagggagtgtgagctgcaatcccagcatcctgacatgtgccctcatgcctggtcacatgcaggcacgttgcacgcccgctgggcacaggccgcttgtgtaccttggtcacttatattcttaacagccatccaggaccccgtcgagtgcataatacagccgtgtactaatatagccatccttagcagccgtccgtgcactaatacagccgtgcgggtgggctgccgtgcgctaacctagccgtccttttgatgttgggcatggggtcatttccagggtcaggttagatgttctagacagacccagcagtgggtagctttaactagtactttagtccttcctttccattatttccttaagctacattctcataaatgaaatttctgggtaaatgatgaatatttttatggttttaaaaagacagcatcaaatttcttttcaaggacaggtgctaatttggaaaatcccaaatacatgtatctattagagatggcatcctgctatattgcccaggctggtcttcaactcccggcttcaagcagtcctcttgctttggcctccccaagtgctggaactacaggcgtgagccacagtgcctgacccctcgtaatttttaaagatagagtggggcaggaaaagctcaccagaatgtctctccagcccgtgaagggctccagtcttggtgtctggaaggctctaatcagcagctctgtttttacggggccaggctggagcagacaggaaggctttatgctatctgactgataaggttgtctggggactgtttccacaccaccggtttctgtgcttgttgctgtgggcttgggtctggggacctgggacctggcacggagctatgggggctctgactgtctcagaccctgcctctgccatcttagagctcacactttaggtaggggggaatgaagcaaccggtgctctctaagcagagtcgggaagcctcatgtacccagggccttgctttggcctctcaggggtcgcaggcaagactggcttggtcaggcccagagggtgccctgggaaggtgggcctctcagttcaggctggaagcccagctagggtggtcaggccctgagggctggaggtgtaggtagaaaggtgccctcagggaaacaacagaaacgcccagtccagtggcaataaagccccaaggacaggcaggcagtgcagggcacccccaggccgccagcccagaacctttcccactggggtctgggcctttccatgggcagacagagccccacgggccagggctgagggatccattgtccccacactagcagggcccctgacccactcgcatccagcaagcgcggctgacctttctctgggtgcttggccggaatccaagcccattcttccgagcacctcagaggggggtcagggcctcagcagggacctgatcaggacctgagggtggacagtttcactttccctcagatacagggtgggaggctatttggggacaggagcccaaaagggcctgtctgctcactcagaccaaaagtgggataaaaccaaaaccacttcctgggaggacagcgtctagggtgtcagagcccgacaccgctgccctccacgcctgcctccgctgaagtgggttctgggggctccgaaggtcagcagggttccggacgctttcctgggactgcccctcccagctrtgcaggctcagaggctcctccacccactccagcatccacaacaacaacaaaaataaaaatagctcacacaggactttccccatcccagctctgtggtagatgccactctcattactcccattttacagatgaggaaactgaagcacagagaggtcaagaaacctgctccaggtcacacagccagtgagcagtggaaccggggctcagagggaggcagtctgactccagagccagaatgtacaggcttttcatgttgtgagacgacaaatacatacacacgcgcccaccagaagaaacctacaggctggggctgggggcagagtggggctccaaagccagcagacctgggactgcatcctagcactgctgatccccagacaggtgactttggtcgattatcttttacatttagagacaggatctcacactgttgcccaggctggagtgcagtggttgcaatcatagctcactgcagccttgacctcctgggctcaagcgatcctcccacctcagccccccaagtaggtaggactacagttgcataccacgcctggctaggtttttaaactttttgtagagatagagtctcactgtgttgttcaggcttgtcttgaactcctgggctcaagcgatcctcccacttcagcctcccaaaacactgggactacaggtgtgagcatctcgcccagctcattatttctgttcacttgttacttcatctgtgaaacaggagaataaaccctacgggagctgtgagaatgaaaggagatcagtcacattcacaaacatgggtggcactgtggcctctccagccatggtagataggcaggaagtgtgagttcccatccccagtcctcctccttcccag

SEQ ID NO: 685979 - DNA, 3593 bp, Homo sapiens
gcttgtgacttgtcttttccctctttatgacgtctttttttacttttattttttatttattcttattattttttattttttagtagagatgaggtttcgccatgttggccaggatgatcttgaactcctggcctgaagtgatccctttgctttggtttcccaaagtgctgggattacaggcatgagccgtagcacccggcctttatggtgtcttttgataacagaagttcataaatgtaacgcggtcaggctggtcgatcttgtccttagggttggtgctttttggttttgtgcttgaggatcctcccccagctgtggtcccaagcaccccctcacccagagcaggcagtgacttggatgtttgggtagcgagctctgggtcaagttcctggcccacacctgccaggaacactcagctctgacttgccgtggagccccctgtgcctactttgctgtccaccctgggtgggtgtgcccctgatgcactgctgtcagcttcccctttggatctggaattttatttttctgtctaacgtgcttgtccccggttggactggcctgtattccttgggcaacccagcaggtggcttggcctttggacaattagctcctctgctcccctgaggaagggaaggaaagccccagcgagtggtggagttggcttccgagacactttccagtgacaggtctctccggagctggggtctcagggcagggcctgcagggaaacgtggactcactggggaggaagtatagcttggctctgggtttgacgacaatgacgatggtgacgatgatgatgacgacgatgctattttgttgttgttttggggttcacaggagctgagaggaagagcaagggtttgcaaatgaggaagaaagctgggaagtggtttcatgcatttcctcctctctccacgtgccagaaggtgccactcggaggctgtcttcccagcctcttgaggacaggcagaagtccttgtggcctcagttaaaggaaagaagagagaaagaaaagaatgaaagcaagaaaaggggccaggagggagtgtgagctgcaatcccagcatcctgacatgtgccctcatgcctggtcacatgcaggcacgttgcacgcccgctgggcacaggccgcttgtgtaccttggtcacttatattcttaacagccatccaggaccccgtcgagtgcataatacagccgtgtactaatatagccatccttagcagccgtccgtgcactaatacagccgtgcgggtgggctgccgtgcgctaacctagccgtccttttgatgttgggcatggggtcatttccagggtcaggttagatgttctagacagacccagcagtgggtagctttaactagtactttagtccttcctttccattatttccttaagctacattctcataaatgaaatttctgggtaaatgatgaatatttttatggttttaaaaagacagcatcaaatttcttttcaaggacaggtgctaatttggaaaatcccaaatacatgtatctattagagatggcatcctgctatattgcccaggctggtcttcaactcccggcttcaagcagtcctcttgctttggcctccccaagtgctggaactacaggcgtgagccacagtgcctgacccctcgtaatttttaaagatagagtggggcaggaaaagctcaccagaatgtctctccagcccgtgaagggctccagtcttggtgtctggaaggctctaatcagcagctctgtttttacggggccaggctggagcagacaggaaggctttatgctatctgactgataaggttgtctggggactgtttccacaccaccggtttctgtgcttgttgctgtgggcttgggtctggggacctgggacctggcacggagctatgggggctctgactgtctcagaccctgcctctgccatcttagagctcacactttaggtaggggggaatgaagcaaccggtgctctctaagcagagtcgggaagcctcatgtacccagggccttgctttggcctctcaggggtcgcaggcaagactggcttggtcaggcccagagggtgccctgggaaggtgggcctctcagttcaggctggaagcccagctagggtggtcaggccctgagggctggaggtgtaggtagaaaggtgccctcagggaaacaacagaaacgcccagtccagtggcaataaagccccaaggacaggcaggcagtgcagggcacccccaggccgccagcccagaacctttcccactggggtctgggcctttccatgggcagacagagccccacgggccagggctgagggatccattgtccccacactagcagggcccctgacccactcgcatccagcaagcgcggctgacctttctctgggtgcttggccggaatccaagcccattcttccgagcacctcagaggggggtcagggcctcagcagggacctgatcaggacctgagggtggacagtttcactttccctcagatacagggtgggaggctatttggggacaggagcccaaaagggcctgtctgctcactcagaccaaaagtgggataaaaccaaaaccacttcctgggaggacagcgtctagggtgtcagagcccgacaccgctgccctccacgcctgcctccgctgaagtgggttctgggggctccgaaggtcagcagggttccggacgctttcctgggactgcccctcccagctgtgcaggctcagaggctcctccacccactccagcatccacaacaacaacaaaaataaaaatagctcacacaggactttccccatcccagctctgtggtagatgccactctcattactcccattttacagatgaggaaactgaagcacagagaggtcaagaaacctgctccaggtcacacagccagtgagcagtggaaccggggctcagagggaggcagtctgactccagagccagaatgtacaggcttttcatgttgtgagacgacaaatacatacacacgcgcccaccagaagaaacctacaggctggggctgggggcagagtggggctccaaagccagcagacctgggactgcatcctagcactgctgatccccagacaggtgactttggtcgattatcttttacatttagagacaggatctcacactgttgcccaggctggagtgcagtggttgcaatcatagctcactgcagccttgacctcctgggctcaagcgatcctcccacctcagccccccaagtagstaggactacagttgcataccacgcctggctaggtttttaaactttttgtagagatagagtctcactgtgttgttcaggcttgtcttgaactcctgggctcaagcgatcctcccacttcagcctcccaaaacactgggactacaggtgtgagcatctcgcccagctcattatttctgttcacttgttacttcatctgtgaaacaggagaataaaccctacgggagctgtgagaatgaaaggagatcagtcacattcacaaacatgggtggcactgtggcctctccagccatggtagataggcaggaagtgtgagttcccatccccagtcctcctccttcccag

SEQ ID NO: 685980 - DNA, 637 bp, Homo sapiens
cagacagctgcaggagaggaaagagcctggagacacagagctcagagccaggtcttaagcacaagccaaaaggggagcgggtctctcactcacactctgcttgggggggtcttggttcacacctaactggacagaaggcccgatagccggagtcagaccacagtctgtcaccacaggggaagggggacagatacattggcgatgaggtcgcagtctgtgcgacrtgacggaaacaaatccttacatcccaaagtgagtccccagcaggctttcctctctttggtggactgggtttttgtttctcaggtttcagatataaggcgtccaaataccactcgcggaattcttagcgtataccaaggtcagatgtttaagaaatgctattgcacaatgtagtttaattgacttttaggtttaaaagctcctaatttgagattcaaataggcttctaacaagtatttccattcgtaagaatcctggcttcttaggaatcggtcacctgtatttgtagttttggttttgctgtatagtaatttaacattatatacatttatagctttacattatataaggaatttatcatttaacattataaattgtttataatttaacattatataaatgccgtaatttgggg

SEQ ID NO: 685981 - DNA, 647 bp, Homo sapiens
tcttcatctgagtgctctaaactgttcccacctctgcccattacccaattccaaagtcacttccacattttcaggtatctttatagcaatgcctcacttctttggtatcaattttctgtattagttctcacactgctataaagaagtacttgagactggataatttatgaataaaagaggtttaattgacttacagttctgcaggctgtatgggaagcatgactgsggagccctcacgaaacttaaaatcatgacagaagggtgaagaggaagcaagtatatctgctcatggcagcaggagagagagtgaagggggaagtgccacatacttttaaacaaccagatcttatgagaactcacttactatcatgagcacagcagggggaaatctgtccacatgatccaatcacctaccaccaggcccctcccccaacattaagaattgcaattcaacatgagattcgggtggtaacacagagccaggccatatcaatgtgtaaacaaatctctttagcaacaggtgtgatatatagaaaacacacaaatagaatcagctgaaagtaaacaggagtgaaataaaggatgtaaagcctagaaaaaaactagacatgagggagtattgccagggacccagacgtgagggacta

SEQ ID NO: 685982 - DNA, 600 bp, Homo sapiens
taggtgcttaaactaatactggcccataaatgaatggagtcagaatgcctgtgtttgaatcactgacaagccatgtggcctcaaccttgtggatctcagcttcctcaccagtaaaatggtaataattggacctaccttttggattattgaggagattaagataatatattcacagctcatagagaaatgcctgacatatatgtgctcagtattagagattattattaccactattattattattattttgagacggagtcttgctctgtcaccccggctggagtgaagtggcgcgatgttggctcaccgcaacctctgcctcctgggttcgagagattctcctgcctcagcctcccaagtagytgggaccacaggcacatgccaccacgcccagctaattgtttttttttttttggtatttttagtagagacagggtttcactgtgttagcgaggatggtcttgatctcctgacctcatgatccacccgcctcagcctcccaaagtgctgagattacaggtgtgagcccctgtgccgggcagcactattattatgattgcatccatgtcatgttttctccagcctttggggtcttcagta

SEQ ID NO: 685983 - DNA, 600 bp, Homo sapiens
taggtgcttaaactaatactggcccataaatgaatggagtcagaatgcctgtgtttgaatcactgacaagccatgtggcctcaaccttgtggatctcagcttcctcaccagtaaaatggtaataattggacctaccttttggattattgaggagattaagataatatattcacagctcatagagaaatgcctgacatatatgtgctcagtattagagattattattaccactattattattattattttgagacggagtcttgctctgtcaccccggctggagtgaagtggcgcgatgttggctcaccgcaacctctgcctcctgggttcgagagattctcctgcctcagcctcccaagtagttgggaccacaggcacatgccaccacgcccagctaattgtttttttttttttkgtatttttagtagagacagggtttcactgtgttagcgaggatggtcttgatctcctgacctcatgatccacccgcctcagcctcccaaagtgctgagattacaggtgtgagcccctgtgccgggcagcactattattatgattgcatccatgtcatgttttctccagcctttggggtcttcagta

SEQ ID NO: 685984 - DNA, 600 bp, Homo sapiens
taggtgcttaaactaatactggcccataaatgaatggagtcagaatgcctgtgtttgaatcactgacaagccatgtggcctcaaccttgtggatctcagcttcctcaccagtaaaatggtaataattggacctaccttttggattattgaggagattaagataatatattcacagctcatagagaaatgcctgacatatatgtgctcagtattagagattattattaccactattattattattattttgagacggagtcttgctctgtcaccccggctggagtgaagtggcgcgatgttggctcaccgcaacctctgcctcctgggttcgagagattctcctgcctcagcctcccaagtagttgggaccacaggcacatgccaccacgcccagctaattgtttttttttttttgrtatttttagtagagacagggtttcactgtgttagcgaggatggtcttgatctcctgacctcatgatccacccgcctcagcctcccaaagtgctgagattacaggtgtgagcccctgtgccgggcagcactattattatgattgcatccatgtcatgttttctccagcctttggggtcttcagta

SEQ ID NO: 685985 - DNA, 600 bp, Homo sapiens
taggtgcttaaactaatactggcccataaatgaatggagtcagaatgcctgtgtttgaatcactgacaagccatgtggcctcaaccttgtggatctcagcttcctcaccagtaaaatggtaataattggacctaccttttggattattgaggagattaagataatatattcacagctcatagagaaatgcctgacatatatgtgctcagtattagagattattattaccactattattattattattttgagacggagtcttgctctgtcaccccggctggagtgaagtggcgcgatgttggctcaccgcaacctctgcctcctgggttcgagagattctcctgcctcagcctcccaagtagttgggaccacaggcacatgccaccacgcccagctaattgtttttttttttttggtatttttagtagagacagggtttcactgtgttagcgaggatggtcytgatctcctgacctcatgatccacccgcctcagcctcccaaagtgctgagattacaggtgtgagcccctgtgccgggcagcactattattatgattgcatccatgtcatgttttctccagcctttggggtcttcagta

SEQ ID NO: 685986 - DNA, 1000 bp, Homo sapiens
  misc_feature 601, 602, 603, 604, 605, 606, 607, 608, 609, 610, 611, 612,613, 614, 615, 616, 617, 618, 619, 620, 621, 622, 623, 624,625, 626, 627, 628, 629, 630, 631, 632, 633, 634, 635, 636,637, 638, 639, 640, 641, 642, 643, 644, 645, 646, 647: n = A,T,C or G
  misc_feature 648, 649, 650, 651, 652, 653, 654, 655, 656, 657, 658, 659,660, 661, 662, 663, 664, 665, 666, 667, 668, 669, 670, 671,672, 673, 674, 675, 676, 677, 678, 679, 680, 681, 682, 683,684, 685, 686, 687, 688, 689, 690, 691, 692, 693, 694: n = A,T,C or G
  misc_feature 695, 696, 697, 698, 699, 700: n = A,T,C or G
tttaaagaccactatataatgatgacacacaattattttaccaccaacccttcacttttcactgagctccagatttgtgtatataagattttagatatgcatgccaaattcataaattccaaaacaaaacccccttcctcttcataaccaactcatcagtaagttctatagtctaaacattctaatggattctacatcaacaaattttcactatctccaacactaccaatttgtccaagccatcatcattttccattagggactcccagaaataaaatcttaattgcttttcctagttcctcactatctctttcagaatscttccccctacataatagtcagattgaatttataaagcataatgacattttcctcactctcttgcttaaaaccttataataacctcccattatactttgaatagcacccaactgcttgccatgcatgatcggcagctgtctagttttctatctccctgtgcagcaaaacactcaagctgaatttcagatcatgtttaaagaaacagcagataatgacagtgattaaaaaacaatctgctcagtttttaatcccagctccgccacaccactaatgctggcannnnnnnnnnnnnnnnnnnnnnnnnnnnnnnnnnnnnnnnnnnnnnnnnnnnnnnnnnnnnnnnnnnnnnnnnnnnnnnnnnnnnnnnnnnnnnnnnnnnaaaaattatttaaaaactagttatgagatgttttcactgctggaaaagctgaaatttaagttattctttttattatactttgagttgtagggtacatttgcacaacgtgcatgtttgttacatatgtatacatgtgccatgttggtgtgctgcacccattaactcgttatttacattaggtatatctcctaatgctttccctcccccctccccctaccccacaacaggccctggagtgtgatgttccccttcctgtgtccaagttttctcattgttcaattcccacctataagtgagaac

SEQ ID NO: 685987 - DNA, 552 bp, Homo sapiens
ttttcatatttttagtagagatagggttttgccgtgttggccaggctggtctcaaactcctggactcaagtgatccacccacctatgcctcccaaagtgctgggattacaggtgtgagccactgccacctggtatcttccacattcttatctataaagtgagagtaattccagtaccttcctcagagggtggttataaggatcaagtgttttgatacaggttargtgcctagcctgatgtctaggatacagtgaaggattaataagagttagctgcttttattatttttgtaattattcactcctccatactttctttcctaattcatataatcttcaacctttttgaaagttacttatatctctttcatacagtattggaaaaggggcaagagatcttcttgctaaaagtttgagtgacaaagatattgggggctattggataagaggaaaagaacatagactcctgagccaaactgcttggtttcaaatgccagcctcatgtgaccatgggcaagttgtttaatctccctgagtctgttcctcatctgta

SEQ ID NO: 685988 - DNA, 1020 bp, Homo sapiens
gaatgcacttcttattcyggtgtgtcctttgggggaatcaaaagttttataatgtttgcaaagttacataaagatatgaaggctctgcttcctaggaagaagggttgaggtgcaagggaccctgcccatcgtgggtcgggccagagaaagagccatgtagagctttggtattttgggtcctcctgcctctgttggcttgggtgtttcaccgtctcctgaggactgcccctcaccttcctctctgtgtcctagggtcagagcagggctcggcgtcatgggcaatgctgtgaggaatgtgtgtctcctgccgggagctgctcctatgatggagttgtgcggtaccaggacgaaatgtggaagggctcggcctgtgagttctgcatgtgtgatcatggccaagtgacctgccagactggagagtgtgccaaagtggagtgtgcccgggtaagaagcaggggcatttccatttggaacgttgcagctctttccaacgggatagtgaggggtcctgcctgttctttacttcttggcagcagcagggatgtccacattgacttctcacacttcataggaccttctagtgtaaagcttccgtggtataaaatgaatgtcactgtttgttcagactagctcagaacagccccctggatcttttagctctcagtacatctggtcaaattggaagccccgagccagagacatgaaagggaaggacatgatatgggacattagcctatcaggcagcgcagctggatctcattgctgatggcctgcccagttctccccggctgtgaaacagggtccacaggtgtgctggtggccgggctcttgctgtaggccccactgacagcatttagcagaacgagagccagcacagaggggccgcttccgtggatcaggaaaaaacataacatgctttttgtttttaagagagagcaaaggggaccttataaacaattaactccattgacctctgttaacctctgctgtctgcagaatttctagaagcttctaacaaag

SEQ ID NO: 685989 - DNA, 622 bp, Homo sapiens
attcattttaataaaccttgtggacctctgggacctgttaatgcaaaaaacaaatattatgtttcaacctcatactttgcaaagctagtgtgtggctttcaraaactaaattatttatgtgaagccatatttatgtgcatataaaatgtcaatttggagtgatccgagtgttaaaaaatttatgaacaaagtaataatatggtggaatgagattaaggaagagcaactccgctaaatgtaccaccaagaaatcaatctttaattgtattactatttctttaggaaattttaaatatcgctacccacagtttaaaaattaccagctccaagaagtggatgaaatggaaatgaagcactgttatcaggcaataacgtttatttggccatggtgttcacgagggacctcgccagggttcaagggccaaaaaagtaaagagaagtcacactagacacagaaaaggtaaccagacaggtatgccaagggcagtaaacaagcgcatgccagcaaacaagaggtggaagccaggcctgcaggatcttcctcctgagccctaccgaggcatttactagctttctcaagttaacttagatgtcttgtagacactgtatcttcaagtgatct

SEQ ID NO: 685990 - DNA, 641 bp, Homo sapiens
taccccttctccctccttaaaaagaggccagtgattttgtttgttgtttgagtcacaagaattaaaagcccatcctckcttcttaaaatcccttaatctttcttctcctcttctgtaaaatgggtgtaacatctgcctcagtgagttgttaggagaaacaaatgagatttagccattaaaagagtaatgaaatttcctgaaactttaaaaaaattactttcttttttgaattttatttttccttttattaagtattttaactataacccatttttttgtttctttgtttgtttctagctttatggtctgccaatacaagaacatcatcaatctaatataaacagtttggtcaaatgtctttgggacctatctattgggacctattacttgggacctattcattactattataattaatagtattcttttggaaaatatgtcactgtattacattcatgtgttaattatgaatgcaattcacaaatctgtgataaaagttacactgcaccagacactccagacacagggctaaagaggactgatattgccacacataaagaagtatttattacaacaggaatagagtcatgtaacaagcaagtgcaagcaattgtgcttcttggtagcacaaatacagaacc

SEQ ID NO: 685991 - DNA, 2612 bp, Homo sapiens
caatggaaactggcacgatcaatccacttatttgctaaattacccgtgcttcctctactgtaattcccccctgccccctgcgagacagagtctcgctctgtcgccaggctggagtgcagtggcccggcatgatctcggctcgctgcaagctccgcttcctgggttcaggcgattcccctacctcagcctctggagtagctgggattacaggcgcgcgccaccacccccagctaattatcattattattatttttgtattttagtagagaagggatttcaccatgttgaccaggatggtctcgatctcctgatctcgtaatctgccctcctcggcctctcaaagtgctgggattataggcttgagccaccgtgtcctctactgtaattttacttgccccctgtggggtaaatattttcaacatactttttggtactgcagtaaatcacattctatcctcaaggatgaaaagcaggaagattcttattcattagaatagagtttcttcccaaacatccatgcaagtttaaaggctcctattgactatgtattagaagcactttttttgttgtgttttgttttttactgaaatgatattgttggctctacaaacaaatgaaacccaataatgggtttctctattcttgctggtcttttccttcttaaaagaatcatgtggtcattccttatttgaaaaaaaaaaagaaaaagacactgaaatgctgcaatgcctgataaggagaatctgcaacacttggrcatcttgtgtataagaaaagattcttatccttatgctactgtcatggagcttggatatttacaaacctaccgcttttgacaagcttgtgagaatttacatagtctcacaccgcccctaatttttatggcagaatgtgtctcacatttgtaatattctcagagctcctcaggattctaacctctctaactagagatggtttctgagcaggcaagaaggaaaaagaggcaaaaactgattgcatcttttgttcgcttttcaaagccagatctcgaaattcccaagaatccttaaagttggagacatgtagctaatggaattctagtcaatccacatatttatgtgtttggaaagtggctgttatcagttcttcttaaccatgtgcactattgtcagggcccttccaggcagccacacctgacgaaagctgtgattgccctagatttccactagagacctctagctgatcacaggagcctggaaagcagctctcattactgggcgtttctctagaagcagcagaggataagagtttgccagttgcccctgggagaaggtggactttaccatcaaaggaaaataattctgtataatctttctctctctcatttttttttaaagcaaattgaggcttattcaagtaggtatattgtgaaacactgaagaggaaataatttctgtgtcttaaagctatggcatacaaaagacaaaatagagatttttatagattgaaaggccccttctctaaggggctgttcatactgatatttggaggccagcctcaattctcagtgtttgagagcttctcctgacaggtatgagggagaatgagtttactcgcagtctgagagcttttaggcattattgtgaagctgaacaaagtgctccctgtgccccaccatgccccagccttttactgcagccccctatatgtgaaggatggtagccctccgggtgcataccaccttcaatgccaggcctatagctgtaatcccatgcaacagaaacagatgggatacatctgtaaggagagactggtagatgaagtttcaccgtttttccaaaaacgcaaaacacattaatctccatttgcctttgaatagtctgcagtagaaacagaggaccaaaagggaaaataatctcccctcatttaacctgtgcccctgtgaaaaattgtgatagcttgtatttcagaaactgagtgtaactaattttgccctctatccatggtcttcactacacagcagcattagaaagagaatcaaaatcggatcagatcaatgaatctataaagccttttttggaatgtattgccaccacgagttgatcagtttctccagaggccctctaatacccagttttctctggggcaattgtagatccttttgcattcatttttaggacaaatcttgtcattcttttaggtagactgtcatttgttcattcatttattcatttgtttttcaaatgcctatgctgctccagtcgctgtgatttgcaaagaaaacacaaatgatgatatacagggcttgagtgggagttcctaacattggatccacagattcctaaaagtgaacgactacttcaagatgtctgtaatcctcctaagatgtgtgtgtgctttaactatgagaaaaatccaagatttagaacaatctttaaagggattgatgtaaaaactattgtagaggctgacagttacacgagcaagtaatcagaagactacattagaattgtcatatagtaaagatacagtatgtacagtgtcacatgaggtcacaggtggagttttctcaattgtcactgatgacacaggtcagtgaaggctacagagaaggtagcatttgtgttatatgt

SEQ ID NO: 685992 - DNA, 2612 bp, Homo sapiens
caatggaaactggcacgatcaatccacttatttgctaaattacccgtgcttcctctactgtaattcccccctgccccctgcgagacagagtctcgctctgtcgccaggctggagtgcagtggcccggcatgatctcggctcgctgcaagctccgcttcctgggttcaggcgattcccctacctcagcctctggagtagctgggattacaggcgcgcgccaccacccccagctaattatcattattattatttttgtattttagtagagaagggatttcaccatgttgaccaggatggtctcgatctcctgatctcgtaatctgccctcctcggcctctcaaagtgctgggattataggcttgagccaccgtgtcctctactgtaattttacttgccccctgtggggtaaatattttcaacatactttttggtactgcagtaaatcacattctatcctcaaggatgaaaagcaggaagattcttattcattagaatagagtttcttcccaaacatccatgcaagtttaaaggctcctattgactatgtattagaagcactttttttgttgtgttttgttttttactgaaatgatattgttggctctacaaacaaatgaaacccaataatgggtttctctattcttgctggtcttttccttcttaaaagaatcatgtggtcattccttatttgaaaaaaaaaaagaaaaagacactgaaatgctgcaatgcctgataaggagaatctgcaacacttgggcatcttgtgtataagaaaagattcttatccttatgctactgtcatggagcttggatatttacaaacctaccgcttttgacaagcttgtgagaatttacatagtctcacaccgcccctaatttttatggcagaatgtgtctcacatttgtaatattctcagagctcctcaggattctaacctctctaactagagatggtttctgagcaggcaagaaggaaaaagaggcaaaaactgattgcatcttttgttygcttttcaaagccagatctcgaaattcccaagaatccttaaagttggagacatgtagctaatggaattctagtcaatccacatatttatgtgtttggaaagtggctgttatcagttcttcttaaccatgtgcactattgtcagggcccttccaggcagccacacctgacgaaagctgtgattgccctagatttccactagagacctctagctgatcacaggagcctggaaagcagctctcattactgggcgtttctctagaagcagcagaggataagagtttgccagttgcccctgggagaaggtggactttaccatcaaaggaaaataattctgtataatctttctctctctcatttttttttaaagcaaattgaggcttattcaagtaggtatattgtgaaacactgaagaggaaataatttctgtgtcttaaagctatggcatacaaaagacaaaatagagatttttatagattgaaaggccccttctctaaggggctgttcatactgatatttggaggccagcctcaattctcagtgtttgagagcttctcctgacaggtatgagggagaatgagtttactcgcagtctgagagcttttaggcattattgtgaagctgaacaaagtgctccctgtgccccaccatgccccagccttttactgcagccccctatatgtgaaggatggtagccctccgggtgcataccaccttcaatgccaggcctatagctgtaatcccatgcaacagaaacagatgggatacatctgtaaggagagactggtagatgaagtttcaccgtttttccaaaaacgcaaaacacattaatctccatttgcctttgaatagtctgcagtagaaacagaggaccaaaagggaaaataatctcccctcatttaacctgtgcccctgtgaaaaattgtgatagcttgtatttcagaaactgagtgtaactaattttgccctctatccatggtcttcactacacagcagcattagaaagagaatcaaaatcggatcagatcaatgaatctataaagccttttttggaatgtattgccaccacgagttgatcagtttctccagaggccctctaatacccagttttctctggggcaattgtagatccttttgcattcatttttaggacaaatcttgtcattcttttaggtagactgtcatttgttcattcatttattcatttgtttttcaaatgcctatgctgctccagtcgctgtgatttgcaaagaaaacacaaatgatgatatacagggcttgagtgggagttcctaacattggatccacagattcctaaaagtgaacgactacttcaagatgtctgtaatcctcctaagatgtgtgtgtgctttaactatgagaaaaatccaagatttagaacaatctttaaagggattgatgtaaaaactattgtagaggctgacagttacacgagcaagtaatcagaagactacattagaattgtcatatagtaaagatacagtatgtacagtgtcacatgaggtcacaggtggagttttctcaattgtcactgatgacacaggtcagtgaaggctacagagaaggtagcatttgtgttatatgt

SEQ ID NO: 685993 - DNA, 1762 bp, Homo sapiens
gaactccagcctgggcaacagagtgagactctgtcttgcaaaaataaataaataaataaataataataataactatcatccaccaaaagcttactatgtgacaggcaccaagtgctttagatagcagtttattaaagtctcttttagaaatgatgaggtggagcctatgagaaactaagtaacttccacccgaaagtaatgactagtgagtagtagagatggattcacacccagaactaaaactcccttatctgctatgctttactatgccaacacaggtagataggtacagatatgttgtttcaatcattccactgaaatatcccaacactttttatatcattagatactgctgaaaaattttaagggaggcaaaagaaaatcacatgatttacaacatttttcatgtccatgaaaatacattttgtttctatgtaagagctgaatcattctgttctctgatgggccattgaatttatttattaattcactgaatctctcattcatttaacaaatatttgctgggtacctactatgccccaggcacttaagattcaccaaagaacaaaatggrccaaatgctcagttcatggaattaaattccagtgaaaggaaagagatgataaatgagatggagaaagaaataagtgaaggatagggagatcaggagtggagacagttgctgctttacataggaaggccagcataggctaatctatgatcaaagacagaagggaagggaagtatatagccccacagatacttagaggaagagcattccagcagctggaagacccagtgcgtggtcaaagatatgagtgtgtacattgtgtgcatggagaaggctgatactactagagcagagtgaaccagaaagaattcctttcctttatttttaaaggctttcctttaaaggtgacaaaagaatcagtcaaaagacctgctcaaactttcttcagcccaagttcttcagcaaaagcttgggtcaataacagacccaagttcacattggagatggaaggcaggatagacttgagcaattgcttctaagagcagtggaactgatgcatggctgttcacatgtgaagttttgtttttctcagaagggcatgagctgtcctaccctttaagagaatgtgcagacatgatcgcaaacagggtacaaatgctggtccatggagcaaagtcttgggagagtttactgacccaactgggtgcattgaaaatgtgctcagggagttattatgtcatgatctgtggattaaatcctccctaattatgcagtgatgaagcaaagaagagttcctcaccacagctttgatgatgagaatttgggctcttggaaacattctcaaagacttcagtcagtcttgctctcttctttcgaatcagatcaaaaggggacacatttgggaaaagttctcaattccagtgattctttctcagcaagattggataaagttaggaaagaaagcaaggggcttggttaaaatcagtgaggatcaacttgttatattaatgtaatgtcaaatatttgtttggtttttgtgtatgatactgttaaatttatttgattatgcaaactttatttatttataagaaaaatgaatgtaaagatactaaatctgttacagaatgaaaccaaatcatgtctcttaatatttatacaagcagtggaagaaaatctctctgatgtccttgaatttacactatgtttacatttctttctttgaagctgtaatgaaatctggcatatagattc

SEQ ID NO: 685994 - DNA, 981 bp, Homo sapiens
acagagcaagattccgtcccccccccaaaaaaaaaactaagttgattttcataatcacagttttgtgaacaattttattatgtaattggttagattgaatgtatttatgaaatcaaattgacaagtctctattgtggttccattacctgtttctgggcatatttataaaaaaccaactacagtttcttttatagtaagcaaatgacagagaactgctaaacaagcaagatctttatatagcctgcttctattagagagaagagaggtgcactcacattcagaaaagcgtcttttctttcaatcttctagcactgagtgtggtttaaaaaaagtgatttggttcacactgagctctaaaaggaggatttctggagatgaagatacatgtagaggtgcccacaaaaacaggtgtggttaaatgtaaccacagaaatcagcaggtgttcgctattagtattgatttaaatgctgcaggtaattgggctaacaaccgtgagcagttgtcctcacagtgtggattcacgatggtcttttagaaggaaagagcctgaaagtctaaaagcttatcatcttactgttatttggtctttctacagtaatctctggcttgcaacagctctcgttctccacaaatcttaaaagatttaacttctcccattacagtaaagttgaggacatgttattccaggtaagacatgggatcttgccacttattcagaggaatttgtatagcaattcatatttgaatggatccttaaagtcatttactagcaatagtaggagcttaaaagaaagcakaaaatatactgagactcatcaaagaccatacgtatgtccgcactcctgagttggtgaaggaattttttttgttttttgtctgtctgtgttggcataaaacatacgattcatttccttggacttacatattttttaaaactatattttatcttctattcttactttccaagaagaacaaccaga

SEQ ID NO: 685995 - DNA, 636 bp, Homo sapiens
tggggattcagaagcttgacagaaactgaaaaagcatcttttccagtctccttattttatacatgaaaaactagaagccaaaagtttccgttacttttcctggtgacagcaaattagtggtaaagtcaggaaaagagggctgttctttattctacacccagggtggcccagaacagagcaaatcccagctagcattcattcagtctgcaaataccatatgtccccaactacatgatgttatcatatgtttaaaagcttccctttggccttttcaacctctggccaggataaatggcagtagtttaaaattgctttgacaaatcaaaaagtctttcttcctggctaagcccactacataccttgcagatggatgacttagctttgtttaactccggggtgtttatttcgggttagaatggtaagtcaagttggcagtactgccagttcacaagtactaactgttgtcttgctktttggtattatccagactctacttgcttgaaatgggacttatcaggggtttctggcagttgatacttttgctgacagaaagtgcatggaaccccattgctttagtatttgctcctgcatatcaaaaatagttcccaccttactcaactacacagaaatatgaat

SEQ ID NO: 685996 - DNA, 641 bp, Homo sapiens
taaagtaggaacagacctagcatggtggctctttcctgtaatcccagcactttgagaggccgagacaggagaatcgcctgaggccaggagttcaaggctgcagtgagctctgaatgcaccactgcacgccagcctgggcaacagagtgaccctgtctcaaaaaaaaaaaaaaaagaggccgggcgcagtggctcacgcctgtaatcccagcactttgggaggctgaggcgggtggatcatctgaggtcgggagtttgagactagcctgatcaacatggagaaaccctgtctctactaaaagtacagaaaaaataagctgggcgtggtggcgcatgcctgtaatcccagctacttgggaggctgaggcaggagaatcacttgaacccgggaagtggaggttgcggtgagccgagatcgygccattgcactccagcctgggcaacaagagtgaaaatctgtctcaaaaaaaaaaaaagaaaaagaaaagttgggttagcagttatgaatcagttgggaggggttaaccctggcacgtgagaggcaggggaaatataatgacttgaaagtcattacaaagaaaacctgtagtaagtattttaaagcaaaaaataatttgtgagttctataaattcacctttttt

SEQ ID NO: 685997 - DNA, 1084 bp, Homo sapiens
cttatattattaagcttttctgcatatattatctcctcaagcagtttttaaagtctacctgagaaaagactgggctgatgtgtctctgcaacccctaaagtacccagtagcgtctatgcacagagtaggattcaaaaatatttttaaattaattagcaattatctactaagtcctaatctttaataaccatctgcatatatctggcaatctctaaaagtcaaagtttgacctgagtccatgggtgagattaaaaaaagtcaaagttcctacggaaaaagcataaacagctatgaggacattttctgtttaatggaagataacttttcaggtgcactgattagaaaatgtgttggcagtagactggttcattgtttgtgtccttgcaggagttagtcaaaactcaaaaacgtctttgtggtataatatttctgagggaaagggaaatttgaaaaatagccttttgcttccaaaatattgaggttactcatcctccaattccctgagatcattaagacctgtttgtttgccttttccttgtgcataaggaaaccaaacaatggcttcttctttcccaatatggtaataactcttaaccctaatttctgcctagggaatctctctggcacagggaasagaaatttttctttatttacatatgtatctaacttgttctccatatgaactatgtacccatgaaagggacccatatgtttctatggtttttaattcaaatggtcatagttactaatattcgagtcttctgtggagttgacttgtacctatttcccatcatgaatagtaattctttggttatcaattgtataagtacaaataaaactatgactgataaatcttttgagtcagagagcttaagaaaaatattaaacagacttttaaaatgagtttgggattcaggattccttaaaatattatgttttgaagggtatatatagcatatatatttaatgaggtttaaactaatacctcaaagtaatctttctgtgttttcaaaagatgaggtttaagacaatacagtattactgttctcagaagcccatggtagatgaaatggtgtttagtgat

SEQ ID NO: 685998 - DNA, 1477 bp, Homo sapiens
ttttctttctatatcgagcaactattagatcaataatatagtatacacaagagataaataaatcctctcttaaggagttgatactacatctggtggatcaacatgcaaacaaccagctaaaaaaaaaaaggaatgcgtccagtgtttgagcaaagtgctattaaagcaaacaaaacaaaaagattctgattgggtgatatggcccagggtcagcttcatagagaagacaattacattgagccttgaatttgagtaaaatggaaggaaggaagccatggaagcgcatggtgtgatgggaaatcacagggcatagacatattaacaaaataggtgtagaattctgaaggagttggggggtgatgtaagactctagctctagctcagttcttattgcaaagcacagtgaaaggcacaactaaacacaaaagagtcgctgaattgaattgatttttgcaggtttgccttgtctaccaagtttggcatgcatgtctttctatttttctcttcactcaccatttgtcttttccaggtcttcattattatatttttagaaggaaataaatgcatttttgtaaaattatattgaaagtggaaaaataaaatgaacattttctgctcttcctgtgatccctactacctcacagggccatctttgcaggagacatgtactggcatagtatcgcccttatttgtttcaaggtgaacctaaatttgccatttaagtgatttggagaagtagacttgttttataagctgatggggagggatctttgctaggatggtatagtttcatctctctgttatttgtggataatccttgattcttagtattgaagaaagaatgaattataatactaattataattataagaagtattagtatcttcagtactaaggagtattaatactatgattaattgctaggcatttcctaaacattctgtgaccatttaaacagaaatcggatttctgctctgatgtgtgccattgctgawtttgataaaattcttatttacattttattcaaccacagatgtttactgatgactaaaagggcaaatacatgagaaagtatagatcttttaacagatcctgtcaccattagtaataaaataattcaaaatccgtgttcttctctttaaaacaatttaaagaaaaggctgaatatttttattctaaacgtccttgtggactgaaagctctgatccattacagactcagaaggcccatccgaggggaaaataagaattatgatctcattatttttaagattctgttatttgctcagcaaaacgtaatccaaatgtgcattttactacagctataaaaatagaaagtaaattaaacaatcctaagaaatgtctttattctatttaatggaattttaagggggtgtttccttatgctattgaaaacaaaaacacagcaacagtgttctggcagactgtcctcacaaactttggaaattaaagcaaaa

SEQ ID NO: 685999 - DNA, 1477 bp, Homo sapiens
ttttctttctatatcgagcaactattagatcaataatatagtatacacaagagataaataaatcctctcttaaggagttgatactacatctggtggatcaacatgcaaacaaccagctaaaaaaaaaaaggaatgcgtccagtgtttgagcaaagtgctattaaagcaaacaaaacaaaaagattctgattgggtgatatggcccagggtcagcttcatagagaagacaattacattgagccttgaatttgagtaaaatggaaggaaggaagccatggaagcgcatggtgtgatgggaaatcacagggcatagacatattaacaaaataggtgtagaattctgaaggagttggggggtgatgtaagactctagctctagctcagttcttattgcaaagcacagtgaaaggcacaactaaacacaaaagagtcgctgaattgaattgatttttgcaggtttgccttgtctaccaagtttggcatgcatgtctttctatttttctcttcactcaccatttgtcttttccaggtcttcattattatatttttagaaggaaataaatgcatttttgtaaaattatattgaaagtggaaaaataaaatgaacattttctgctcttcctgtgatccctactacctcacagggccatctttgcaggagacatgtactggcatagtatcgcccttatttgtttcaaggtgaacctaaatttgccatttaagtgatttggagaagtagacttgttttataagctgatggggagggatctttgctaggatggtatagtttcatctctctgttatttgtggataatccttgattcttagtattgaagaaagaatgaattataatactaattataattataagaagtattagtatcttcagtactaaggagtattaatactatgattaattgctaggcatttcctaaacattctgtgaccatttaaacagaaatcggatttctgctctgatgtgtgccattgctgaatttgataaaattcttatttacattttattcaaccacagatgtttactgatgactaaaagggcaaatacatgagaaagtatagatcttttaacagatcctgtcaccattagtaataaaataattcaaaatccgtgttcttctctttaraacaatttaaagaaaaggctgaatatttttattctaaacgtccttgtggactgaaagctctgatccattacagactcagaaggcccatccgaggggaaaataagaattatgatctcattatttttaagattctgttatttgctcagcaaaacgtaatccaaatgtgcattttactacagctataaaaatagaaagtaaattaaacaatcctaagaaatgtctttattctatttaatggaattttaagggggtgtttccttatgctattgaaaacaaaaacacagcaacagtgttctggcagactgtcctcacaaactttggaaattaaagcaaaa

SEQ ID NO: 686000 - DNA, 1477 bp, Homo sapiens
ttttctttctatatcgagcaactattagatcaataatatagtatacacaagagataaataaatcctctcttaaggagttgatactacatctggtggatcaacatgcaaacaaccagctaaaaaaaaaaaggaatgcgtccagtgtttgagcaaagtgctattaaagcaaacaaaacaaaaagattctgattgggtgatatggcccagggtcagcttcatagagaagacaattacattgagccttgaatttgagtaaaatggaaggaaggaagccatggaagcgcatggtgtgatgggaaatcacagggcatagacatattaacaaaataggtgtagaattctgaaggagttggggggtgatgtaagactctagctctagctcagttcttattgcaaagcacagtgaaaggcacaactaaacacaaaagagtcgctgaattgaattgatttttgcaggtttgccttgtctaccaagtttggcatgcatgtctttctatttttctcttcactcaccatttgtcttttccaggtcttcattattatatttttagaaggaaataaatgcatttttgtaaaattatattgaaagtggaaaaataaaatgaacattttctgctcttcctgtgatccctactacctcacagggccatctttgcaggagacatgtactggcatagtatcgcccttatttgtttcaaggtgaacctaaatttgccatttaagtgatttggagaagtagacttgttttataagctgatggggagggatctttgctaggatggtatagtttcatctctctgttatttgtggataatccttgattcttagtattgaagaaagaatgaattataatactaattataattataagaagtattagtatcttcagtactaaggagtattaatactatgattaattgctaggcatttcctaaacattctgtgaccatttaaacagaaatcggatttctgctctgatgtgtgccattgctgaatttgataaaattcttatttacattttattcaaccacagatgtttactgatgactaaaagggcaaatacatgagaaagtatagatcttttaacagatcctgtcaccattagtaataaaataattcaaaatccgtgttcttctctttaaaacaatttaaagaaaaggctgaatatttttattctaaacgtccttgtggactgaaagctctgatccattacagactcagaaggcccatccgaggggaaaataagaattaygatctcattatttttaagattctgttatttgctcagcaaaacgtaatccaaatgtgcattttactacagctataaaaatagaaagtaaattaaacaatcctaagaaatgtctttattctatttaatggaattttaagggggtgtttccttatgctattgaaaacaaaaacacagcaacagtgttctggcagactgtcctcacaaactttggaaattaaagcaaaa

SEQ ID NO: 686001 - DNA, 1477 bp, Homo sapiens
ttttctttctatatcgagcaactattagatcaataatatagtatacacaagagataaataaatcctctcttaaggagttgatactacatctggtggatcaacatgcaaacaaccagctaaaaaaaaaaaggaatgcgtccagtgtttgagcaaagtgctattaaagcaaacaaaacaaaaagattctgattgggtgatatggcccagggtcagcttcatagagaagacaattacattgagccttgaatttgagtaaaatggaaggaaggaagccatggaagcgcatggtgtgatgggaaatcacagggcatagacatattaacaaaataggtgtagaattctgaaggagttggggggtgatgtaagactctagctctagctcagttcttattgcaaagcacagtgaaaggcacaactaaacacaaaagagtcgctgaattgaattgatttttgcaggtttgccttgtctaccaagtttggcatgcatgtctttctatttttctcttcactcaccatttgtcttttccaggtcttcattattatatttttagaaggaaataaatgcatttttgtaaaattatattgaaagtggaaaaataaaatgaacattttctgctcttcctgtgatccctactacctcacagggccatctttgcaggagacatgtactggcatagtatcgcccttatttgtttcaaggtgaacctaaatttgccatttaagtgatttggagaagtagacttgttttataagctgatggggagggatctttgctaggatggtatagtttcatctctctgttatttgtggataatccttgattcttagtattgaagaaagaatgaattataatactaattataattataagaagtattagtatcttcagtactaaggagtattaatactatgattaattgctaggcatttcctaaacattctgtgaccatttaaacagaaatcggatttctgctctgatgtgtgccattgctgaatttgataaaattcttatttacattttattcaaccacagatgtttactgatgactaaaagggcaaatacatgagaaagtatagatcttttaacagatcctgtcaccattagtaataaaataattcaaaatccgtgttcttctctttaaaacaatttaaagaaaaggctgaatatttttattctaaacgtccttgtggactgaaagctctgatccattacagactcagaaggcccatccgaggggaaaataagaattatgatctcattatttttaagattctgttatttgctcagcaaaacgtaatccaaatgtgcattttactacagctataaaaatagaaagtaaattaaacaatcctaagaaatgtctttattctatttaatggaattttaaggggrtgtttccttatgctattgaaaacaaaaacacagcaacagtgttctggcagactgtcctcacaaactttggaaattaaagcaaaa

SEQ ID NO: 686002 - DNA, 751 bp, Homo sapiens
  misc_feature 385, 386, 387, 388, 389, 390, 391, 392, 393, 394, 395, 396,397, 398, 399, 400, 401, 402, 403, 404, 405, 406, 407, 408,409, 410, 411, 412, 413, 414, 415, 416, 417, 418, 419, 420,421, 422, 423, 424, 425, 426, 427, 428, 429, 430, 431: n = A,T,C or G
  misc_feature 432, 433, 434, 435, 436, 437, 438, 439, 440, 441, 442, 443,444, 445, 446, 447, 448, 449, 450, 451, 452, 453, 454, 455,456, 457, 458, 459, 460, 461, 462, 463, 464, 465, 466, 467,468, 469, 470, 471, 472, 473, 474, 475, 476, 477, 478: n = A,T,C or G
  misc_feature 479, 480, 481, 482, 483, 484: n = A,T,C or G
accacttttttcacctgatattctccacagacaattttcgtgtttctaaaaatatacgtaataacttgtataatgatgataaagctctgtattacaattgaataagacaggaaaactatttcaagttatttgctgtgtgtatcatttaggaatcttctaatttcaagtaatagaaaattaccacccacaataagctagcaagacatggaacctcaccatctcatagacaggagtggtcctggatccagaactccagaactgagaccaccatcagctcccctgcctctgggctgatcattcttaccctgactccctcccactgtggtgagcaggtggctgttgagtctcctagagatatccctcgagctgcctgtggagagaaaannnnnnnnnnnnnnnnnnnnnnnnnnnnnnnnnnnnnnnnnnnnnnnnnnnnnnnnnnnnnnnnnnnnnnnnnnnnnnnnnnnnnnnnnnnnnnnnnnnntggttgttgcgtagaaaataaaccataagagcgagacaggaaggaagaagaaaagtcttcattaagctactgcatttgtgccagattattaagtaaagggaagataggagagaatgctgaaacttaagaatgtctttataaaatcgtgtgaraaataatattttggcaagcgaagttctcaaaacaaaggctaaacgcataataacaaattgcacacacattgcctcttgtaacttattaatgaaagattgtgctgctgaagaatta

SEQ ID NO: 686003 - DNA, 1575 bp, Homo sapiens
tgcggcaggacacaatttggtccccagcaagggtgctgacaaagcgaaacactatcagtcggcagagaagggactattccatgaggatattcaacgctggttctgcaaagtatcaccaaaaagcccgctgaaaagacaaagccaggttcactgcttatgcacccagggccagcagtactcccacagggaatccgtgctgaaccattaggtaaaacacaattcaggatatttattgagactgaaaaatctgacttatggtgcatctttcaattcaggatattggttaatttggggaaagattatgatataattgtttagaatttgtggccagacaatgccaagaattttgaggccgaattgttcagaaagtcttagactgttttaaactggcttttgattttcctattgaagaacggatgagtctttggagtaagcaataaagttagttgcaactttatctkctggtgcaagcatctcctaggatcctaagcgaaacacaagtaaagttatgttcttgaaaacagggaattataaaatcatgttaataaaaatggcaagctgcgtgggtggtttccatcctcaaaggagaaccaactatctacagaggaaggaaagacatctggaagaggtggcttacactgaagagggagaagaaaaaaaaaagatattttacacaacaaaggcaaactcagtaagatacaactgcagtgcccaaatggctttaagaactgaagagaaaaacaaatttaactagtacacttagaaattccatgaaggaaatgggaaaactatgggtaacgtatgagatccattgaagcctcgtatgtataattcatccaagaacagtagaccctaaagaaaacagaagagaccccagaatatgaatgatgatgaaaaaatatttaacaataaagttggtgtatttgtgataactgatgacaaagaaaattcacataacaagttattacaaatgagaaataagataaacaaaataattcaataatttgcattgcttaattgtggaaatcccagtaattcaaagcatagtgaaactctcatggtggaaataaggagtgaaggtaagaacacaaaagttgactgaaggaatgtgaagcaggtcagtgagtctccctcaacatccccttctcccctaagggagccggggtgtcaagagaaattaaaacagaacaccccagactctgggcgttgggtgcaggcatgcaatacggtactcaaaacaggttgatgggctgaaagttaatatgctgaactacaaaatcctttgtttccgccttccaatggggcctcggaacattgtcaaccagtcatatacctttcaccctagcagaaggttgatgagatttttttgctgaaacttaaccatcactgagaacatatatacttatgctgatgcttggcccccccccccccccacgatgaaacggccagatggcggttgtcacctgattacccttaaatgacacacactggctgttaagactcggttattcacgcaagctttaattaccttcctaggcctctcttttaaatagaagtgtgtaagcagtcttgggc

SEQ ID NO: 686004 - DNA, 1575 bp, Homo sapiens
tgcggcaggacacaatttggtccccagcaagggtgctgacaaagcgaaacactatcagtcggcagagaagggactattccatgaggatattcaacgctggttctgcaaagtatcaccaaaaagcccgctgaaaagacaaagccaggttcactgcttatgcacccagggccagcagtactcccacagggaatccgtgctgaaccattaggtaaaacacaattcaggatatttattgagactgaaaaatctgacttatggtgcatctttcaattcaggatattggttaatttggggaaagattatgatataattgtttagaatttgtggccagacaatgccaagaattttgaggccgaattgttcagaaagtcttagactgttttaaactggcttttgattttcctattgaagaacggatgagtctttggagtaagcaataaagttagttgcaactttatcttctggtgcaagcatctcctaggatcctaagcgaaacacaagtaaagttatgttcttgaaaacagggaattataaaatcatgttaataaaaatggcaagctgcgtgggtggtttccatcctcaaaggagaaccaactatctacagaggaaggaaagacatctggaagaggtggcttacactgaagagggagaaraaaaaaaaaagatattttacacaacaaaggcaaactcagtaagatacaactgcagtgcccaaatggctttaagaactgaagagaaaaacaaatttaactagtacacttagaaattccatgaaggaaatgggaaaactatgggtaacgtatgagatccattgaagcctcgtatgtataattcatccaagaacagtagaccctaaagaaaacagaagagaccccagaatatgaatgatgatgaaaaaatatttaacaataaagttggtgtatttgtgataactgatgacaaagaaaattcacataacaagttattacaaatgagaaataagataaacaaaataattcaataatttgcattgcttaattgtggaaatcccagtaattcaaagcatagtgaaactctcatggtggaaataaggagtgaaggtaagaacacaaaagttgactgaaggaatgtgaagcaggtcagtgagtctccctcaacatccccttctcccctaagggagccggggtgtcaagagaaattaaaacagaacaccccagactctgggcgttgggtgcaggcatgcaatacggtactcaaaacaggttgatgggctgaaagttaatatgctgaactacaaaatcctttgtttccgccttccaatggggcctcggaacattgtcaaccagtcatatacctttcaccctagcagaaggttgatgagatttttttgctgaaacttaaccatcactgagaacatatatacttatgctgatgcttggcccccccccccccccacgatgaaacggccagatggcggttgtcacctgattacccttaaatgacacacactggctgttaagactcggttattcacgcaagctttaattaccttcctaggcctctcttttaaatagaagtgtgtaagcagtcttgggc

SEQ ID NO: 686005 - DNA, 2421 bp, Homo sapiens
ggcaaggtctgaagagttattatatattttgctcatctctcttgtttccctttgagcactttgttaaggtccgaggagactgaggaaccctatgcacgttcataaatctacatgaccttctggagcaagcctcctgctccgagtagtaatgtctgagttgaagacccaagtaagataacacacacatgttgttgtaagtcattgatattttgaagatgttttatgagcagcaaacactaacacagcacttcgatgctcacaaaatttcaaggacttttcatagcctgaagaacaaagatcatcatactgattctcagagcattctacaattatgcctcacctgtctattagtttaatctttttcaattctctttcattaaccaagtctttttttttttttttttttgagacggaatcttgctctgtcgcccaggctagagcacagtggtgcaacctcagctcggctcactgcaaactctaccgcccaggttcatgccattctcctgcctcagcctcccaagtaactgggactacaggcgcccgccaccacgcctggctagttttttgtatttttagtagagatggggtttcatcatgttagccagggtggtctcgatctcctgacctcgtgatccgcccatctcggcctcccaaggtgctgggattacaggcgtgaggcactgcacccggcctaaccaattattttactaagacgacttagtccatgagcagttaacactgaaaatatatttatatggtcaagctcaacatatatttccttgtagcatgttccacaaaacctctccatttcaacaggctatctccttcttgataggcctttttttttttaaataagaattactttgctctcttttatctttaaatctagaaatacacaattttaatttcacagtctaccctataaaaaagctctaaactttttggtggcagaaactgtactcttcatgctgacatattgagtggtacattaccatattgttttatacatagtggcaagcwcattagatttgattaaattagcgagggaaaatattatggaatatattgtgtaaacaataggatggaaaatatgggaaggggttcagtaaacaattagccctctgtaaatgtgacttgttataatttttctcggaatgaatcataaacagcagatggaaattgattaccacaaatgaatcctctgccataattaacaaagtcagaacctggagcatgggtagatctctaaccacgagcaaccaggcttgtgcagaatcactccaaataactgacagtgacaaacaggtgtattagagtggtaattatccatgcattggagattggatcccagctaggactctagtaccctgaccaactccctctgccctcccctcccaggaacataaaataaactctgatttcctaggagataaaacctaaagctagcccaggtcctagaaatgagagtcctatggtatgttgaggaaaggacaatttatcccatttaactattaccagagtaaaaccctccatccttttccttttccttttattttacttagtttgttcgagttttagaattgaagtgaactgaggaacagcttttctgccactcacggtctggcagtggatggctttggtctgctgttcccatagtatgacccacccctggctgcactcacggtctggcagtggatgccttcaatccgctgttcccatagtatgacccaccgttggcttcagttgataattcatagtctggcagtggatgccttcagtccgctgttcccgtagtatgacccagccttggctgcagttgataactcacggtctggcagtggatgccttcagtccgctgttcccatagtatgacccacccttggctacagttgataacttatggtctggcagtggatgccttcagtccgctgttcccgtagtatgacccagccttggctgcagttgataactcacggtctggcagtggatgccttcggtccgctcttcccgtagtatgacccagccttggctgcagttgataactcacggtctggcagtggatgccttcagtccgctgttcctgtagtatgacccagccttggctgcagttgataactcacggtctggcagtggatgccttcggtccgctgttcccgtagtatgacccagccttggctgcagttgataactcacggtctggcagtggatgcctttggtctgctgttcccatagtatgacccacccttggctgcaggtgattagtcatggagtgggtagctagggagacagtgtttaccctggttaggtcacagaatgcatgaggtgtttccgacaccaattgttttccaccgtgtgtaaaggaaatcagaaaagagccagtcagtgaaagagataaacaacacccgtgtgcaggggtgaaag

SEQ ID NO: 686006 - DNA, 498 bp, Homo sapiens
ccaacatggtgaaaccccatctctactaaaaatacaaaaaatttgtcaggcatgatggcaggtgcctgtagtcccagctacttgggagactgaagcagaagaattgcttgaacctgggaggtggagtttgccgtgagctgagatggtgccattgcactccagcctgggcgacaagagagaaactcagtctcaaaaagaaaaaaaaagagagagagaaaatgtgtgggtatcaaatctcgtcgaaatgcaccctcataactggtccataacatttcaataacacatytgctatgacttatcttgagtgtatttaataaatatgcagttttaagaagcaaattcacaacaagatgtagaccaagttaaatgcttctataaagatgagctagtgtattaattctccttcagcaattttggggggcagtctttatataccttccattatggaagacagggtcaacaagccatttatggtagctgatttggggggaaaagtca

SEQ ID NO: 686007 - DNA, 498 bp, Homo sapiens
ccaacatggtgaaaccccatctctactaaaaatacaaaaaatttgtcaggcatgatggcaggtgcctgtagtcccagctacttgggagactgaagcagaagaattgcttgaacctgggaggtggagtttgccgtgagctgagatggtgccattgcactccagcctgggcgacaagagagaaactcagtctcaaaaagaaaaaaaaagagagagagaaaatgtgtgggtatcaaatctcgtcgaaatgcaccctcataactggtccataacatttcaataacacatttgctatgacttatcttgagtgtatttaataaatatgcagttttaagaagcaaattcacaacaagatgtagaccaagttaaatgcttctataaagatgagctagtgtattaattctccttcagcaattttggggggcagtctttatayaccttccattatggaagacagggtcaacaagccatttatggtagctgatttggggggaaaagtca

SEQ ID NO: 686008 - DNA, 602 bp, Homo sapiens
ctaaacctcagtttctaaatcacacagtaagcactattgaagtgtgagttgctacagtgtattacaacaattctgtttatttgccctaagactgcttatcctaacatcatgttttaaattgaccctttaattcttcgtttttctttttgtgccctctttactaaaaaaaaagtatatttaagcttcattgtctctacttcgtatttcctatttatttmttgtaatcaggcttctgtccctaccaccagtctcaagttagctagttcatagtttatatccagggagctaaatatccatgtccaaaggccttttctaatttttcatctgctgtgacttctgcaattaccacttagaatttctctgcaatattttatttaatattgtacttcctcctacttctgatgattctctcttctttaatgcttcttacttcttcttacccctgaaacttagcatttttcagtgttgtcttaacagtcatcattctttattatttggagagcttcttctctcctgtaatctttctgaatgatttacagacctgtatttttgagcccccggacttttatatacagataagacctgggtcttgctagcacatt

SEQ ID NO: 686009 - DNA, 602 bp, Homo sapiens
ctaaacctcagtttctaaatcacacagtaagcactattgaagtgtgagttgctacagtgtattacaacaattctgtttatttgccctaagactgcttatcctaacatcatgttttaaattgaccctttaattcttcgtttttctttttgtgccctctttactaaaaaaaaagtatatttaagcttcattgtctctacttcgtatttcctatttatttattrtaatcaggcttctgtccctaccaccagtctcaagttagctagttcatagtttatatccagggagctaaatatccatgtccaaaggccttttctaatttttcatctgctgtgacttctgcaattaccacttagaatttctctgcaatattttatttaatattgtacttcctcctacttctgatgattctctcttctttaatgcttcttacttcttcttacccctgaaacttagcatttttcagtgttgtcttaacagtcatcattctttattatttggagagcttcttctctcctgtaatctttctgaatgatttacagacctgtatttttgagcccccggacttttatatacagataagacctgggtcttgctagcacatt

SEQ ID NO: 686010 - DNA, 1070 bp, Homo sapiens
tttaaaaatagcagtgtttcagtatatctccatatttgttgctgtgtctgaacttggattgaatttttatttaatctaagggagaaaaagagtaygtactatttactgatctaactgtagctgctatagtttttttttttttttttgccttatattctagttgtataacatttgtctatatgatggaacattttacaaagttttaataatatattttataatcaaatatattcaaaatatttgcatttcaacataatataggatcatgtaatcaattaataatttaagatattagatgttttcttttcatatttaagtcttatatattttacatttacatcacatctcaattcagactaaccacattgaaggtactcagtagccacctgtgactaatggcgactgtattggacagtgcaattctaaatcataagacccaaattctttactacttttagagattgaatgaattgcttatgagttgaaattatcacatgaagactggtagaaatgtttgcatatggccggcaatgtatctggtgggtgggagggttccagctcatgagtcctagggttgtaaacagctctgctttaataaaaatgaacaagcttcccaaatatattgctgatgctgtaaagaataccttggcctctgaattaagataggttaggttgtgctacttagtctaaccctctaacctcagtggcataaaataataaagatttttttttcttggtcatagtatttattgttccttgtccagtatggatgagcaaaacgattgtgggttgtacttcatatttttaggttctggtatgaataaaattttttaaacttttactagggaatatttcaaataacacaaatacagagaatactgtaatgaactcatgtttacattgttcagcttccctggtattatatgatctaagcatgaatacttcagcatgtatctattttttaaagttataattttacgcaacaaaattaatgataatttcctggtgatatacccgctctgtattgattgtttcaaagatgcttctttacagttggcttgttcaaataa

SEQ ID NO: 686011 - DNA, 1070 bp, Homo sapiens
tttaaaaatagcagtgtttcagtatatctccatatttgttgctgtgtctgaacttggattgaatttttatttaatctaagggagaaaaagagtacgtactatttactgatctaactgtagctgctatagtttttttttttttttttgccttatattctagttgtataacatttgtctatatgatggaacattttacaaagttttaataatatattttataatcaaatatattcaaaatatttgcatttcaacataatataggatcatgtaatcaattaataatttaagatattagatgttttcttttcatatttaagtcttatatattttacatttacatcacatctcaattcagactaaccacattgaaggtactcagtagccacctgtgactawtggcgactgtattggacagtgcaattctaaatcataagacccaaattctttactacttttagagattgaatgaattgcttatgagttgaaattatcacatgaagactggtagaaatgtttgcatatggccggcaatgtatctggtgggtgggagggttccagctcatgagtcctagggttgtaaacagctctgctttaataaaaatgaacaagcttcccaaatatattgctgatgctgtaaagaataccttggcctctgaattaagataggttaggttgtgctacttagtctaaccctctaacctcagtggcataaaataataaagatttttttttcttggtcatagtatttattgttccttgtccagtatggatgagcaaaacgattgtgggttgtacttcatatttttaggttctggtatgaataaaattttttaaacttttactagggaatatttcaaataacacaaatacagagaatactgtaatgaactcatgtttacattgttcagcttccctggtattatatgatctaagcatgaatacttcagcatgtatctattttttaaagttataattttacgcaacaaaattaatgataatttcctggtgatatacccgctctgtattgattgtttcaaagatgcttctttacagttggcttgttcaaataa

SEQ ID NO: 686012 - DNA, 1441 bp, Homo sapiens
tttgtattcccctcatgggatgaatttaagagacaaattctcaaaataatgtgttttatatatagagagaaaggctaatgctttaagtttaaaaatcagtatttaaaagtttataagtaggctgggcatggtggctcacacctrtaatcccagcactttaggagtccaaggagggcggatcacctgaggtcagaagttccagaccagcctggccaacatggcaaaaccccatctctactacaaatacaaaaattagccgggcctggcagcaggtgcctgtaatcccagctactcaggaggctgaggtgggagaatcacttgaacccaggaggcggaggttacagtgagccgagatcctgccactgcactccagcctgggtgacagagtgagactctgtctcaaaaaataaaataaaataatataagtggtatgatcacaaccatctcaaacagcccccttcccccgacccaaaacccaaacaaaaacaaaaccctgccactgcctggaaaataagacctggccaggtgccatggctcacgcctgaaatcccagcactttgggaggccgaggtgggcaggtcattagagcccaaaagtttgagaccagcctgggcaacacggaaaaaccccgtctctacagaaaaaatgcaaaaaaaaaaaaaaaaggcagatgtggttgcatgtgcctatggttccagctacttggggggctgaggtgggcagattgcttgggcccaggaggttgaggttgcagcaagctgagattgcaccactgcactccagcctgggcaactgagcgagaccctgtctcaaaaaaaaaaaaaataggaaagcaagaaggaaggaaggaaagaaggaaggaaggagggaaggggaagggaagagaggggaggagacgagactggctgtccagatggcattgctggtgatatttggatggtctgaccttgggtggtctccctgcctttttcttgtggcattttcagttattttcacagtcagcttccttcacatttcgaatgagatacagcccacctcaccgccgaaagaagacccctcatgggggtctggtgaatctgggtttgtcgttttcggatgctggggcagtgcgtctgggagggagcggggctgtggattcctggtgggtcaccgtggctgcttgaggctttggtccctgccgctgccatccaccctgagcatctgtggccctggagagcgaaagacttgtttcctctggtggctccgagcatatgtggcaaagctgtgtcttatttacctcccacatcatcatcctctcctaccctcatatgacatttctgcctgtccccttgacagtggagtagcagctgcatgttccgaacgtccccaccctgccattttcctaaaatgctcactaacgttatttgactctcaggatgtgtagacattttaaagctgtatt

SEQ ID NO: 686013 - DNA, 1441 bp, Homo sapiens
tttgtattcccctcatgggatgaatttaagagacaaattctcaaaataatgtgttttatatatagagagaaaggctaatgctttaagtttaaaaatcagtatttaaaagtttataagtaggctgggcatggtggctcacacctgtaatcccagcactttaggagtccaaggagggcggatcacctgaggtcagaagttccagaccagcctggccaacatggcaaaaccccatctctactacaaatacaaaaattagccgggcctggcagcaggtgcctgtaatcccagctactcaggaggctgaggtgggagaatcacttgaacccaggaggcggaggttacagtgagccgagatcctgccactgcactccagcctgggtgacagagtgagactctgtctcaaaaaataaaataaaataatataagtggtatgatcacaaccatctcaaacagcccccttcccccgacccaaaacccaaacaaaaacaaaaccctgccactgcctggaaaataagacctggccaggtgccatggctcacgcctgaaatcccagcactttgggaggccgaggtgggcaggtcattagagcccaaaagtttgagaccagcctgggcaacacggaaaaaccccgtctctacagaaaaaatgcaaaaaaaaaaaaaaaaggcagatgtggttgcatgtgcctatggttccagctacttggggggctgaggtgggcagattgcttgggcccaggaggttgaggttgcagcaagctgagattgcaccactgcactccagcctgggcaactgagcgagaccctgtctcaaaaaaaaaaaaaataggaaagcaagaaggaaggaaggaaagaaggaaggaaggagggaaggggaagggaagagaggggaggagacgagactggctgtccagatggcattgctggtgatatttggatggtctgaccttgggtggtctccctgcctttttcttgtggcattttcagttattttcacagtcagcttccttcacatttcgaatgagatacagcccacctcaccgccgaaagaagacccctcatgggggtctggtgaatctgggtttgtcgttttcggatgctggggcagtgcgtctgggagggagcggggctgtggattcctggtgggtcaccgtggctgcttgaggctttggtccctgccgctgccatccaccctgagcatctgtggccctggagagcgaaagacttgtttcctctggtggytccgagcatatgtggcaaagctgtgtcttatttacctcccacatcatcatcctctcctaccctcatatgacatttctgcctgtccccttgacagtggagtagcagctgcatgttccgaacgtccccaccctgccattttcctaaaatgctcactaacgttatttgactctcaggatgtgtagacattttaaagctgtatt

SEQ ID NO: 686014 - DNA, 1721 bp, Homo sapiens
taaataaataaaggcagtggggaaggtcaagtctaccctagaaagccaccatgaccatgtggtggaccacacccacggggtggacagaaccccagagtcagtgtacgtcccaccagcctggtctagcaggacagaccaaatgggaaccgttagggaaatatgccatacgggagccaccaccatggcgggccctcactctaggggccgagcttaaccctcccctgttcagcccacacagctggggctcagccccacttgacacatgaggaaacccagagccaagcaaggcaaaaagatcatgctcaagccgggtaatcccagcactttgggaggccaaggcggggagatcacttgagcccaggaggctgggcaacacagggagactccatctttataaaaaatttaaaaattagttgggcgtggtggcataaacctgtttcccagctatttgggaggctgaggcgggagaatcacttgtgcccaggagttccaggctgcagtgggccatgatggtgccactgcactcccacctaggaaacagaacaagaccgcatctcaaaaagaaaaaaacaaaaaaaaaaaagcacaaagagatcacgtccaaggttacatggttagcacgcggcaggggactgggtctcatacccagattctggcagtgctcttggggtctccgggcagctggactccccctctggagggtggggctgggcttttctgtctccctgctgctctggtttcagcccccgggctcatgaaaagtcagggagagcacccggggctaccaggctgggcctgggcaaagggcaccccagcctggaactacgtttggagctggagtagggggccttgtccctggctgtccccaacctgaggacagtggagctagaggagcacaccgggttcacatcctgggacccacccatgacacagaggaacctgtgcacaaataaaaccactgctgcaagatggttgaaaataagaactgcgtccagctgtgcctgcaaggacaggagtcaggggcctctgagccccctttccttccttcttcacttttccaggctggaaaagatgtagcaatcaaagggtcaaaaatgcagattccctgatgcatcagaacacagcagcaatggtgaatgctgtgggggatgtgccctcccctgcccctgggctgtaagcgccaccagccctggccgtgtccccgagccgcagagcagcagcggaaaggcagaggccagccctgtgggcagygagagggctcaggtgagactccaggtctcagaggggctctgtggcgggcaggctctggcagccctgggggcatccagcagagcccaagtggcccaggttcatgttaaggttagagaacattttgggcaggtggccggcctggctaggacggtggccacagctcctgctgcaagttcactgcgggccccttcttcccctgcttgctgcggcctggccacggcttcccagatctgcctgggtcccctccccacctccccaccacacactggaggggaagagagcgcttgggttcagcggactttaaccacaaaggcagcaacgatgggacttctggggctgtcacctgtcacatctccgccaggctctcaggtgggtgggtggggtctaatgaccaacttcagggcctgccctaggtcagaagcccccagagccaggtcctgcttatgtccagctcagcagcaggtcgtgtg

SEQ ID NO: 686015 - DNA, 1721 bp, Homo sapiens
taaataaataaaggcagtggggaaggtcaagtctaccctagaaagccaccatgaccatgtggtggaccacacccacggggtggacagaaccccagagtcagtgtacgtcccaccagcctggtctagcaggacagaccaaatgggaaccgttagggaaatatgccatacgggagccaccaccatggcgggccctcactctaggggccgagcttaaccctcccctgttcagcccacacagctggggctcagccccacttgacacatgaggaaacccagagccaagcaaggcaaaaagatcatgctcaagccgggtaatcccagcactttgggaggccaaggcggggagatcacttgagcccaggaggctgggcaacacagggagactccatctttataaaaaatttaaaaattagttgggcgtggtggcataaacctgtttcccagctatttgggaggctgaggcgggagaatcacttgtgcccaggagttccaggctgcagtgggccatgatggtgccactgcactcccacctaggaaacagaacaagaccgcatctcaaaaagaaaaaaacaaaaaaaaaaaagcacaaagagatcacgtccaaggttacatggttagcacgcggcaggggactgggtctcatacccagattctggcagtgctcttggggtctccgggcagctggactccccctctggagggtggggctgggcttttctgtctccctgctgctctggtttcagcccccgggctcatgaaaagtcagggagagcacccggggctaccaggctgggcctgggcaaagggcaccccagcctggaactacgtttggagctggagtagggggccttgtccctggctgtccccaacctgaggacagtggagctagaggagcacaccgggttcacatcctgggacccacccatgacacagaggaacctgtgcacaaataaaaccactgctgcaagatggttgaaaataagaactgcgtccagctgtgcctgcaaggacaggagtcaggggcctctgagccccctttccttccttcttcacttttccaggctggaaaagatgtagcaatcaaagggtcaaaaatgcagattccctgatgcatcagaacacagcagcaatggtgaatgctgtgggggatgtgccctcccctgcccctgggctgtaagcgccaccagccctggccgtgtccccgagccgcagagcagcagcggaaaggcagaggccagccctgtgggcagcgagagggctcaggtgagactccaggtctcagaggggctctgtggcgggcaggctctggcagccctgkgggcatccagcagagcccaagtggcccaggttcatgttaaggttagagaacattttgggcaggtggccggcctggctaggacggtggccacagctcctgctgcaagttcactgcgggccccttcttcccctgcttgctgcggcctggccacggcttcccagatctgcctgggtcccctccccacctccccaccacacactggaggggaagagagcgcttgggttcagcggactttaaccacaaaggcagcaacgatgggacttctggggctgtcacctgtcacatctccgccaggctctcaggtgggtgggtggggtctaatgaccaacttcagggcctgccctaggtcagaagcccccagagccaggtcctgcttatgtccagctcagcagcaggtcgtgtg

SEQ ID NO: 686016 - DNA, 1721 bp, Homo sapiens
taaataaataaaggcagtggggaaggtcaagtctaccctagaaagccaccatgaccatgtggtggaccacacccacggggtggacagaaccccagagtcagtgtacgtcccaccagcctggtctagcaggacagaccaaatgggaaccgttagggaaatatgccatacgggagccaccaccatggcgggccctcactctaggggccgagcttaaccctcccctgttcagcccacacagctggggctcagccccacttgacacatgaggaaacccagagccaagcaaggcaaaaagatcatgctcaagccgggtaatcccagcactttgggaggccaaggcggggagatcacttgagcccaggaggctgggcaacacagggagactccatctttataaaaaatttaaaaattagttgggcgtggtggcataaacctgtttcccagctatttgggaggctgaggcgggagaatcacttgtgcccaggagttccaggctgcagtgggccatgatggtgccactgcactcccacctaggaaacagaacaagaccgcatctcaaaaagaaaaaaacaaaaaaaaaaaagcacaaagagatcacgtccaaggttacatggttagcacgcggcaggggactgggtctcatacccagattctggcagtgctcttggggtctccgggcagctggactccccctctggagggtggggctgggcttttctgtctccctgctgctctggtttcagcccccgggctcatgaaaagtcagggagagcacccggggctaccaggctgggcctgggcaaagggcaccccagcctggaactacgtttggagctggagtagggggccttgtccctggctgtccccaacctgaggacagtggagctagaggagcacaccgggttcacatcctgggacccacccatgacacagaggaacctgtgcacaaataaaaccactgctgcaagatggttgaaaataagaactgcgtccagctgtgcctgcaaggacaggagtcaggggcctctgagccccctttccttccttcttcacttttccaggctggaaaagatgtagcaatcaaagggtcaaaaatgcagattccctgatgcatcagaacacagcagcaatggtgaatgctgtgggggatgtgccctcccctgcccctgggctgtaagcgccaccagccctggccgtgtccccgagccgcagagcagcagcggaaaggcagaggccagccctgtgggcagcgagagggctcaggtgagactccaggtctcagaggggctctgtggcgggcaggctctggcagccctgggggcatccagcagagcccaagtggcccaggttcatgttaaggttagagaacattttgggcaggtggccggcctggctaggacggtggccacagctcctgctgcaagttcactgcgggccccttcttcccctgcttgctgcggcctggccacggcttcccagatctgcctgggtcccctccccacctccccaccacacactggaggggaagagagcgcttgggttcagcggactttaaccacaaaggcagcaacgatgggacttctggggctgtcacctgtcacatctccgccaggctctcagstgggtgggtggggtctaatgaccaacttcagggcctgccctaggtcagaagcccccagagccaggtcctgcttatgtccagctcagcagcaggtcgtgtg

SEQ ID NO: 686017 - DNA, 607 bp, Homo sapiens
tcattgtcgaaaatcttagctaaatggctcttcatcttgagatcatttctgtttctataataatttggcaatgatctcaaaacaatttgaaaagaaaagctaagtaaacaactcaataaagamtattcctttttaaaaaattttttttttagaaagtaggttagagctaaccaggggctctagggagagagaagtggggagtccttatttattgattatggagtttttgtctggggtgataaaaattgtttggaaatagatactgattatggttgcacagcattgtaaatgtaaatgatgccactgaatggtacatttaaaaatgaataaaatgtcaaattttacttatatatatctaaccataatttttaaaaattaataatgcaatataccaaaaacaattgaattgtacaaataagtgaactgcagggtatgtgggagtatatctgaataaagttgttgaaaaaaaaagaacatctcttcttatgaaataaaagaaaatgtttttagaagatgtggtcattttaggatgaataatcagctctcttttgaatacgaagagtttcaaggattaattttcttaacagaataccaagaccatcaggag

SEQ ID NO: 686018 - DNA, 607 bp, Homo sapiens
tcattgtcgaaaatcttagctaaatggctcttcatcttgagatcatttctgtttctataataatttggcaatgatctcaaaacaatttgaaaagaaaagctaagtaaacaactcaataaagaatattcctttttwaaaaattttttttttagaaagtaggttagagctaaccaggggctctagggagagagaagtggggagtccttatttattgattatggagtttttgtctggggtgataaaaattgtttggaaatagatactgattatggttgcacagcattgtaaatgtaaatgatgccactgaatggtacatttaaaaatgaataaaatgtcaaattttacttatatatatctaaccataatttttaaaaattaataatgcaatataccaaaaacaattgaattgtacaaataagtgaactgcagggtatgtgggagtatatctgaataaagttgttgaaaaaaaaagaacatctcttcttatgaaataaaagaaaatgtttttagaagatgtggtcattttaggatgaataatcagctctcttttgaatacgaagagtttcaaggattaattttcttaacagaataccaagaccatcaggag

SEQ ID NO: 686019 - DNA, 607 bp, Homo sapiens
tcattgtcgaaaatcttagctaaatggctcttcatcttgagatcatttctgtttctataataatttggcaatgatctcaaaacaatttgaaaagaaaagctaagtaaacaactcaataaagaatattcctttttaaaaawttttttttttagaaagtaggttagagctaaccaggggctctagggagagagaagtggggagtccttatttattgattatggagtttttgtctggggtgataaaaattgtttggaaatagatactgattatggttgcacagcattgtaaatgtaaatgatgccactgaatggtacatttaaaaatgaataaaatgtcaaattttacttatatatatctaaccataatttttaaaaattaataatgcaatataccaaaaacaattgaattgtacaaataagtgaactgcagggtatgtgggagtatatctgaataaagttgttgaaaaaaaaagaacatctcttcttatgaaataaaagaaaatgtttttagaagatgtggtcattttaggatgaataatcagctctcttttgaatacgaagagtttcaaggattaattttcttaacagaataccaagaccatcaggag

SEQ ID NO: 686020 - DNA, 607 bp, Homo sapiens
tcattgtcgaaaatcttagctaaatggctcttcatcttgagatcatttctgtttctataataatttggcaatgatctcaaaacaatttgaaaagaaaagctaagtaaacaactcaataaagaatattcctttttaaaaaattttttttttagaaagtaggttagagctaaccaggggctctagggagagagaagtggggagtccktatttattgattatggagtttttgtctggggtgataaaaattgtttggaaatagatactgattatggttgcacagcattgtaaatgtaaatgatgccactgaatggtacatttaaaaatgaataaaatgtcaaattttacttatatatatctaaccataatttttaaaaattaataatgcaatataccaaaaacaattgaattgtacaaataagtgaactgcagggtatgtgggagtatatctgaataaagttgttgaaaaaaaaagaacatctcttcttatgaaataaaagaaaatgtttttagaagatgtggtcattttaggatgaataatcagctctcttttgaatacgaagagtttcaaggattaattttcttaacagaataccaagaccatcaggag

SEQ ID NO: 686021 - DNA, 607 bp, Homo sapiens
tcattgtcgaaaatcttagctaaatggctcttcatcttgagatcatttctgtttctataataatttggcaatgatctcaaaacaatttgaaaagaaaagctaagtaaacaactcaataaagaatattcctttttaaaaaattttttttttagaaagtaggttagagctaaccaggggctctagggagagagaagtggggagtccttatttattgattatggagtttttgtctggggtgataaaaattgtttggaaatagatactgatkatggttgcacagcattgtaaatgtaaatgatgccactgaatggtacatttaaaaatgaataaaatgtcaaattttacttatatatatctaaccataatttttaaaaattaataatgcaatataccaaaaacaattgaattgtacaaataagtgaactgcagggtatgtgggagtatatctgaataaagttgttgaaaaaaaaagaacatctcttcttatgaaataaaagaaaatgtttttagaagatgtggtcattttaggatgaataatcagctctcttttgaatacgaagagtttcaaggattaattttcttaacagaataccaagaccatcaggag

SEQ ID NO: 686022 - DNA, 649 bp, Homo sapiens
aagtcacaaataagaactctagcctttttttctaactgctaaagtagttgcaacatttggactgttaagcagtaaacaagtaatcatcttgtgaacatgtctatatttttgtctttatgtttgcattagttggatagttttgcattattcacttctgcctcttatgttgaaaactaatgtaatcaaattaaattctgaataccagtgctggtttcaacattcctayataggaagagctcaggggcatcaatctgctcagggacctagtctaataaatctgttttacataagtagcacactctttttacttcaagactaggctcattttaaaaggccaagagcaacgaaaaaaatggatattatgcagggaaggcaaaattttactccattcttgtgctatcagaaacctctggatttcatttcttataaaccaagattcaaaactaagtgctgggtatattatcaggaaacaaaaggaaagggcttccaccaaaatatgctcccctcttcctgtgaccttaagatgctgaagctcaagaacatgtagccaaattatttccattgcctgcatgcctgtgactccagcatcacaactcctagatttgatatctactggatggataaattggagaaagtcgtgattcaaaga

SEQ ID NO: 686023 - DNA, 616 bp, Homo sapiens
tcttatttaccatgaattcacttcatatgaatttaatgtattgtttgaagcactatctgtcaaatcaaaaccaaaattatgttgtccagaatataccattttgcaacttagttgcatttactatcaattcagtcaagaacactaggcatccacttgcagtatacagctcctaygacaagagttattctgcattttattcttcagatttacaagtatattttccatgttaataagtcgagtattttaatctgaaatttatgttagaaagacagtcttttggaagcagcatgcagacttcaaacaagctaagtttgttagcaaaatttatggaagggtagtatgacatctttatcattatgtatggcaaaactgcaacacagtataatgccttggttatgctactttgtcttttcagacattttgatgatgaaagtgatagacgtccaaaatgctacataaagattcaagctgttgtactgcataataaataaagactataacagcaatcctgggctttttatcttatacatatcaaatagggacacaagctactcttacaaaactgtttcagcatgtctcttcaagaagatgccattgtaaaatttgtatctttact

SEQ ID NO: 686024 - DNA, 977 bp, Homo sapiens
tctcccccagtccggaggagaaatgccatcagccctattgggggaggacagtcactcagcatgaagtaaggctatcagtttctctctgattattgaattagctgtgttccaaatattttctaatttcctttgtgattcttctttgacctatgagttattttgaagtgtatggtctcatttccaagtttttgggattttccgaataattttctgttatcagtacctaatttaattccattgtagccaatgaatatatttcatatgattttgatccttttaaattcattgagacttgttttgtggcccagtgtgcggtctattttgataaattccatatgtacttgcaaaaatacatattctacagttactgtgaatggagtgtgttataaatgtgaggtaaaattgatgggtaatgtttagtttttctatatctgtactgattttctgtcaagctgttgtaattactaagaaaggaatattgacatctccaaatatgtgtctatttatgtaattatttcagttctgatagttttgcttcatktattttgaagttctgttattaatgcgaggtacaaataatgaaaatgtaggcatgttatgtctttttgatgaagtgactcttttatcattatggaagttctctgtttatctctctgtctgccctcctccccactatttttccctaaggtggtttcgacactttaaagttctctttccactgtcttttgggctgcatgttctgagaagtctagtgattctttagttttctatacataatattttttccttgtccacttttataattgtctttttatcactgattttccagtttatttattgtagttttctttgtatttatcctgctggggagtcattgagctactgtgatctgtgggttaataattttcttcaaatttggaaaattgaagccaatacttctttaagtatttttctgctccttttagcccatctctctc

SEQ ID NO: 686025 - DNA, 1758 bp, Homo sapiens
aagagcaatctacgctacaggcaggctggagcagaaactcgggaaaggagggaagacagattactggaacagccagtttgcagggccatgaaacccgaactcttttcgatccgccttcctggcgagtcttctggctctgaaactttgggaaggaaaactgatacccataaataactgtggctgtataactgcaaagtgggataaacgtttcatcttgattaaacgtaaggtgactcctgacaaagaactgtggttggctgactctgtggagaggcttgcaagatgctgtcatgactacatgtgggagtttgagaaaactgcaagatgcatgttgcaaaaagacatattaagctttctgctgttttccaggcactgtatcaggagctggttgggggagtgatgaacgagatagcatcctgttaacaagcagtagcagacttcccatgttacattctctcaaacagagaggaggtcaggccagatctgtttctcctcaaaaatataatctcaagaaaaatcaactggtcggatcatcactacctaaccacagatctccctccttattcttcacaacaagaatccgtcaaataagtaacgtcatggttaatgctcctccacattcaacctggaccctaaatccctctaaataacttgactctgttcatacacagaccacccactttaccagtctcaaaggatggaccagaacaactatttccttgagttaatgagtgaacctacatctaactgtaaataaaacactaaaaataggtaactattacttactaaatgaaacccaagtgtaactttccattaaactcaacctgaataaagtttttaaacagtgaaccttttaaaacagaaaccagtctgtaagcatcctaaagctagtcaaccaagacagaagttaaaacacaagtattttccaatcaaactcagcaccattccaactgaagcttccacttggggctgtgaaaccctctttggacgtaagctatgctgaacctgtggtttcaggcaggttatattgtaatgataggggaaaccaatgccacatccacttgcagtgtctgtagagaactacatcttgccacacatccaagatctcattcctcagtctccctgaaaaattctgttggtaagagagaagtgagacagtgctgtttccgaggaatcttatgcctctctttattctacaacaaatggagacagatggaaatagaagaagaggcagcaacaggacaggagaaaggaaagaaaggggaaaggaaggtaacagaagggcaacgggggaaggggaaaatagacaaatcatagcagaatgcccagacacgacacaggtcaggtgacagaaaggacaaaaaagatgggagaagaaaaccaagaatgaggccagaagaagggagaggagacaccatggtgatgggagcagtagagagtgtaacagaagtaggatggagaaataaagcaagcaaacaaattgctcccgggaaaaaaagcaaaaagcagacttacgagcaaccaaagrccataatttccaacaccctcagagagcaataattagaagcgcaacagttgggaatttgaacatggctgctgactaggcccgaccatcaacggggtctgattccgggcctgatccttgacgatctcaaggattcaccagcctctctccgaactccaactgcccgccatttgttcatcaacaaaatcattctttctacctcctaaaagaatttttattcctatgacattgca

SEQ ID NO: 686026 - DNA, 1758 bp, Homo sapiens
aagagcaatctacgctacaggcaggctggagcagaaactcgggaaaggagggaagacagattactggaacagccagtttgcagggccatgaaacccgaactcttttcgatccgccttcctggcgagtcttctggctctgaaactttgggaaggaaaactgatacccataaataactgtggctgtataactgcaaagtgggataaacgtttcatcttgattaaacgtaaggtgactcctgacaaagaactgtggttggctgactctgtggagaggcttgcaagatgctgtcatgactacatgtgggagtttgagaaaactgcaagatgcatgttgcaaaaagacatattaagctttctgctgttttccaggcactgtatcaggagctggttgggggagtgatgaacgagatagcatcctgttaacaagcagtagcagacttcccatgttacattctctcaaacagagaggaggtcaggccagatctgtttctcctcaaaaatataatctcaagaaaaatcaactggtcggatcatcactacctaaccacagatctccctccttattcttcacaacaagaatccgtcaaataagtaacgtcatggttaatgctcctccacattcaacctggaccctaaatccctctaaataacttgactctgttcatacacagaccacccactttaccagtctcaaaggatggaccagaacaactatttccttgagttaatgagtgaacctacatctaactgtaaataaaacactaaaaataggtaactattacttactaaatgaaacccaagtgtaactttccattaaactcaacctgaataaagtttttaaacagtgaaccttttaaaacagaaaccagtctgtaagcatcctaaagctagtcaaccaagacagaagttaaaacacaagtattttccaatcaaactcagcaccattccaactgaagcttccacttggggctgtgaaaccctctttggacgtaagctatgctgaacctgtggtttcaggcaggttatattgtaatgataggggaaaccaatgccacatccacttgcagtgtctgtagagaactacatcttgccacacatccaagatctcattcctcagtctccctgaaaaattctgttggtaagagagaagtgagacagtgctgtttccgaggaatcttatgcctctctttattctacaacaaatggagacagatggaaatagaagaagaggcagcaacaggacaggagaaaggaaagaaaggggaaaggaaggtaacagaagggcaacgggggaaggggaaaatagacaaatcatagcagaatgcccagacacgacacaggtcaggtgacagaaaggacaaaaaagatgggagaagaaaaccaagaatgaggccagaagaagggagaggagacaccatggtgatgggagcagtagagagtgtaacagaagtaggatggagaaataaagcaagcaaacaaattgctcccgggaaaaaaagcaaaaagcagacttacgagcaaccaaagaccataatttccaacaycctcagagagcaataattagaagcgcaacagttgggaatttgaacatggctgctgactaggcccgaccatcaacggggtctgattccgggcctgatccttgacgatctcaaggattcaccagcctctctccgaactccaactgcccgccatttgttcatcaacaaaatcattctttctacctcctaaaagaatttttattcctatgacattgca

SEQ ID NO: 686027 - DNA, 2721 bp, Homo sapiens
ttaaaatgagcaatattaaggatgctttaaaatgctgtaatacaattttctttacctaaatctaaagctcattgaaatgcctattatgaaggccaccatatgtgaggcaggcagtcttgacattttgttgggaagggagggagttacatctggagaaatgtcctcagaaatttattacaggatcggatatctgcaaagtgtgatagaacccagggtttgtgcccttcttgtagaggtagcaattctggtgtccctgttacagtgagaaccctttctggaagacaggcatcctggaactttacttggcctatctgcataacctttcctttttttgatttctccctgtgtattaggagaattttctttctatgatttgggatagtctgggaggacagcccacaagttttctagattgggaatgaataagagaaaatwaatgtttcctgggtctaaattctcctgaaatcctttatcaactgtgtgatttcggggtgaccgtttaattagataatgcatttaaagtgctatcacagtgcttgatgaatagtaaacattcaataaactaatgttttataatgtttaaattattattaaaacactattttcatttattcatgattcactcaaaatatccagcaattcaaagtgtcttctctgtgtctggtgctgtggaatgtgggggatggtttggtgtgtttgcggtggccttctgaggtctccctagtctctcacctcctgccccaccaagtgggttcatccaaagcagatgagagtcttattaagttgacacaatgtgatgagaatgatggatttatttatacttttctcagtacactctgacagagcctcagttggtgccaagattgatgtgcatgagactgaaaggccctcttagtgcccaaatacctccttacaacttgtctcagtctctgaaatttctcccatgagtcattcttttttgcaagggaagctttggagaagcaaaggtgagttgtactagtttattcctcccttttagaggtgagaagatgggtggattcctgagccctaccatattccagctcttaatgctgctatcaaagataggttcctggacaggaaaagccatggacagcttttaaagttttaaaactttctcatatttttcatgggtggtttcaacaggaataaacacataatgtgcaagcaatttcacaatgccttgcattgaaatccatggatttctagatttctatcagaatcctggccttgggcttaggtgattcctatgtccttctacactttagctgtagaaacagcaggtggagtgaaagagcctgttcagagcagccagattttgttttggttgtcagctaaaacagaaacctcatcattccagacttggcagcttgttagtagaaaagccactgggaagctctaagttggtaatttagagcacaaatgtattccctgatacagctgcagagcagcaggtgtctgtgacttaagcaaacactagctttgaaaaagtgaaataagaaaatagaaaactttttttttgcacatgtcaatatggctgaaaatatgtttacttcttgttcctcttggttcttttcttattaacttgcttagacatatataagtgaacgtttcatgcaattcgattcaatttaacaaacatttattgagtacctactgtgtaccagactcagtgctaggtgttggggatcatcattttctgttttagattttggtgtggagacagacatgcatacggtttcataataaaggaataactaatttccttcagagcactggacaattctgatcatggagtaggagaagccttttaggagaaaatgaattaaagggataaatattgctgagatggattggagggagatagttccaggcagaatgagttgctggagaagaatctgaaggatgtcagagtgattgaaggtaggaggaaaaaataggaatgttccttttgtgtctctgtctgatggatatgctcacattgaaaaatgcaaacattcctttagaccgcctctaccaaaccatctgccctggtggccacagagcatagacccaccaaactacaaaagtatgcatgaacattttcttgttatacaaagcagggggagaatagaaaaagaatcatcaaaaatagatgaacactaactataaaaacaaatatagagtaataaaaatgtaaaaaaaaattcagatataagaaatttcataacttttgtctatacatctattatggcctcaaagatataatgggaaactattatccatatgagcagtacaaatgtaaaatacctgtgatttaccttaatttgaaatttagtgcaaagcctagataaaactgcaaatgccatagaagctatttttaagattattaaaataacttgactaaataaataaaaatcagagactgcaaacaggggaggggagaggggatggagagaggatgtttagtgggtagaaaaatacattagaaggaatatgatcaactgttcggcattatagtagggtaactacagttatcaataatgtgtagttcaaaatagctagaagacttggaatgttttcaacataaaagatgaatgtttgaggtgatggatattccaattaccctgatttggtcattacatattgtatacatatatcagaaaatcacatataccaccccccaaattgagcaaaatattggaaaaatgaaaacagagttta

SEQ ID NO: 686028 - DNA, 590 bp, Homo sapiens
aacaagttgtggaaacacacatccctggggccccaaatctgacccccacagataagggcgagcatcccttctgtacaaacgtgaggtgatcttaaaaccatacagcattagaaaggataaagggcttagggggcacctaattcatgccacaggtgataaaactgaggcacgttcaggcttgtaaaratgaggtaactcccccagagacagcagagagacagtgacagagctgtgtcccaagctcagggctcccaaccatcctccagctctgattaggaggcctgatgctacccaccctgccgcttccacttctctcagccaggctggaatgtggcgaaagccacaggcctaattttaggattcaaaagcaattaggggagagctgacaaaatctgatctgggtgaggattctcgtgctgacctgtgatgtgggttatcatacactagctcaggagaccttggtcagccagaccaggtcagcttttctcctggaagacacacagcccctgcactgccccatacgcagtcttgcaaattggtagataagtgtgcccatgacctggtgtacattataagacacggtcttttcc

SEQ ID NO: 686029 - DNA, 590 bp, Homo sapiens
aacaagttgtggaaacacacatccctggggccccaaatctgacccccacagataagggcgagcatcccttctgtacaaacgtgaggtgatcttaaaaccatacagcattagaaaggataaagggcttagggggcacctaattcatgccacaggtgataaaactgaggcacgttcaggcttgtaaagatgaggtaactcccccagagacagcagagagacagtgacagagctgtgtcccaagctcagggctcccaaccatcctccagctctgattaggaggcctgatgctacccaccctgccgcttccacttctctcagccaggctggaatgtggcgaaagccacaggcctaattttaggattcaaargcaattaggggagagctgacaaaatctgatctgggtgaggattctcgtgctgacctgtgatgtgggttatcatacactagctcaggagaccttggtcagccagaccaggtcagcttttctcctggaagacacacagcccctgcactgccccatacgcagtcttgcaaattggtagataagtgtgcccatgacctggtgtacattataagacacggtcttttcc

SEQ ID NO: 686030 - DNA, 630 bp, Homo sapiens
tgaacttaggtctttacatctggttttaatacctgaacttcattagtagtagtctagaaccgccaatttaacttatgcratagtgaaaataagaaaaagcagaaacatccctgacctcctgggtttaggggaggttcaatatttttacctggtgtcataatacatgaggtctcagacctaagcctgaaagttattttcttcaatggtggaagtaaattttctctttgtttctctctttatcgctttcaaggccataatatgatgtttgtgggcctctttttcttttaaaaaataacaaataactaaaaagtatatactatgacaatatcaatataaagataaatatagtaacattatgtagtaaagtgttttctcaaactaaaaataattttattttgaggttaaaataaattaaaacatttttgtggacttctaaattcctatttctctctctttctcttctctctctctgtgtctctctcgtgtgtgaaactcagattcatgtcattcatatcatagcattcttcttaggttagaaggtaataagacctgacacacagtaattctgcttataatcaaagtataaagccaggattttgtagtacacttcagagagaaaaaactcaccaa

SEQ ID NO: 686031 - DNA, 630 bp, Homo sapiens
tgaacttaggtctttacatctggttttaatacctgaacttcattagtagtagtctagaaccgccaatttaacttatgcaatagtgaaaataagaaaaagcagaaacatccctgacctcctgggtttaggggaggttcaatatttttacctggtgtcataatacatgaggtctcagacctaagcctgaaagttattttcttcaatggtggaagtaaattttctctttgtttctctctttatcgctttcaaggccataatatgatgtttgtgggcctctttttcttttaaaaaataacaaataactaaaaagtatatactatgacaatatcaatataaagataaatatagtaacattatgtagtaaagtgttttctcaaactaaaaataattttattttgaggttaaaataaattaaaacatttttgtggacttctaaattcctatttctctctctttctcttctctctctctktgtctctctcgtgtgtgaaactcagattcatgtcattcatatcatagcattcttcttaggttagaaggtaataagacctgacacacagtaattctgcttataatcaaagtataaagccaggattttgtagtacacttcagagagaaaaaactcaccaa

SEQ ID NO: 686032 - DNA, 759 bp, Homo sapiens
ctgagccagtcctattttttctaatctcttaacatggccagcctaatgggtcattttcaccctgtttggcatggtggatacattcttcctttatattgataaatcaaatttcagttaatttcagttaattaatttgggcagaagcatcaaaagaaaggtaatataacatcatcatctcaattttaagtgaatctacgtcttgtagtcctgggccatatttctgttgaagccttttgcttatttaatttttttttataattattttttgtgttagtaaggtttctgatcaacattgcttcattaaaataaatgatttgatgagcaaggcagcttaagattcatattctgtgctaattaacagattcttctaattgttagaargctcctgatgtctttctaattctttcaactcattactttcttactgaagttacagttcttaaaggaatagtaacagatactatgaaacttcttttctgcatatacacactgcctcaaaatacattaatttgtgaaagcaggccaataatttaaaatctgttaattgatgtgctttccttccaaaaccaagtgaaatatctttcctattttccatttctactttcccatctgggatactaaaatgcatttttaaaagattacttctagttgaaaataatgtagcaaaaacatatattaaaatctctatgtttccacttgaatatattttagttagatcagtagattaggtctgggtttctgctactacagagaagagca

SEQ ID NO: 686033 - DNA, 430 bp, Homo sapiens
  misc_feature 3, 4, 5, 6, 7, 8, 9, 10, 11, 12, 13, 14, 15, 16, 17, 18,19, 20, 21, 22, 23, 24, 25, 26, 27, 28, 29, 30, 31, 32,33, 34, 35, 36, 37, 38, 39, 40, 41, 42, 43, 44, 45, 46,47, 48, 49, 50, 51, 52, 53, 54, 55, 56, 57, 58, 59, 60,61, 62: n = A,T,C or G
  misc_feature 63, 64, 65, 66, 67, 68, 69, 70, 71, 72, 73, 74, 75, 76, 77,78, 79, 80, 81, 82, 83, 84, 85, 86, 87, 88, 89, 90, 91,92, 93, 94, 95, 96, 97, 98, 99, 100, 101, 102: n = A,T,C or G
atnnnnnnnnnnnnnnnnnnnnnnnnnnnnnnnnnnnnnnnnnnnnnnnnnnnnnnnnnnnnnnnnnnnnnnnnnnnnnnnnnnnnnnnnnnnnnnnnnnnntttaagaaagtaagttttctacataatagaagcttacaccttttaaatatcaaatttcattttattttcaccattttttkggggaaatctttaaggtgttgttttccttttaaatctagtgtatttgaacataattcagcttttaatgtcttgaagctgacataaacattttttaaaattgcgtattgcagttgaagccctctaggagaacagagattttagggctctcccccatccacctgaccctgcaaatccacactgctagactttaagtgttatactgcttataatcacttcacttctcattccttggtgacgtgctattcat

SEQ ID NO: 686034 - DNA, 592 bp, Homo sapiens
gttttccctctcgcacataccccccaccatacgacagagtgtggtcagggctgtatcctggggcctggtgcagtayctgtatatactagggagccccctctgggggctctgagatctctggtaaagagcccccaggccttggaaggtctcccaacctgctgcttccctcccaggaccccaggatgggtggcatcggggttctgggccagtgtgggatgcagcatgggggtggaggcgcggggcctctggcctggctgttggtgtgccttctctgcctggcagaagtattctcaggcacaagactggacaaagaaaaacattgacctgccctgaggatgccctcatggctggctctgacctctgtgctcccttctcagctgcccatctgtgtcctactcctcggacctgccagccaccagcgtcatcatcaccttccacaatgaggcccgttccaccctgctgcgcacagtgaagaggtaagtccagccatgggactctcatctcagtggtgctggcaggggaggacattgggattgggcgctgtggccagacagcttgaagcccagcaggtgctggaggctgagtcctgtac

SEQ ID NO: 686035 - DNA, 592 bp, Homo sapiens
gttttccctctcgcacataccccccaccatacgacagagtgtggtcagggctgtatcctggggcctggtgcagtatctgtayatactagggagccccctctgggggctctgagatctctggtaaagagcccccaggccttggaaggtctcccaacctgctgcttccctcccaggaccccaggatgggtggcatcggggttctgggccagtgtgggatgcagcatgggggtggaggcgcggggcctctggcctggctgttggtgtgccttctctgcctggcagaagtattctcaggcacaagactggacaaagaaaaacattgacctgccctgaggatgccctcatggctggctctgacctctgtgctcccttctcagctgcccatctgtgtcctactcctcggacctgccagccaccagcgtcatcatcaccttccacaatgaggcccgttccaccctgctgcgcacagtgaagaggtaagtccagccatgggactctcatctcagtggtgctggcaggggaggacattgggattgggcgctgtggccagacagcttgaagcccagcaggtgctggaggctgagtcctgtac

SEQ ID NO: 686036 - DNA, 592 bp, Homo sapiens
gttttccctctcgcacataccccccaccatacgacagagtgtggtcagggctgtatcctggggcctggtgcagtatctgtatatactagggagccccctctgggggctctgagatctctggtaaagagcccccaggccttggaaggtctcccaacctgctgcttccctcccaggaccccaggatgggtggcatcggggttctgggccagtgtgggatgcagcatgggggtggaggcgcggggcctctggcctggctgttggtgtgccttctctgccwggcagaagtattctcaggcacaagactggacaaagaaaaacattgacctgccctgaggatgccctcatggctggctctgacctctgtgctcccttctcagctgcccatctgtgtcctactcctcggacctgccagccaccagcgtcatcatcaccttccacaatgaggcccgttccaccctgctgcgcacagtgaagaggtaagtccagccatgggactctcatctcagtggtgctggcaggggaggacattgggattgggcgctgtggccagacagcttgaagcccagcaggtgctggaggctgagtcctgtac

SEQ ID NO: 686037 - DNA, 619 bp, Homo sapiens
tggtcttgaactcctgacctcaggcgatttgaccgccttggcctcccaaagtgctgcgattacagctgtgagccaccacaccgggcctaaaaatgttatttgtttaatgtgtaactacaaatgtacttctttcactccatttagaatgaattcagcttaaatacaagccatatataccaaatctaagtgctatctatgacttattttaaggttctaagtatttccctgatgtgttctttaaaaattttagaagactacatggttgaattaaacataacctatataatggcaattttagtgacttgctaactggaatttagttcccaagaatgttacccacgtttcttattcctcagaataataaaataatcagtcaacacatgttttttgagcacttactgaacacaaaaccttcttcttggcattggggatacatcaatgaacaaaacagatagaatcactccttgtaagaagctacatcctaagagaaygagtatgaatccttccgacttgggttagaagtgcatcccgactgattatgagcagtgtgaacctgggttgactggtcacttagcagttctgaccgccagcctcatcatctataaatcagtcttaatac

SEQ ID NO: 686038 - DNA, 3284 bp, Homo sapiens
tatctttttaatttgaamattgagttttagtgttagaatgtatttcttttatctttcagtaacaatgccttgaaggttttccttattttaaattaatatttttatcagcctcaagcactacttccgtggtccgtcagcatgctgcttgatttttcatatgattaatttgttttaagtatgttatgacttaattctttttgttttcatagttctggatcagtgaattgatttcctaagacaagggtaaataagcaaataggacaggtatctgttttgggagtacaacatttcacaggctgggaaatggttgcctctgagctgacatgcattagaaaaagctgcttgttaacgaccctctctggatgtaagaggttacctacttcccttctcacggactgagtgattcagtttatcatttcccttgactttcaatcacagcaagattgggtgttgtttccccaacacataaaagtgaacagtacagacggatctccttcatttgttatgaaacacatagatgtctttacaggattaaatgagaggtaaacattttggttgttggccttgtagttctttcattgggacatagagaatgagggccatcccttagcatttaccagaatgaaagaggccctaggcatattattgaagctaaacaagcatgcttatatttgtggtttgttctttcagagagggagacaccttttggtagagaatcagggatatgtgttcaggctgcatcttcctagaatctactatattcacactactttttcaaagcatgtttttggtctttttgctacacacttcatataataaagtactggaagtagcttattagactatccatcacattgtttacattttgaaatggaaaatacgttcaattttattaaaaaatgcttatgctgtgaaaatttcatccactaagaaactattcattagttttctcttcagcataaaatgtaaagctaaattaaaaacactttaaagcaaaattaggttttataacattatatagcaaatttaaatgttgctaaatgataactgaggatgatagcagttttcaagatagtaagtatatcattcagagttcaatcatagaaacagaatcaccaggaatgatagacagtataaaatttatacaaaatatttgaacttataccatgtcactaacatctacaattacgtgtgtattttattgcttccgcttttgatgctgggcctgaagagcagggagtgtggcaggaaggaaagatgaatgtgaagcagtggacagtagggataaattggaacccatgaataccaactgtaatctgcactagtctctgaaactctccagctttgaagaggaagttgacatgctggagaaagtggtgtgggtagttgcagaaaattgaaagaaaagattgtgtaagagctgaagaagctgtgtatttggctgcattatcagaccaacaagatgagccagcaaacctcacaatatgcatgagttgcaacatcacctggttttgtactgcccttttgaacttaaaaaaaaaaaacaaaaaaaaacctggatgcttgttctttttttgtcttccaaattctgcataaaatgtctcctatggtccatgacaatccataaatatgaaataaaacacatcagtgtcatcctagatcaattgacccagtacagatccacaataatgagccagagaacatatactggtctgtggaatttcagagaggagttaatgtgaaagcctatatttgctctgaaaagaaccaaaaaacatgcaatcctgaggaataactatactaatgtatagtattatatactaattatattatattctttaaacaaataaaaaacaaagaatttaaataaaatataattttattctttaaagaatataacatattctttaaagatatatgtattaaaatataataaagaatattctttaaaactatattctttaaaaatatgctattacatcaacacattatatttcaggaaaaaatgcatacaactgagtagatttctaaacagtattagaattggagcactctagatccactttgagttttttttccactggataattccttccattcttacatgataatttctgtacatcacctataaaccataaaattgttaaaattttgtttgtagaagtaatcatgaactttctagaggcatcacaaaatgcttatttgtacaaagaaaagtgacctaggtctgtaatagaaaatagttatacaaagtttgataaaaatgacatacctaatgtggtgtgggagcactttgtgaaacccaaatgtaaaaaatcaaatccaaagtttatcttgcatttttcacacccatttaatgcccattaaggatcatgaaagataaagttaaattgattcagcactaaaattctatgatgcttttcaaactaatgtaatgataatgtagtgttcagattttgagtcattaacactgagagtgaaagtaaaagttacatattttcttccttgaaatattaaaatgctagatcatttcactaaacactattgtatttgagtaatagagaaatcaatccaaactagaattttattggcttagtaacattttcatttgcaaagtaccatttcattaaagatgtaaggttttaacctacataatacactattctaaatagttccaagtataaacaaaacttgtgtttatttctttgtttctttgtttttagcagtaagaaagatttagtcaatcatcgtttttctataaatttctgtgtattttttagggtctctcattcttctggctttaatcactaaatcatgggtcagaaaactagaactttagggcaaaagccatcccacatttttaaaggttgtaaaaaccacagacaataaaataggcaaaccatcaaaaaaagaatatgcaacaaagaccatatgtgactgaaaaagcttaaaatatttattatttggccactcacggaaagtttaccactcccaggactagatagtaagttctagagcacattgtgatttatgtgctctttaccttaatatacttagcttaagacatgttttatacataatgaatatttattaaatattggttgaattaagaaaagattacagaggttgagccaagatggccaaacaggaacagctccagtctacagctcccagcatgagcgctgcggaagacgggtgatttctgcatttccatctgaggtaccaggttcatctcactagggagtgtgagacagtgggcgcaggacagtgggtgcactgcacca

SEQ ID NO: 686039 - DNA, 3284 bp, Homo sapiens
tatctttttaatttgaaaattgagttttagtgttagaatgtatttcttttatctttcagtaacaatgccttgaaggttttccttattttaaattaatatttttatcagcctcaagcactacttccgtggtccgtcagcatgctgcttgatttttcatatgattaatttgttttaagtatgttatgacttaattctttttgttttcatagttctggatcagtgaattgatttcctaagacaagggtaaataagcaaataggacaggtatctgttttgggagtacaacatttcacaggctgggaaatggttgcctctgagctgacatgcattagaaaaagctgcttgttaacgaccctctctggatgtaagaggttacctacttcccttctcacggactgagtgattcagtttatcatttcccttgactttcaatcacagcaagattgggtgttgtttccccaacacataaaagtgaacagtacagacggatctccttcatttgttatgaaacacatagatgtctttacaggattaaatgagaggtaaacattttggttgttggccttgtagttctttcattgggacatagagaatgagggccatcccttagcatttaccagaatgaaagaggccctaggcatattattgaagctaaacaagcatgcttatatttgtggtttgttctttcagagagggagacaccttttggtagagaatcagggatatgtgttcaggctgcatcttcctagaatctactatattcacactactttttcaaagcatgtttttggtctttttgctacacacttcatataataaagtactggaagtagcttattagactatccatcacattgtttacattttgaaatggaaaatacgttcaattttattaaaaaatgcttatgctgtgaaaatttcatccactaagaaactattcattagttttctcttcagcataaaatgtaaagctaaattaaaaacactttaaagcaaaattaggttttataacattatatagcaaatttaaatgttgctaaatgataactgaggatgatagcagttttcaagatagtaagtatatcattcagagttcaatcatagaaacagaatcaccaggaatgatagacagtataaaatttatacaaaatatttgaacttataccatgtcactaacatctacaattacgtgtgtattttattgcttccgcttttgatgctgggcctgaagagcagggagtgtggcaggaaggaaagatgaatgtgaagcagtggacagtagggataaattggaacccatgaataccaactgtaatctgcactagtctctgaaactctccagctttgaagaggaagttgacatgctggagaaagtggtgtgggtagttgcagaaaattgaaagaaaagattgtgtaagagctgaagaagctgtgtatttggctgcattatcagaccaacaagatgagccagcaaacctcacaatatgcatgagttgcaacatcacctggttttgtactgcccttttgaacttaaaaaaaaaaaacaaaaaaaaacctggatgcttgttctttttttgtcttccaaattctgcataaaatgtctcctatggtccatgacaatccataaatatgaaataaaacacatcagtgtcatcctagatcaattgacccagtacagatccacaataatgagccagagaacatatactggtctgtggaatttcagagaggagttaatgtgaaagcctatatttgctctgaaaagaaccaaaaaacatgcaatcctgaggaataactatactaatgtatagtattatatactaattatattatattctttaaasaaataaaaaacaaagaatttaaataaaatataattttattctttaaagaatataacatattctttaaagatatatgtattaaaatataataaagaatattctttaaaactatattctttaaaaatatgctattacatcaacacattatatttcaggaaaaaatgcatacaactgagtagatttctaaacagtattagaattggagcactctagatccactttgagttttttttccactggataattccttccattcttacatgataatttctgtacatcacctataaaccataaaattgttaaaattttgtttgtagaagtaatcatgaactttctagaggcatcacaaaatgcttatttgtacaaagaaaagtgacctaggtctgtaatagaaaatagttatacaaagtttgataaaaatgacatacctaatgtggtgtgggagcactttgtgaaacccaaatgtaaaaaatcaaatccaaagtttatcttgcatttttcacacccatttaatgcccattaaggatcatgaaagataaagttaaattgattcagcactaaaattctatgatgcttttcaaactaatgtaatgataatgtagtgttcagattttgagtcattaacactgagagtgaaagtaaaagttacatattttcttccttgaaatattaaaatgctagatcatttcactaaacactattgtatttgagtaatagagaaatcaatccaaactagaattttattggcttagtaacattttcatttgcaaagtaccatttcattaaagatgtaaggttttaacctacataatacactattctaaatagttccaagtataaacaaaacttgtgtttatttctttgtttctttgtttttagcagtaagaaagatttagtcaatcatcgtttttctataaatttctgtgtattttttagggtctctcattcttctggctttaatcactaaatcatgggtcagaaaactagaactttagggcaaaagccatcccacatttttaaaggttgtaaaaaccacagacaataaaataggcaaaccatcaaaaaaagaatatgcaacaaagaccatatgtgactgaaaaagcttaaaatatttattatttggccactcacggaaagtttaccactcccaggactagatagtaagttctagagcacattgtgatttatgtgctctttaccttaatatacttagcttaagacatgttttatacataatgaatatttattaaatattggttgaattaagaaaagattacagaggttgagccaagatggccaaacaggaacagctccagtctacagctcccagcatgagcgctgcggaagacgggtgatttctgcatttccatctgaggtaccaggttcatctcactagggagtgtgagacagtgggcgcaggacagtgggtgcactgcacca

SEQ ID NO: 686040 - DNA, 640 bp, Homo sapiens
catattacctatttgcctagtaatgacaattctgtgttgttgaagctaaatctaatgcagcatcaagatctgccttcagaagtctggttacgttactattataggaaagcaagatcaaagaacctaactctctggtggctgcttctttagaggctgcagaactgcacgcagaggatgacaaaacatagttccgactggacttttccaagggtgaacacrtgtacacagagaaaatcaaactgggaaaataaaaagaggggaatctaaatgctccaaagtataacgtcctaccttaaaactaatgcaggctgtcaccacctgtttacctaataacataatgtgtgtgtagatgttctgtgaatattaaaatgtgacatgagtttaaggtgttggtactaatattcctactattcattcttaagagattaaaaaaacaccaagtgaaaacaaccttcttaggaattaaaagtgaactgcagcaaaatgtgggcgacaacatatacttcaaggagactagtagtattcaaattacatactcatatttatcataatagcacttttcctagtacaactttaaatatttcgctgacaatgtctcgtagaaataactatatcatcactgaaacataaatgaaaagta

SEQ ID NO: 686041 - DNA, 1428 bp, Homo sapiens
tttcctctagcccagtagatacattgcttactaaatttcttcactgcctgtctccccttactaaaatatacgttccacaaagacagagatatgtgtcttttgttgctctatccctagtgcttagaacaatgccacacatttagtgctcaacaaagaccccttgaatgaataaatgtcaccatggactttagaaccttcagtgaaagttgagataacctttattttatgcttgaaattgatcctgggaaaaggtggggaatttacttgtttacccagctagtaacagacagacccagcatccaagcccaggtgggtgtgacttctggcctgtctgtcttctcctttgcccatctgcttctcctgccattcccactttttctgcacatgaacctaagcagttctcagtgtctcagggtctacgtgtctcagttgggagctactgatatgagaaacaatctaagtttgaatgctgttgggccaccccactgcatggctggggagttcaatgataacagggggttggggctgagcaagcaatggagaagggcatagaagggaaggagagtggccaagtaaatacccccaaataatcagacattctttaagataggtggagatacatatttgcagaaatgttttaaatgtttcctcatcccccagagggttttttttttttttttttttttttttttttgacagagtcttgctctgtcacccaggctggagtgcagtgtcactatctcagctcattgcaagctccrcctcccggattcacgccattctcctgcctcagcctcctgagtagctgtgactacaggcacccaccactacacccggctaatattttgtatctttagtagagacagactttcaccgtgttagccaggatggtctcaatctcctgacgtcgtgatccacccgcctcggcctcccaaagtgctgggattacaggcgtgagccaccacgcttggccccccagaggattttttatgaggttttaaaatctgttccccttccctttctttttttcttttgcatgccattgctcatggtagggttatacaaactcctctaccaaatgagtggaagtgtttgactcagttatctggttagcttttgtgcgatctgtttctggtaagcagtaatttttttttctagtctgttatgtgcctatttaacagagcaatcatctattgtttcaaagaagtataaaaggctaaagaagagactaataagccatgtccagtgaaatctctgaagtgtcaactgcagatcagcagctagagaacagggttggacctagaaaagatgtcagaaggtgtctcttctggctcttggacacgctgtaactgaagatgaatgggagtgatgtcatcttgatctgacataattggggaataagatactccataagagggaaaatggcaa

SEQ ID NO: 686042 - DNA, 660 bp, Homo sapiens
ttttcgtggcactattctgtctggtagagacttgctgttgtcccaccaacttcaaaatgccaagagcactctgagttttgctatgctagtgaaaacagcctatttcctgagcaccaagcagctgtgcaagctgtctaccatccgactggtctatatccaaatcagtcaacttagatttaatatagattttctcattagatagcctagaactaaagatgagatgtgtgtagcaatgctccaaactaatctttgctgacacccccacccttttacattccctcatagggtgttgcctggtatttcatgaattcttgatgacaaagatcatgcttcttctatagcaggtctgccttgctgccaaatggcagcatgtatctttactggtttcagaattttatagttttttctttctttgttttttttccttcygtcccttagcttttaactccttttatgtgctgttctattgggcccctaattcagcctagcaaatatcttccctagcagacaatttatttcttctttactacacctggaatttctacctactctaacagttcatgttcttctgtccccagaaatcacctcctttattaatgccacctaattctgatcatatctttgggctcaatccttcagtacttagagtagcagctgtca

SEQ ID NO: 686043 - DNA, 1384 bp, Homo sapiens
caatgtcaataactcccttatggcatcaagcagggtacatcattggcaaatagtagaccatctttgaatgctgagaaaagagaaaatgtaataactgttctcatcctaccaggtgctatttcactaagtgccataacttataaaaaattctgttcagaataggcaatataaggtgaggaggatgtgatctccctgttgatagttctaaccagtaatttaagcctgcttcattctgtaccacctgtagactccatgtgggcctagagcatagaaagcagaatcagacccttaagcctggatgagtcaatgctactccatgctctgttataatttactgtagttacaaacgttataaagaaaactggtatgaaaattcatcttttaaacaaaatccaaaccatactttagaagcattcatgcaatttccatcttgttaatgtctaatttctatgtttttacatattttcctgttatttttatattttttattaactaatatttgtttttctttccttctccattcctttgttttccctgtagagaaccatcccccagttggatgtcagtcagtgtaatcaactttgttcattttattatttctttttccaattgctagtatccaaatcagctatttaataaaggaaaataaggcatttgggaagtttgcttgccccccactttggtgtcccccaccctaatagttttcaagaagtaccaggtttaaaaatggaatgctctcatctgctccttcattgtttcttttttttttttttttttttttgagacagtctcactcttgtcgcccaggctggagtgacgtggcgcgatctcggctcactgcaacctccgcttcctgtgttcaaaggattctcctgccccaccctcctgagtagctgggactacaggcacccgccaccacgcccggctaatttttttttgtatttttagtagagacgggatttcaccatattagacagactggtctcaaaactcctgatattgtgatccaccggcctcggcctcccagagtccattgttttttataagaataatagattctgtgctaaaaccctgcacttgtgattcctcatctgtaccataatggaacagctcacaactacagaattttgcttgggaatctgtgggaaacaactgctcccacttkagctattcagagctgactgcaacgatcagtcagcttatgggacttcagaagttgcagtaatgaaagttcattccacaacaacttggaaagtgaaaatattatggagatggctttgctccccctcctttcgagtcccttgtgaatttttggtcaaacacccattcctgtctaaaacattcctcctacagaccaatcacctggataattgcatttccacta

SEQ ID NO: 686044 - DNA, 1384 bp, Homo sapiens
caatgtcaataactcccttatggcatcaagcagggtacatcattggcaaatagtagaccatctttgaatgctgagaaaagagaaaatgtaataactgttctcatcctaccaggtgctatttcactaagtgccataacttataaaaaattctgttcagaataggcaatataaggtgaggaggatgtgatctccctgttgatagttctaaccagtaatttaagcctgcttcattctgtaccacctgtagactccatgtgggcctagagcatagaaagcagaatcagacccttaagcctggatgagtcaatgctactccatgctctgttataatttactgtagttacaaacgttataaagaaaactggtatgaaaattcatcttttaaacaaaatccaaaccatactttagaagcattcatgcaatttccatcttgttaatgtctaatttctatgtttttacatattttcctgttatttttatattttttattaactaatatttgtttttctttccttctccattcctttgttttccctgtagagaaccatcccccagttggatgtcagtcagtgtaatcaactttgttcattttattatttctttttccaattgctagtatccaaatcagctatttaataaaggaaaataaggcatttgggaagtttgcttgccccccactttggtgtcccccaccctaatagttttcaagaagtaccaggtttaaaaatggaatgctctcatctgctccttcattgtttcttttttttttttttttttttttgagacagtctcactcttgtcgcccaggctggagtgacgtggcgcgatctcggctcactgcaacctccgcttcctgtgttcaaaggattctcctgccccaccctcctgagtagctgggactacaggcacccgccaccacgcccggctaatttttttttgtatttttagtagagacgggatttcaccatattagacagactggtctcaaaactcctgatattgtgatccaccggcctcggcctcccagagtccattgttttttataagaataatagattctgtgctaaaaccctgcacttgtgattcctcatctgtaccataatggaacagctcacaactacagaattttgcttgggaatctgtgggaaacaactgctcccacttgagctattcagagctgactgcaacgatcagtcagcttatgggacttcagaagttrcagtaatgaaagttcattccacaacaacttggaaagtgaaaatattatggagatggctttgctccccctcctttcgagtcccttgtgaatttttggtcaaacacccattcctgtctaaaacattcctcctacagaccaatcacctggataattgcatttccacta

SEQ ID NO: 686045 - DNA, 1384 bp, Homo sapiens
caatgtcaataactcccttatggcatcaagcagggtacatcattggcaaatagtagaccatctttgaatgctgagaaaagagaaaatgtaataactgttctcatcctaccaggtgctatttcactaagtgccataacttataaaaaattctgttcagaataggcaatataaggtgaggaggatgtgatctccctgttgatagttctaaccagtaatttaagcctgcttcattctgtaccacctgtagactccatgtgggcctagagcatagaaagcagaatcagacccttaagcctggatgagtcaatgctactccatgctctgttataatttactgtagttacaaacgttataaagaaaactggtatgaaaattcatcttttaaacaaaatccaaaccatactttagaagcattcatgcaatttccatcttgttaatgtctaatttctatgtttttacatattttcctgttatttttatattttttattaactaatatttgtttttctttccttctccattcctttgttttccctgtagagaaccatcccccagttggatgtcagtcagtgtaatcaactttgttcattttattatttctttttccaattgctagtatccaaatcagctatttaataaaggaaaataaggcatttgggaagtttgcttgccccccactttggtgtcccccaccctaatagttttcaagaagtaccaggtttaaaaatggaatgctctcatctgctccttcattgtttcttttttttttttttttttttttgagacagtctcactcttgtcgcccaggctggagtgacgtggcgcgatctcggctcactgcaacctccgcttcctgtgttcaaaggattctcctgccccaccctcctgagtagctgggactacaggcacccgccaccacgcccggctaatttttttttgtatttttagtagagacgggatttcaccatattagacagactggtctcaaaactcctgatattgtgatccaccggcctcggcctcccagagtccattgttttttataagaataatagattctgtgctaaaaccctgcacttgtgattcctcatctgtaccataatggaacagctcacaactacagaattttgcttgggaatctgtgggaaacaactgctcccacttgagctattcagagctgactgcaacgatcagtcagcttatgggacttcagaagttgcagtaatgaaagttcattccacaacaacttggamagtgaaaatattatggagatggctttgctccccctcctttcgagtcccttgtgaatttttggtcaaacacccattcctgtctaaaacattcctcctacagaccaatcacctggataattgcatttccacta

SEQ ID NO: 686046 - DNA, 1418 bp, Homo sapiens
tctctttttatctcttgggatgcttacattaatatatgtaactctctcagaacacacagtctggctgggcacggtggctcgtacctgtaatcccagcactttgggaggccaaggcggatggatcacttgaggtcaggagttcgagaccagcctagccaaaatgatgaagccccacctctactaaaaatacaaaaaaattagccagctgtggtggcgggtgcctataatcccagctactggggaggctgaggcatgagagttgcttgaacctgggaagcagaggttgcagtgagctaagattgtaccactgcacttcagcctgggcaacagagtaagactccatctcagaaagagaaaaaaaaaaaacacacacactatctcaaatgcacatgtcattatttctttatttgggttgggggagtgtggtagaaaataaagtcagcaagaaagaaaagagatctacagtcccctctgcatatgccacggctgctacaaaggagaggcacgcaggggcagaggcagaggcaggagaccgcctgcagctctgtggccaatgctgggtcaagggtgtaggtttcccatggatgcyttccagaccagacacttctacaatgtgaaattctgattccagctggccagtgtctagctcctccacctgtaattataattgtgccttcctaaacacaaaggcagacaaatctgcccacatttccaagctaaatcttcttcatggaaagatactcatagcagttctttttacccccttcacactgtaatataatacttacaacaactaagtaagtgacatgactgaattcgtttagcaaacttgaacaaacaaatgggaatccttaatagcaccggaagtcctttaaatgctcaaaatccagtgtgtacttggaatttgggctgcgttaggataaaaacaaaatatgcccgcacctacagcattctcagaaggcatagtatttatgcaaagtaaataaatcacattttatttaacaagcaatctttattgtcattttttattttttgagacagggtcttgttctatcacgcaggctgacatgcagtggtgcaatcatggctcactgcaaccttgacctcctgagctcaagcgatcctcttgcctcagcctcccaaagtgctgggattacaggcttgagccactgcgcccagccacaagcaagcatcttgttaaacaagcattaggtccaggaatataaaatgttcttcccacaaagactctgctcacactggctcttcagcctggaacgccctcctatccaaatctctgctgcaaactctaccctaaccaaggtcttagcaacggaaccttttctaaaccttccccagccccaccaacgccacacagagctagacccttagtggtgggcactccctgaggccccgcttga

SEQ ID NO: 686047 - DNA, 623 bp, Homo sapiens
  misc_feature 354: n = A,T,C or G
ttttcaccccaaagaggctaggagatccaccagacagagctcaatgctactctgacttcccataaaggaaagagggtaggagcaggaagattgggcatggtggtctgatagccctccagccaatgctggccaccacgggtcctgtgtctccaataaaggactcaccttagtatccctgccatcctcagtcattggggagattaagtctctaggaagaatgagcatgttgcaaatgaggtgatggatttcacagcacagcagcttgggatctcactaaataacattccctgtggtcaaggaaatgagaagcacatttttcatggccacacgagggccaatttgtcccagaggggnaatttctccaggacccagagcatgggattgcggggcatgcatacctagaaacctgtttaaagtcattccttttacatattgtcactctcaactgcttacagycatgttgtacagtgtcctagattagaatgtgctatggtggggtagaggaaaggttagcacagcaacagcccaatggatgcctggcctgagaggacagcctaacattccagtgtaagagctcatggttgaccatttgatgacacacagcatgggaatggggacctttc

SEQ ID NO: 686048 - DNA, 2981 bp, Homo sapiens
  misc_feature 826, 827, 828, 829, 830, 831, 832, 833, 834, 835, 836, 837,838, 839, 840, 841, 842, 843, 844, 845, 846, 847, 848, 849,850, 851, 852, 853, 854, 855, 856, 857, 858, 859, 860, 861,862, 863, 864, 865, 866, 867, 868, 869, 870, 871, 872: n = A,T,C or G
  misc_feature 873, 874, 875, 876, 877, 878, 879, 880, 881, 882, 883, 884,885, 886, 887, 888, 889, 890, 891, 892, 893, 894, 895, 896,897, 898, 899, 900, 901, 902, 903, 904, 905, 906, 907, 908,909, 910, 911, 912, 913, 914, 915, 916, 917, 918, 919: n = A,T,C or G
  misc_feature 920, 921, 922, 923, 924, 925: n = A,T,C or G
ttaaggtagcaccctgaccagccccggtctttcttcagttatactgtagaattttgttactgatacaactaaaagatctcaaagtataatttggggtttcagaataatggaaagctctctggagtcatagtcatcttttctatttttaaaaatcagagtctattaccatgcttggcacaaaagatgtcctcagtgtatatttattaaatggacgattgaatgaatgagtctaacctatgggcaaaacaccgtacctagcaatttgaaggactgctagccatagaaatagagaaacagagtgatctcaccatttaccaaaacccttgtgatgtcaaggagtttaatattggttgcctttctccataagagtaatacaaatgataatcagggaaacaataggatatatggaatagaatacaccaaattaattttgtattaaggagagtcataattgagagtttgttgcagctgattaataatgttccttaatatttctggaaagaaacagaggaagtcaaatcacattgatcatgggcttgggatatggacaaccttcttaaatactttcagaactatccttccattgcatatgttggttaattctctgtgaggctttattatctgccccgttcaaattacaaagaataaaatagaaggaggtttaatgttttggtgatatcagtagttggtaaacagcagaactggggtttcaacctttccctccaaattcagctctgaagctcttactcacttagtgatggcttgtgactgaatgtgaacgagctggtgctacaattggcttagctgcagagattcaaccacatannnnnnnnnnnnnnnnnnnnnnnnnnnnnnnnnnnnnnnnnnnnnnnnnnnnnnnnnnnnnnnnnnnnnnnnnnnnnnnnnnnnnnnnnnnnnnnnnnnncacgccggggcgcacgcaacggcggttgcaccggctaagaaacgacagatgaaatcgatacggaagcaagaaagcacaggcagcaggacggagaaagaaggaagaaggggcgaacggatagacagcaaagcacgcacgaaacgaccagaaggaaggtacaatagaaagacgacgaaggaaagaaggaacaacttctcagagttcacaatgtgcctacgatgtcactggaaacaatcagctcattagcagttatgggtgcttctcaaaattatactgcaggctccccaagtgctgcctaaattctctggttatttcaactgtggatgagagaatttgccctgtgtgcatggatgagtagcaggaaggccttctattgttatcacagaagacacatgggaaaatgtgtttgggggcttactgcaaatcatacttataggattgtcagcatgcttgcagagcaattatctgtcatcccataaaacaaacctgtgtcattatattcttgatacatgcattggagccaccaaaaaaaaaaaaaaaatgtttcctagacctaaatgtgaaaaatcccagccgggtgcagtggctcacacctgtaatttcagaattctatgagaccaaggcaggaaaatcatttgagtctaggagttcgagaccagctgggcaacatagtgagaccctcatctgtacaaaaaataaaaaattagctgggcatggtccgcatgcctgttgttctagctacaggctgaggcaggagaatgccttgagcctgggaggtcaaggctgcagtgggccctgactacatttctgccggggcaacagaaaaagaccctgtcaaaaaaaaaaaaaaaaaaaaaaaaaagaaaagaaaagaaaagaaaagaaaaagaaagagagaaaaatccctaaacatggatgaatatcgtcttttaaccccttttccattgactagaccatttttactttgtaggcccggtaactcatgaaatctcacctttacaaggaaaagtctctctgttttttttttctgcctcagaattctttaatataatgtagatatcttaagactcaatgcacaagacaatatgttgaattttcaccaatctagaaatgatgaatagccctttaaatattctgaaattaattgaattatggaatgttatagattgcatagacttttgacaagatagaatcccatcctggagactgacatagctttgcctaaaatatgtatttagaaaagttttgaactcatgtatatacatcattaactcaccctagtaaagcacctgatgacaaaaatgacacgagttagtgccaacagcccataatcatgtatttaaatatagcttttattttgcatcctaatttcttgtgatacttgaatgttcttttgatttcctgtgatttaacttttttaataattcaaccttgtgcatttgtgctctctgtgctggaaagtacaggtggcatgagattgacagaccattctgaaaacattacatcaagaagagcaagttttgagtggacaggagacctcagaaaactgaatgaggggggtccatttttagcacaagcttcgccagcaaacagctatgttcctacccatatgcaatgtctctgaaacccagtctccttattcctcaaatgcatatgcattttacctgtctcaaaattgagagattaacatgaggtaatgattatgagactctcttataaatggaaaagtgctttatagttgtaaggtagcattactttttttttttttaaggaaactgacaagttaattaagctattcaagataattttaaaataccatgttgttaatatattttaaataaattctaagattaccactcatttggttcatagcactgtaaataaaacttgtattttaatatcatggagtaaacctaatgtctgtttttaattttttggtcgttgtttgttttggggaaagcattaacgttgaattttaattttrgtaaatgttaaattctactaatgttatttaaaaattcataattatcaacataagtttaagattatttattga

SEQ ID NO: 686049 - DNA, 646 bp, Homo sapiens
tgaaacggccttccccytcttttgtttctgagactgcatgtgctaaaaaataaaacacaatggctacctgtacctttcagtgtcactgttttgattagcttaagggcaccagtagctttattcaccatcgttttaccactgaagtgcatatatcagcattcaggaaaaggtacatgacatgattatgttatgaaagttgttttgaccacctggttttaaaccccatcataggatcttggggactccaagggtctgaaaaccacactttgataattgctacttttgcctactataaacatttataattgtggacaattacagctttgattttgatatgttctgatagtgcagttcatcttgttgcaattatgaatgatttgcgaaccacaactactcccaagtatatgtttcacccattggtttcttactatggtaagagctttgtgcctaccaaggtgtgtgttttataaaattggtatcacattatgacagtaaaacaaataattccatcttctgtagggagaccccctgaaactattgctatggaataaaagatgaaatgctcctgattattgtaaatacaaaattgcatgcaggattgtgtaaagacaatgccaggttggactgccagaacgagccaacagcg

SEQ ID NO: 686050 - DNA, 646 bp, Homo sapiens
tgaaacggccttccccctcttttgtttctgagactgcatgtgctaaaaaawaaaacacaatggctacctgtacctttcagtgtcactgttttgattagcttaagggcaccagtagctttattcaccatcgttttaccactgaagtgcatatatcagcattcaggaaaaggtacatgacatgattatgttatgaaagttgttttgaccacctggttttaaaccccatcataggatcttggggactccaagggtctgaaaaccacactttgataattgctacttttgcctactataaacatttataattgtggacaattacagctttgattttgatatgttctgatagtgcagttcatcttgttgcaattatgaatgatttgcgaaccacaactactcccaagtatatgtttcacccattggtttcttactatggtaagagctttgtgcctaccaaggtgtgtgttttataaaattggtatcacattatgacagtaaaacaaataattccatcttctgtagggagaccccctgaaactattgctatggaataaaagatgaaatgctcctgattattgtaaatacaaaattgcatgcaggattgtgtaaagacaatgccaggttggactgccagaacgagccaacagcg

SEQ ID NO: 686051 - DNA, 646 bp, Homo sapiens
tgaaacggccttccccctcttttgtttctgagactgcatgtgctaaaaaataaaacacaatggctacctgtacctttcagtgtcactgttttgattagcttwagggcaccagtagctttattcaccatcgttttaccactgaagtgcatatatcagcattcaggaaaaggtacatgacatgattatgttatgaaagttgttttgaccacctggttttaaaccccatcataggatcttggggactccaagggtctgaaaaccacactttgataattgctacttttgcctactataaacatttataattgtggacaattacagctttgattttgatatgttctgatagtgcagttcatcttgttgcaattatgaatgatttgcgaaccacaactactcccaagtatatgtttcacccattggtttcttactatggtaagagctttgtgcctaccaaggtgtgtgttttataaaattggtatcacattatgacagtaaaacaaataattccatcttctgtagggagaccccctgaaactattgctatggaataaaagatgaaatgctcctgattattgtaaatacaaaattgcatgcaggattgtgtaaagacaatgccaggttggactgccagaacgagccaacagcg

SEQ ID NO: 686052 - DNA, 646 bp, Homo sapiens
tgaaacggccttccccctcttttgtttctgagactgcatgtgctaaaaaataaaacacaatggctacctgtacctttcagtgtcactgttttgattagcttaarggcaccagtagctttattcaccatcgttttaccactgaagtgcatatatcagcattcaggaaaaggtacatgacatgattatgttatgaaagttgttttgaccacctggttttaaaccccatcataggatcttggggactccaagggtctgaaaaccacactttgataattgctacttttgcctactataaacatttataattgtggacaattacagctttgattttgatatgttctgatagtgcagttcatcttgttgcaattatgaatgatttgcgaaccacaactactcccaagtatatgtttcacccattggtttcttactatggtaagagctttgtgcctaccaaggtgtgtgttttataaaattggtatcacattatgacagtaaaacaaataattccatcttctgtagggagaccccctgaaactattgctatggaataaaagatgaaatgctcctgattattgtaaatacaaaattgcatgcaggattgtgtaaagacaatgccaggttggactgccagaacgagccaacagcg

SEQ ID NO: 686053 - DNA, 644 bp, Homo sapiens
tgtgctaagaagttcatgctaatccaattcattcattcttttacttcaggtttgaatcaaaaatggaattttattaatccaaacgttgtcatgtaccaggttcagtttgtactaaaatgaaagatttttattgttgactcttaaaggacaattttatttattatttgttatcaatttttgatatcaaagttttgcaactttgatatcaaagaatttggtatttgaaagtgtgttagttctaccctgtctaaagttcttcatcatataatatagacagaaaatccacagtaaacttataagcattacaatgaaaattataaacatcatatttgatataaagtgtatraattatacacattttatataaacatttacattataaaaattataaacatgaaactatacaatatgctttataatctgcatggtgatagaaataaacagagattgcagataccttccatttctggatgataagagtagatgcctgaatgaaaatctctccgtgcatcttttcaaaaaagacaaaataaaaataaaaatgagtgaaaataaaatcatgtatgacccatgcctagtgaaagacaacaaccattccaacttgcatctctccgttatggtcagccttgagaaaaaggaaagaa

SEQ ID NO: 686054 - DNA, 526 bp, Homo sapiens
cggaatggacaaccatttacagagaagtcttttgcctccaacattaaatgacatgtttgctcaaacaaaagcaaattcacggagcctcaccgcaaacagaccatggccatgtccctcatgtggttgctcatgaagtctttgtttaccatgtctgcctgtctcacatccctctgtgattacagacacacctatcaccgtctgtatttatgatcaatcatttttctctctgtgatctcctagggactccaatgcaatcaaccccaccaaaagggtgacatttcagcattttagttttgctgagactgccttgctgagaagcgaataagatgtttgatttctgctggtaaaataaaattggcaaccatgagacctaagagattctgagaaatggcatggactttataacttcttgtaataaaagtcaaatcatgcattattttcttggctgtgtttcagggagtgagggaggaaaaccagggaatctttatatatatatatatatatatatatatatakatatatatat

SEQ ID NO: 686055 - DNA, 1028 bp, Homo sapiens
tttcttgaaaaagtataagaactcccgaatcagggattctttcttgaagaggctgcctggtccaatatttttggaaaaccatatatcatttgcctctcttcaattatatcctgaaaatggacacattatggccttaaagtctcctgtactaatgggtttagcagctgtgacggataacttagggttctttgtaatgagttttaaccaaattaaccacaagagtgttgagaatacttctgttgacacagagcagaaagaagtactaacagggtatgaagatacttgaaagtgtttaaattaccaagactacttggagatatgaacttgttggtttttttctttatttcacgaatttattcaaaacttgttgagtaccaataagtggggtacaaagaagatgaaattgcttatctttcctatattaaccatacactaatgttattttgcacctctggttttatgtttaagaacaaataagttttaccagaatttttcttctggtgtgtgtgtgtgtgtgtgtgtgtgtgtgtgtgtgggtttaatctctcatgtcctatttcaaaagttaaggaaaacaacagcttgattcagtcttcatacatctttcttaaatagttaagggcaaaatcatcagagctacatagcccaaatattaggaattaggttcatgttcgaattctcagagggtaattatatagttcgattttaacttcttcaacagaccgactactacagttgatgagcaaggagatgaaagtatttgataaacatcatggagttaatatgattcttgagggaggggagaaggctgcttgtcttaggtaatgcttttgagggtaggtttgtcctagccttgaggtagcaggcttgctctgttggctgaagaagccttaacatgcatgccygtattgcaaatttacccacatgccaactgtatgctgtgggaagaaatgaataatgtagatgccattacagggaattaggcggaacggatagacttagtgcatcagaaccaatgagaagtagac

SEQ ID NO: 686056 - DNA, 1028 bp, Homo sapiens
tttcttgaaaaagtataagaactcccgaatcagggattctttcttgaagaggctgcctggtccaatatttttggaaaaccatatatcatttgcctctcttcaattatatcctgaaaatggacacattatggccttaaagtctcctgtactaatgggtttagcagctgtgacggataacttagggttctttgtaatgagttttaaccaaattaaccacaagagtgttgagaatacttctgttgacacagagcagaaagaagtactaacagggtatgaagatacttgaaagtgtttaaattaccaagactacttggagatatgaacttgttggtttttttctttatttcacgaatttattcaaaacttgttgagtaccaataagtggggtacaaagaagatgaaattgcttatctttcctatattaaccatacactaatgttattttgcacctctggttttatgtttaagaacaaataagttttaccagaatttttcttctggtgtgtgtgtgtgtgtgtgtgtgtgtgtgtgtgtgggtttaatctctcatgtcctatttcaaaagttaaggaaaacaacagcttgattcagtcttcatacatctttcttaaatagttaagggcaaaatcatcagagctacatagcccaaatattaggaattaggttcatgttcgaattctcagagggtaattatatagttcgattttaacttcttcaacagaccgactactacagttgatgagcaaggagatgaaagtatttgataaacatcatggagttaatatgattcttgagggaggggagaaggctgcttgtcttaggtaatgcttttgagggtaggtttgtcctagccttgaggtagcaggcttgctctgttggctgaagaagccttaacatgcatgcccgtattgcaratttacccacatgccaactgtatgctgtgggaagaaatgaataatgtagatgccattacagggaattaggcggaacggatagacttagtgcatcagaaccaatgagaagtagac

SEQ ID NO: 686057 - DNA, 648 bp, Homo sapiens
tttttctgctttctttctgtccttaatttttcatttyagcaaaatagtaagtgggcttaaaatacctagactactggctgggcacggtaactcacacctgtaacctcagcatatggagaggccgaggcaggtagatcacttgagcccaggagtttgagaccaggtgggccaacacggtgaaatcctgtctctactaaaattaccaaaagaattagccaggcatagtggcaggcacctgtaatcccagctactggggaggctgaggcaggagaattgcttgagcctgagaggtggaggttgcagtgagccgagattgagccactgcactccagcctgggtgacagagggagactccatctcaaaaagaaaaaacaaacgaaaacaacaaaaatacctacagtactgaagaaaaaagcctgaaactggaaatggagtaaaagaaaagctctgcaaatagccggccacttcaagaaatgcagagggaaaagtttgcttctctaggagtcctcaaccagggtaatttagcttctaaaccaatgcagggtgtttgacctccacagtaaatgaaaagtgcatgtccttaattaagaaaaaggcggcccgaaggaagccagatggtagaggaatgagccattggagggaagatag

SEQ ID NO: 686058 - DNA, 651 bp, Homo sapiens
ccatctactcaacattaagcatttttatttttttctgaattttgctaaccgtatgcacagaaaatggtatgtcattaaattttcatttttaactgctaacaaagttgaatttgtttgaactttttcttatcgtttgttggtcatttgtatttcttgttttgtaaattgcttgatcttattctctgccyattattgtcacatactggagtatgcactttttcttattaatttataagaacacattctatattaaggatattattcatctggctgtcatctatatttcaaacattatattttgctgtttgccatttttatttcaagattttccaatttattgcatataactttataagaattttttctaagaatctctattacactgtagtaattgcttaatttttctaattctaaatttttattatttgaccttttctattgcttatttttaatattactttttctcaacattttattttgaaaaattttaaggctacagaaaagttgcaagagtagtacaggttgagtatcccttacccaaaatgcttggtaccagaagcattttttttctaattccagaatatttgcattacaccagttgaggatcccaaacccgaaaattcaaaatccaaaatgctttaaggagcattt

SEQ ID NO: 686059 - DNA, 1332 bp, Homo sapiens
gaaggaagttcttttaaataatcatgaaaagttttcaaaattaattatagttaatatagtacatatccaayaagctcttgaacactaatcagaaacaaacacacatcagatactaaaaggctaaggacaatgagaaaatattaaagttagccagagaaaaaagaaacactacaatgaagcaaataaagcaatatcagaaattatgcaagttggatgatactaaagaacctttaaaatgaggaaagaaagtaattcagtcttcctaaccagaaatttatacttgcaacccatatctaaagaaatccatatctaaagaaaatagcttttaataataaaagggcaataaagccttccacaggaaaacaaaaactctaagaattcactgctcacagactttctcaacaaaaacattaaaaatgttcttcacgcataaaatatatgatgtcagattgatatttggatctacaaagaaatgaaaagctctggaaatgaaataaatgtatggtaatgaattaattttcttgagctctcaaaaaagtgagatagaaatgtatcaatgcctaacatgctctctttttttttcttttttaaaaagacagggtctcgttctgttgcccaggctggggtacagtgatgccacctcatagctcactgcagccttgaactcctgggctcaagccatcctcctacctcagctccctgagtagctggaactaatggtatgtgccatcatgctcatttttattttgtttttcacagagacggggtcttgctatgtgcccaggctggtcttaaatgcctgccctcaagcaatcctcacatctgggcttcccaaactgctgggattacaggcctggaccaccttgcctggccccaaaatgctctttcaaagaaactttttattcacatatcaatgctcaggaataactgccaggttgttatggatcaactttactcaaagtagtgaaacaaaagctgtgtagaccaattatgcttgataccaaaagtgtagatatagacatgtttgcataaagtgaaagctattacaattagaatgtgaaataaagtttataaatgttcttctttaaaagtaatttggtaatttatacattcttcaagttgtttttaaactcaactcaatgattttgtagctaattatatcaaagtgttttcatgcttgaaattctgatggtatttaaaatatatatttttctcattgtagaatatgctttgattggaatttatcaagcataggctttgatatgaaaatcaaaattattatccaaaaatacttaatttttatggttgaattgcaatatatattgtcaaata

SEQ ID NO: 686060 - DNA, 658 bp, Homo sapiens
tgaacacatacatggcagatatgataaaacaaaggtccaaatactgttctttcattatagaatcaaagaatatgatacaaattaataattaactattttagggtttaaaatgttgtcaaattataaatattaatctgaaaataatgaaaaaatggttttaagtaatacatatgctagtagaaaagacactgtacaacaagcaaattaacttccacatgcacacaagaactaagatttcactgaaatagtaaattttgaaagtatcagagtgttacattagctcctaaacatggctactttatatcctgagagtataacttacagtgctgaaattcaggcacatcttatacataaatagttatcaccagggcgattggatgatgtattttcttttcttttcagaaaatgcatatgcagctataaagacgtcatatttacccagtgtgaatacctttcaatatatttcaaagcagagacaaatttataaaagtaaagcttatagttgctatacrgagcaggaatttcactagcacaaattcaaaccagagcctttcatttttattccttaccatgtgccaagcaacattttaatatccatcatttaatctttacaaaaatgctatgaagtcaataatattagtgttcccagtttagagag

SEQ ID NO: 686061 - DNA, 1500 bp, Homo sapiens
tgatgagttcatgtcctttgtagggacatggatgaaattggaaactatcattctcagtaaactatcgcaagaacaaaaaaccaaacacggcatattctcactcataggtgggaattgaacaatgagatcacatggacacaggaaggggaatatcacactcggggactgtggtggggtcgggcggaggggggagggatagcattgggagatatacctaatgctagatgacaggttagtgggtgcagcgcaccagcatggcacatgtatacatatgtaactaacctgcacaatgtgcacatgtaccctaaaacttaaagtataataaaaaaaaaaacatttcaaaatctactggataacctagaagtgaaaaatagcctataggttsaaaaactcctgtagtgaagaaagaaaataactaatatacagtgacaatataaatattataaatatttattttattaccaccctgaaatttgataatacaaacatgtaatagctacatatcatccatatatcaggtcataaaaaatcaacacattcttcaaaaatttagcataacagaaaatgcactctgtctccttgatggaattaaggtaaaaataaaagtaaaaataagtagataagtagatggaagtagatgtttaaaaacaaagaaaaatatttgtttgggataacataaaatctcaattgacaattccaatatttccagaacattgcctgtcaacttgtgtagagttgtccccaggagatatttgtcaatgtctagggttattgtggggatgtcaagactggtggaggtgtgaaatttagaggtcaatcgaaacacctagcattgctagggcagcctcccacaacaaagaatcctctggtcctaaaggtaagtagcaccaaggttgagaaaccataatctagacaggaaacactacgtagctattccaagtgctcaggaaaacacatcagtgccctcgaggggaaaagtgtaaacattttaattgctgcacatggtgacacaaatccatgttgttaatctaagtggaatgggctgaagaacaaaacgtaattcaaagagattacgtgagccacaatgaggacagctgcctggaagaaacagacccaagtatccttggatatgaactccctttggagctttgcaacaagcagtttcttaaaggcaaaaatggttccagaagtgggatgatgcaaagaggtttgtcacaaattctcattggcttatggaaataacatttattagtgactggctatacactgttacactattattgggtgtgggttatagtgtctagtgtggcgttattggttaatttatagctactgtggcaacagcaagcagcctagatgaacacacagctcaaagaggagcaggacagaactgctgtctcatttgaatatctctctgggcctgattatttaaaaggacttgcatttctcacatgaaagttattttcttttctcaatgtccataaatgagaataaatagac

SEQ ID NO: 686062 - DNA, 921 bp, Homo sapiens
tggctttcttattttagtttaccatttgtcctttagtttgtaaagcttctattttgttctataaattttctgatgttagggtaaaatccattacttattctatctcatggaatttttatttcaaatatttatttttcatctatatatgtcacatttttcattttataacttctatttttctcctatgttcaattttcatttaagtaccttgacatatatatgtatttatctatatgtatttataaaatatatttactttaaggaccttgaaatttccttcttctctgtcatttataaatgacttatttttattctgttaatatatgtcttaattatatttatcttacagcttctttgcatgtcagagtttttttggggggtattttggtgttatgctattgaatatctagatttgattggctacctttgaacaatgttgtggcaggcagttcagtaacttcaggatgagtatttgtctgttgttgttttaaatcttctctttaaactttgtygagttagtctagagccatctgtaatttggagctacatgagcactgtcactagggcatgaacctccagtggtcttttctgaatatcctggaggtacagaggggattcccttctctggctggtcagagctaatgtgtcttcctgtcatgtgatgccagggaaatgttcttcttccaactccctggtacagtcctttgctcagctccttagaatttcatcctatgtacatttggcttagggacttgggagaatccttaggctgattcttggttcctttttctgtaaacgttctcttctactacacattccagctgcttaaccttttttgatttttatcgggttcctcagtgcaatgacaatgtctgttctctctgggattcctctctactgctgtctcggagaatctgggaa

SEQ ID NO: 686063 - DNA, 921 bp, Homo sapiens
tggctttcttattttagtttaccatttgtcctttagtttgtaaagcttctattttgttctataaattttctgatgttagggtaaaatccattacttattctatctcatggaatttttatttcaaatatttatttttcatctatatatgtcacatttttcattttataacttctatttttctcctatgttcaattttcatttaagtaccttgacatatatatgtatttatctatatgtatttataaaatatatttactttaaggaccttgaaatttccttcttctctgtcatttataaatgacttatttttattctgttaatatatgtcttaattatatttatcttacagcttctttgcatgtcagagtttttttggggggtattttggtgttatgctattgaatatctagatttgattggctacctttgaacaatgttgtggcaggcagttcagtaacttcaggatgagtatttgtctgttgttgttttaaatcttctctttaaactttgtcragttagtctagagccatctgtaatttggagctacatgagcactgtcactagggcatgaacctccagtggtcttttctgaatatcctggaggtacagaggggattcccttctctggctggtcagagctaatgtgtcttcctgtcatgtgatgccagggaaatgttcttcttccaactccctggtacagtcctttgctcagctccttagaatttcatcctatgtacatttggcttagggacttgggagaatccttaggctgattcttggttcctttttctgtaaacgttctcttctactacacattccagctgcttaaccttttttgatttttatcgggttcctcagtgcaatgacaatgtctgttctctctgggattcctctctactgctgtctcggagaatctgggaa

SEQ ID NO: 686064 - DNA, 921 bp, Homo sapiens
tggctttcttattttagtttaccatttgtcctttagtttgtaaagcttctattttgttctataaattttctgatgttagggtaaaatccattacttattctatctcatggaatttttatttcaaatatttatttttcatctatatatgtcacatttttcattttataacttctatttttctcctatgttcaattttcatttaagtaccttgacatatatatgtatttatctatatgtatttataaaatatatttactttaaggaccttgaaatttccttcttctctgtcatttataaatgacttatttttattctgttaatatatgtcttaattatatttatcttacagcttctttgcatgtcagagtttttttggggggtattttggtgttatgctattgaatatctagatttgattggctacctttgaacaatgttgtggcaggcagttcagtaacttcaggatgagtatttgtctgttgttgttttaaatcttctctttaaactttgtcgarttagtctagagccatctgtaatttggagctacatgagcactgtcactagggcatgaacctccagtggtcttttctgaatatcctggaggtacagaggggattcccttctctggctggtcagagctaatgtgtcttcctgtcatgtgatgccagggaaatgttcttcttccaactccctggtacagtcctttgctcagctccttagaatttcatcctatgtacatttggcttagggacttgggagaatccttaggctgattcttggttcctttttctgtaaacgttctcttctactacacattccagctgcttaaccttttttgatttttatcgggttcctcagtgcaatgacaatgtctgttctctctgggattcctctctactgctgtctcggagaatctgggaa

SEQ ID NO: 686065 - DNA, 592 bp, Homo sapiens
agactttttcctataatttcttctcagacttttatgtttaaatatatatatatatgtgtgtgtgtgtgtgtgggtatttttttttttttttgagacgggtctcgctctcacccaggctggagtgcagtggcgtgatcttggctcactgcaagctctgcctcccaggttcacactattctcctgcctcagcctcccaagtagctgggactacaggctcccactaccttgctcggctaatttttttatatttattttgtatggtgtgaggtttaggtcaagattttttaagattctttattttttcttctctttctttcttcttttttttttttkttttttttttggcctatggatatcccaactatttttttaaaagatggtttttctccattgaattttatttgtacctttgtcaaaaatcagttggtagttggttttacttatgtgaagctattcctgggttctgggttatactttaatccttaataactttagagaaaataattatcttgtcgtggccttcaatgtatatctaaggcctatctgattgccctgtcacatgtcccttgattttcttatttttcttcttcct

SEQ ID NO: 686066 - DNA, 661 bp, Homo sapiens
aataaaataaagaaaagcagcttccttaataggacctgcatgatcctgctcccacctcttgccccagcctcacctgatagctccattrctctgggagctgcaggtactctgaccttcttccagctcctgcagggactgtactgctcaggccacagggcttgtgccctgtgccgtacatctctggaaccctcttccttctccactcacctacatttcttctcttgtttaagagctcaactcaactctcacgtcctccttgaagcctcccccacctctttgagacaaagcccccatggtacatgtatctcctttcatcgtgagtagtaatcattctattatggtctgtctccccggccaagcagtgaggccagcagccacagacccatgcccaccctgcatacctcacatagaataggcacctaataagaatatttggatcagacaaaacaataaatgaatgaagaattaatacatggtgaaaggaaaaaggatgatctcagagactgacaggcatgcactcaaaaccaggaacaacacactggatgctggatggaaacccagtagctcagagaaccaatgggaggcctgaggatcatgtgcaacctgaaatgtgttccatttgcctggcactatatattttctttaattttttgaaaatact

SEQ ID NO: 686067 - DNA, 599 bp, Homo sapiens
aaaatgggtaacaaagtgagatgatgggtgtgttaatttgttctactatagtaatctttttagtatgtatgtatctcataatgttgtgtaccttcaatatataaaataaaatttattttttaggaaacccatagaatcttgtggtaaatattgtgacctgttttttaagtcccaccatgttttattactataatgcaatttttatcaaaatagaattctggataccctaataataaaaacatacgttggttttgtctgtctctttacagagatctttggcatatgtaaagttatcttacgacatagagcaactccatgagctagtgtattattgttcccwtttaatagatgagaacaattataaaatgtttacgctcaggggtagattttccccactccaaatagttaatatataacaaatttgtatttaaaaacaagcctgactcttatgactcttagttacttgctttttcttacacactcatggagataattttaaagaatcatcattatcagcgtattattcagcaaatgtgttaaaaaatactctacaagaaattgccctaaaacagtttctcaaccttaacagattgacattc

SEQ ID NO: 686068 - DNA, 1994 bp, Homo sapiens
gaataggtgctgatatctttcactgctgacccagagccaggattttagagattagtttgcacaacactatctataatagaatatttgtaactctggtgttttcccacctccctttatgtgtaccctcccacctcttgaactttcatcgccaaaggaatacatctacaagcttagaattacagaaatccacatgtgcatgtgggaaataaacatatttggagaaggggagatttttttccatccctcatattttcctagatgtaaactttttgaaattttggggctgagaaataggcataaagagaattactgactaaatgggaataggttgaattcttcaagaatgtatatcatctccagagaacaaatctgttttgtgaggtagttttgggatgcacaaacactgctctgggtagagtttgaaatcacaatgacacatcctactgcttccagtcttacttgtcctagacttgattctggcttgttttrtggcatgattttaaaaattaatccctgtcactcaactcacaggccttgttgaaaaattcctcaccaatatttttaaattaatgtggcttcactgacagtcttagaatctaaaaataaagaacacactcatcaaaagcaattgtaaggctagtagcaattgatagtctgttttataaggagacaacacattaaaaaacaaaacaaaacaaaacaaaacaaaaaaacacctaacaattatctgtgggtacttgtggggagttactaaagttaaagggccctgaatttgtcagctatgtccttgctgccttattgtattatttatcacacaaaaggaccagattttctgaatctgaattacttagtactcatacaattgttttatgaacttttcatgaaccggcatgatattggccagcacagaaaagctagactctgctgatacagattgtagacttgatttctgaggctttaatctagtggaacgtggaaataacctgaaattcacaaacttttttttcttttttcctggtagaaagaatagatgtttaggagaaaccggatcaagcagactccctggtaatttgtactcatttccattctaatatagtttctctgtagccgtcagtacttgttttatgagttgcttttccagtagtggtgacactttgcaataacacatttgtctttgtggcttctggtataatgattgggtggaggaggaagctgttttcctgtgatcgaacctatttggaaattgaaactgcagaacatggtctcattcacaacacattatgaccaacaaaagagtgcagaccacaggcacgtatgcatgtggaacacccttagatttaccatgagcagagtaaatgtctcaaaggaagaatatttttcttaaaatattttagatgagagatggaaagcaaaatatagacaaactatgctcagtcagaatattgctaatggtttatggatttttcagaacagttttccaggttaccaactaataaatatagagagaatactggttagaaaataacttttaaaacattatggtagtcattgattcaagcaaaaatcattagtggatgctaacatttgaaaatgtttgatgagggcaagcatagctacagtctcaaaatatcttcctccttcgtatttatccaataaaaggggcagtaataactttacaatggagaaatctacaagacatcacccaaccaaatgatcaaaagtagaatgatcaaaggtagaatgggaaaaaggaacatgatatgcctcccgaggtgatgccccgagatagctcaggcattgtgcttgccaaaaatgcgtaactcgaatctaatcatgaggaaacttaaaaataataccccaaactaagggacattttataaaataactggcccttacccgtcaaaatgttaattccatgaaagtcaaagaaaggcacagaaacttccctagattagaagacaaaaaagatatgacaactaaatgcaatgtacaat

SEQ ID NO: 686069 - DNA, 1505 bp, Homo sapiens
agatgagtaaacacggcttacaatatagctccttttacatgtcaataaatttactgtttccagtgaatagatcagatgcatggcttggagtaatgagaaaccctcttccaggaagtctttcacatcccttccaatctgtgccaagtctctcacccactctaacctcccagtgaactaatgaaagtttcctttagatcactagtatcatcgtaggctgctgtattttcacgtctgtttctaccaccaaattggacgtccttcaacagcaaggattgttccactcatgcttatattttttgcagtgagtacttaaaggatatacattgaatagaattaaactagatccctaggatctaacaagttatagatccagaaacaaacaaaatgcacctgattctgtaaaactgagaccagatcctcaaacatcctggagccccagcaaagaacagccagcccacaggtgagacttggggaaatccctggattctgtacattttactccaagtcttttcacaaatgctgtcaactgcacagcactcctacctcacaggggacagatgtggcaatatcaaagggtctgtgtggggagaccaggaggactgaagtgtttgcatatcacaagatctgttagttaaactcatggtgaatctgctctggactcagtgaattggcccaggattggatttcttcagacctatgtgggtaatgctctcagaggacaactctgtgcatttggggtggggagacaaccccactgggagtcaagatagcaggcttcagtttcccagttctggtatcaccttactgtgtgccctgtcaaaggatgaagcagaggccactggggctaagaaagcagcactgagtttacttgccaggcaagagaacaaaccagtgaaggatccactcagtagctgacaattggagaaaagttagggagtttcaagagctgtaccgtgcaaagccaccagggtggggctgcccaaggccatgggagcccgcctcttgtatcggcatgacctggatgtgagacatggagctgaaggagatcatttcagagctttaagatttgacaacctcgctggatttcagacttgcatgggacctgcagcccctttgttttggccaatgtctctcattgggaacaggtgtatttacccaatgcccrtacccccactatatcttggaaggaaataacttgttttttgttttactggctcataagtagaagggacttgccttgtcttagatgagactttggacttggactattgggttaatgttgaaatgaataaaggctttgggggactgttggaaaggcaagattatgaggacatgagatttgggaagggcaggggtggaataatacagtttagctgtgtccccacccaaaatctcatcctgaattataattcccataatctgcataatccccatgtgtcaagggagagaccaggtggagataattgaatcatgggggcagcttcccccatgctgttctcgtgata

SEQ ID NO: 686070 - DNA, 1505 bp, Homo sapiens
agatgagtaaacacggcttacaatatagctccttttacatgtcaataaatttactgtttccagtgaatagatcagatgcatggcttggagtaatgagaaaccctcttccaggaagtctttcacatcccttccaatctgtgccaagtctctcacccactctaacctcccagtgaactaatgaaagtttcctttagatcactagtatcatcgtaggctgctgtattttcacgtctgtttctaccaccaaattggacgtccttcaacagcaaggattgttccactcatgcttatattttttgcagtgagtacttaaaggatatacattgaatagaattaaactagatccctaggatctaacaagttatagatccagaaacaaacaaaatgcacctgattctgtaaaactgagaccagatcctcaaacatcctggagccccagcaaagaacagccagcccacaggtgagacttggggaaatccctggattctgtacattttactccaagtcttttcacaaatgctgtcaactgcacagcactcctacctcacaggggacagatgtggcaatatcaaagggtctgtgtggggagaccaggaggactgaagtgtttgcatatcacaagatctgttagttaaactcatggtgaatctgctctggactcagtgaattggcccaggattggatttcttcagacctatgtgggtaatgctctcagaggacaactctgtgcatttggggtggggagacaaccccactgggagtcaagatagcaggcttcagtttcccagttctggtatcaccttactgtgtgccctgtcaaaggatgaagcagaggccactggggctaagaaagcagcactgagtttacttgccaggcaagagaacaaaccagtgaaggatccactcagtagctgacaattggagaaaagttagggagtttcaagagctgtaccgtgcaaagccaccagggtggggctgcccaaggccatgggagcccgcctcttgtatcggcatgacctggatgtgagacatggagctgaaggagatcatttcagagctttaagatttgacaacctcgctggatttcagacttgcatgggacctgcagcccctttgttttggccaatgtctctcattgggaacaggtgtatttacccaatgcccatacccccactatatcttggaaggaaataacttgttttttrttttactggctcataagtagaagggacttgccttgtcttagatgagactttggacttggactattgggttaatgttgaaatgaataaaggctttgggggactgttggaaaggcaagattatgaggacatgagatttgggaagggcaggggtggaataatacagtttagctgtgtccccacccaaaatctcatcctgaattataattcccataatctgcataatccccatgtgtcaagggagagaccaggtggagataattgaatcatgggggcagcttcccccatgctgttctcgtgata

SEQ ID NO: 686071 - DNA, 651 bp, Homo sapiens
cactgcaacctctgcctcccgggttcaagcgattctcatgcctcagcctccccagtagctggractactatgcctggctcatttttgtgtttttagtagagatggggtttcgccatgttggccaggctggtgttgaactcctgacctcaagtgatccacccaccttcgcctcccaaagtgccaggattgcaggcatgagccactgtgcccggcctcatgtccctgtgcagctgcaaaacaagagagcaggctcttggatgcccaggtgacttctgggggccgattgtccatttttcttgtctgatcaccctccttttgtgtagaacaaaatttttgacagtagggggattattcagccaatttaataccagttggaaagctgcagggggtggcttgttttgagtaagatggagaagttttatgagaaccatagtgttgggggaatataaaaattttgaacatttgcaatcatctgtcagtcttgtaatccagtttcccaaggttgtgactgaggaggtctggggtgggttgacagacctgcagaaggctggagtcttctagttgatgaagaatgacactgcactgctgttaataaagcctttgagtttctctgcctgctccccagccaggtgagtgcagtttgttttatga

SEQ ID NO: 686072 - DNA, 651 bp, Homo sapiens
cactgcaacctctgcctcccgggttcaagcgattctcatgcctcagcctccccagtagctggaaytactatgcctggctcatttttgtgtttttagtagagatggggtttcgccatgttggccaggctggtgttgaactcctgacctcaagtgatccacccaccttcgcctcccaaagtgccaggattgcaggcatgagccactgtgcccggcctcatgtccctgtgcagctgcaaaacaagagagcaggctcttggatgcccaggtgacttctgggggccgattgtccatttttcttgtctgatcaccctccttttgtgtagaacaaaatttttgacagtagggggattattcagccaatttaataccagttggaaagctgcagggggtggcttgttttgagtaagatggagaagttttatgagaaccatagtgttgggggaatataaaaattttgaacatttgcaatcatctgtcagtcttgtaatccagtttcccaaggttgtgactgaggaggtctggggtgggttgacagacctgcagaaggctggagtcttctagttgatgaagaatgacactgcactgctgttaataaagcctttgagtttctctgcctgctccccagccaggtgagtgcagtttgttttatga

SEQ ID NO: 686073 - DNA, 651 bp, Homo sapiens
cactgcaacctctgcctcccgggttcaagcgattctcatgcctcagcctccccagtagctggaactactatgcctggctcatttttgtgtttttagtagagatggggtttygccatgttggccaggctggtgttgaactcctgacctcaagtgatccacccaccttcgcctcccaaagtgccaggattgcaggcatgagccactgtgcccggcctcatgtccctgtgcagctgcaaaacaagagagcaggctcttggatgcccaggtgacttctgggggccgattgtccatttttcttgtctgatcaccctccttttgtgtagaacaaaatttttgacagtagggggattattcagccaatttaataccagttggaaagctgcagggggtggcttgttttgagtaagatggagaagttttatgagaaccatagtgttgggggaatataaaaattttgaacatttgcaatcatctgtcagtcttgtaatccagtttcccaaggttgtgactgaggaggtctggggtgggttgacagacctgcagaaggctggagtcttctagttgatgaagaatgacactgcactgctgttaataaagcctttgagtttctctgcctgctccccagccaggtgagtgcagtttgttttatga

SEQ ID NO: 686074 - DNA, 651 bp, Homo sapiens
cactgcaacctctgcctcccgggttcaagcgattctcatgcctcagcctccccagtagctggaactactatgcctggctcatttttgtgtttttagtagagatggggtttcgccatgttggccaggctggtgttgaactcctgacctcaagtgatccacccaccttcgcctcccaaagtgccaggattgcaggcatgagccactgtgcccggcctcatgtccctgtgcagctgcaaaacaagagagcaggctcttggatgcccaggtgacttctgggggccgattgtccatttttcttgtctgatcaccctccttttgtgtagaacaaaatttttgacagtagggggattattcagccaatttaataccagttggaaagctgcagggggtggcttgttttgagtaagatggagaagttttatgagaaccatagtgttgggggaatataaaaattttgaacatttgcaatcatctgtcagtcttgtaatccagtttcccaaggttgtgactgaggaggtctggggtgggttgacagacctgcagaaggctggagtcttctagttgatgaagaatgacactgcactgctgttaataaagcctttgagtttctctgcctgctccccagccaggtgagtkcagtttgttttatga

SEQ ID NO: 686075 - DNA, 1149 bp, Homo sapiens
ccaccaacaaatctcattgccattttttaactcttttatgttggtgtgtctgacctttccaaattaatgacagattctcagaggaaggagtatcaccttcttctatttgtttgtgagaagctaatagaagactgtctgaataaacaatgacctaaataatttgttaccaaattaaacaactattttttttttaccaaataaaacaactgagattttgacatgagagtacctttctttctaatctttatatttaagagttcctgttcttcatatttgaatttattgttgaaccagagtaacaagcctgatttggtttatttattttcttcagaaatatgtttgtatctgtattttcaaacatgtgatttcagcatttcactagggtactaataatcacagcctggaaaatataaggatataactaattcatacttcattagattcagaaacattttctcacatyagttaataagacaacaattttaaaaatgtctgcctttttctccacatggtgctaatgtgaagtatttaacactatgatggaagcagatttagaaagagattttgcagatgtcatttgaaatgttaacctatattaggatctgactatgaaataatattgtctaaaggacaatgctccttcctttcctttttatttctgtttattatttttttctaatttggaaagattttacattatataatacatacagatacctctactcaggaaagtaattaaatggttgtataaaaaggaactattaagtatatctaatccttgctaaaatgaattaaggcagccttaggaatctattgtatctcctatgtcacccatcttcatcagccctagttttgttgtttgtgccattgctaccaattctaatcctacaaatagcaggagtttaagccttattccactggtcatggattctcaaatagttttcagcagggtctttcctgacatccctactttagtctcatcattcagctagtatttattgtgtgaagatgaaaaagagaaagcggggggaaggcaaggaagaagagaaagaggatgaagagtgtgatgaagagaaaagaaggagaaagagggaagaagccacattcttaaggctgaaactatatcttgtggcttttgaaggattttta

SEQ ID NO: 686076 - DNA, 1805 bp, Homo sapiens
tgtttttttaagttaatataaattgcaggatttgattaaaatattctgatacaatagtcaaactcatattattttatgcataatctgaaaaataccagatgtaattgacagtaattttttaaaatgtaaacatttcctttcctttgtgtagttatgttattgttaactaaaaacagtccatgtataagacaagtaagtatgattccatccctttccgtgtagtcataagaatgaccataagcaaaagttaaaattacattcttgatttgtttaaaaatgcaaagcagatattgagaagccatcaactgtgcctgacgtattttctaaattatttttgttaatcaattacatcaacatgatttcacagagacctaaagatgccacatagagtagtatggcatatagactcctcagctgaaagtttctatcacggccaggcgcgatggctcacgactgtaatcccaggactctgggaggccgaagcaggcaaattacttgagttcaggagtttgagaccagcttggccaacgtggcaaaaccccatctctatataaaatacaaaacttagccaggagtggtggtgtgcacatgtaatcctagcagaggttgcagtgagctgagatctcactactgcactctagcctgggcgacagagcaagactctgtctgaaaaaaaaaaaagtttctatcgtgttaatatactaaaataaaatttccctgagatgaaatgtcttgctggtccacaggaataaccataaaactctattcagattttaattataatgaattataatttaatctgacatccacttaaaacaagtgttaatttttttatcattagctgacttgtgctagtatttttaagcggaatatttctaaatttttttctaaaccaatttaatcagagaacttgtttaaaatataactttctagaaacatacaaagatgcacatgagcagctactttagcaataactttcatgttctcttcaagtacaaaatcgccgatttttatgctcttaaaatgtactgacatttaattacttcaaaagtagagaaaaaagcatttaaaaagtaaaaaatctttccaaacacctgtgttgctcatgtcagaagatttctacatttttaaagttcaggcaagcattagtttaaaagatttgctccttttctttcattcatttaaccaggttggatatcactcatgtatttttagttaggaagccattcacatgacataacttctcattgaatgctctcagaaatgctgctgagataatcttcagacttcattataaaatttgtccattcctgacaaatgtcctccatggagaattcttcaccaccatattccagaggaagaatgtctgggaaatgctgaagcaagctttgtttgtagttgttcccatgcatgtgaatctgmaatagccaaaacactttagaaggaaaccgcattagatgcatttccagtggaaaatcaacctcataaaacaaggtattctaataacttctaaaatggagtgtataaatagataccacatcctttattcctctggttatgaatctaataattttacttatgtttaggttgtattactgtggatctaataaccttactgtttcttggatttgcattcttataactgcataaaatttataaaaagttattttcctctttcataagtaaatttttaaagattaaataaagttattttataaattctattcccttatgtgcaagtgattcttaccaaactaataccttgggactattctatacacgataaaaatgtactagctggtact

SEQ ID NO: 686077 - DNA, 661 bp, Homo sapiens
atacgcctgtaatcccagctactccagaggctgaggcaggagaattgcttaaacccaggggggcgtggaggttgcagtaaaccgagattataccactgccctccagcctgggcaacggagcaaggctctgtctcagaaaagcaaagcaaarcaaaacaaaacaaaaaactattgttgcaaaagaattataaatgttaccagtgacgatttggaaagaaaccagggtaggttccatttggcccctcaaagatctgcttccgagccaggtgcagtggctcacagcggtaatcccagccctttgggaggtcaaggtgggtgaatcacttgaggtcaggagtttgagaccagccaggccaacgtggtgaaagccccatctctacaaaaaaaaaaaaatacccgggtgtggtgatgtgcacctgtagttccagctactggggaggctgaagtggcagaatcacttgagccgagattgcaccactgcactccagcctgggcaacagagccagaccttgtctcaaaaaaaaaaaaaaaaaaaaaaaaacctgcttccggtctagtgctctgacaccgcctgtatgtcttttaaaaattactcagcatcacgaggcctcattttcttcatctgtaaaataaactgcaaaataaataaataaataaataa

SEQ ID NO: 686078 - DNA, 661 bp, Homo sapiens
atacgcctgtaatcccagctactccagaggctgaggcaggagaattgcttaaacccaggggggcgtggaggttgcagtaaaccgagattataccactgccctccagcctgggcaacggagcaaggctctgtctcagaaaagcaaagcaaaacaaaacaaaacaaaaaactattgttgcaaaagaattataaatgttaccagtgacgatttggaaagaaaccagggtaggttccatttggcccctcaaagatctgcttccgagccaggtgcagtggctcacagcggtaatcccagccctttgggaggtcaaggtgggtgaatcacttgaggtcaggagtttgagaccagccaggccaacgtggtgaaagccccatctctacaaaaaaaaaaaaatacccgggtgtggtgrtgtgcacctgtagttccagctactggggaggctgaagtggcagaatcacttgagccgagattgcaccactgcactccagcctgggcaacagagccagaccttgtctcaaaaaaaaaaaaaaaaaaaaaaaaacctgcttccggtctagtgctctgacaccgcctgtatgtcttttaaaaattactcagcatcacgaggcctcattttcttcatctgtaaaataaactgcaaaataaataaataaataaataa

SEQ ID NO: 686079 - DNA, 661 bp, Homo sapiens
atacgcctgtaatcccagctactccagaggctgaggcaggagaattgcttaaacccaggggggcgtggaggttgcagtaaaccgagattataccactgccctccagcctgggcaacggagcaaggctctgtctcagaaaagcaaagcaaaacaaaacaaaacaaaaaactattgttgcaaaagaattataaatgttaccagtgacgatttggaaagaaaccagggtaggttccatttggcccctcaaagatctgcttccgagccaggtgcagtggctcacagcggtaatcccagccctttgggaggtcaaggtgggtgaatcacttgaggtcaggagtttgagaccagccaggccaacgtggtgaaagccccatctctacaaaaaaaaaaaaatacccgggtgtggtgatgtgcacctgtagttccagctactggggaggctgaagtggcagaatcacttgagccgagattgcaccactgcactccagcctgggcaacagagccagaccttgtctcaaaaaaaaaaaaaaaaaaaaaaaaacctgcttccggtctagtgctctgacaccgcctgtatgtcttttaaaaattactcagcatcacgaggcctcattttcttcatctgtaarataaactgcaaaataaataaataaataaataa

SEQ ID NO: 686080 - DNA, 651 bp, Homo sapiens
tgcaacctctgccttctgggttcaagtgattctcctgcctcagcctctcaagtagctggaattacaggcgcatgccaccacacccggctaatttttatttttgtattttcagcagagatgggatttcaccatgttggccaggctggtctcaaactcctgacctcaagtgatccatctgccttggcctcccagagtgttgggattacaggcgtgagccactgcgcctggcacttttaaggactttatgatgacataaagttgatagtggatattgactacctgattctaaaggtatatgcagaaatgcaaagggtcaagccaagaayaaccaatttcaaagaacagccaccaagtgggagaaacttaccctgctggacatctagacttacattaaagctgcaataactaagacagtgcagtgttggagtgaacataaacaaatagaccaataaagcaaaatgaagagtacagaaacaggctcacacatatatcaatacctgatttatgacaatagtaggtatgtagagaactaaaagacaaaagtagcaccataaagctgtgggagaaagctgaggctgggagggttggagtgccatatgagacaaaaaaaaaaaaagcaaattggtcgctaccttgcttcatacacaaaaa

SEQ ID NO: 686081 - DNA, 595 bp, Homo sapiens
gcaccactggtctgatagaatggactttttaaaaataaggggtcttgtattaaaaacataatttaataattttattgaataatttgaaccaggtttgaagcatttccgtggaaggaaaacatgcaaattcccacaatgttagggtcctggtcaggttctttggagttacagrtaactgtttgtcatttctgggaatgtatgagatgtgcagaggcaaagtccagtatcagagatggtctcaccttgatggcagtaaaaggctcaaatgcgtttataataataccaacagcagcagcgacaacaatatatttgtttagcactttacagtttacagtgaactgtcctcatgttatttcatttagtcctcaaataactctatgtggttggctttttgtcttcgatctgcaggtgtgaaggacagaggcttagccatgtgaaatgtttttgctcaatgtcataaaggccatgtgggaagtggaccctaagccaggcagtgtgactgctccagggttcccagctccacagtgcaggaggcaaccatttccagttcttttcttcctttactttctcataggatactttttaagcactataa

SEQ ID NO: 686082 - DNA, 595 bp, Homo sapiens
gcaccactggtctgatagaatggactttttaaaaataaggggtcttgtattaaaaacataatttaataattttattgaataatttgaaccaggtttgaagcatttccgtggaaggaaaacatgcaaattcccacaatgttagggtcctggtcaggttctttggagttacaggtaactgtttgtcatttctgggaatgtatgagatgtgcagaggcaaagtccagtatcagagatggtctcaccttgatggcagtaaaaggctcaaatgcgtttataataataccaacagcagcagcgacaacaatatatttgtttagcactttacagtttacagtgaactgtcctcatgttatttcatttagtcctcaaataactctatgtggttggctttttgtcttcgatctgcaggtgtgaaggacagaggcttagccatgtgaaatgtttttgctcaatgtcataaaggccatgygggaagtggaccctaagccaggcagtgtgactgctccagggttcccagctccacagtgcaggaggcaaccatttccagttcttttcttcctttactttctcataggatactttttaagcactataa

SEQ ID NO: 686083 - DNA, 1907 bp, Homo sapiens
ggcaggcatggtggcaggcgcctataatcccagctacttgagaggctgagrcaggagaatcacttgaacccgggaggcagaggttgcagtgagccgagattgcaccactgcactccagcctgggcgacagagcgagactccatctcaaaaaaaaacaaaacaacaacaacgacgacaacaaaaaaccaccgccaccaccaagaggctcctcccatcactgctgtggtgcaactgggctactataaagttctgggaaagggaaagctcccaaagcagtctgtcatcatgaaggcccaattctgatgagctgagaagattaagaatgctggggggcctgtgtgctggtggcttgcagccgcagggaaggaggttcattaaatgctaaatactttttaaaaacaaaaccaaacaaaaagaaatggatatggaaagaataaaaccacacacaacttgtctctcacctggcacacagtgctgaggcgccagagactcgagtccttccccaccccactgctcccccgcaggggtggctcctcgggccccgctttgttcatcgtatccgggatcctttctgcaccctgcctgcctctcctttctgctgttcctcaccttcactaacaattcacccctccacacctgcagataggctccccaggctgccaggcttggctacagtcatcctctcggctcacccttagctcactcacaacttaaactcgcaaggttttgcccatgttctcctcgttaggtatgtaacgcttcctgtccgtgttcaggaaaggcagcgggtgtggtggcttcacaacacaatcgctggagtccataggccaggaggtaagcacaggtcctgccacttactggctgcggggccctgagcaagtatttaacttctccaggcttccatctcaattgcacaatagtgacaggaagagcaacacctcacagggctgtgacagtgcagggaaggagttcgtccagtgtcagtatatagagtgcgatagatactagctcttatgtacctgaggacctgagtgcatgaccttagtttagcctttctttcctccctccctccctccctcctccccgccaccctgccccccagcttccatctcacataactggacacaggctcctgactacagggcatgcctctcccatgtaacagaacacattttctcccctctttacatttgtattaatagatactcccctcttttcagttgggaggaatttgacccatgccagcaaaattcacttatttttaccaaccaagccccccctccccagtaaccatgcctcctattttttttctagtctcttctttctaagagctactgcatcaaatttcaaggatcactagaaaacaacggtacaatgtctctgagggagtcttgagggaaggatgggcaagggtttgcaggcaacggagaggctggctgcagaagggctgcaggtggtgtctgagcccaagaacctcatcaacagagcagggaaccaaggccgtggtcccagcagtcttgtccacacccacctgtggaccgaatcctggagggaaccagagcccaggaaaatggaatgaggcttggagtttggattgggtctccaggcacagaatacgaatgagaattctaggccgagctattaagcagaatgaaggagaacctgggcttccagaatgcctgtggacactgaagggtgggacagctctgggaacaggaagagccatcttccaggacacctgtccctggtcagcctggaagcaagcaatgctggagccacactgcagtcaggggtcgtcattttgtccctcagaacatacaccatatatgccacatctgcacacgtcggatggttctaacctggtgggaggagtgactccctcacagctcactgtttgggaagaggaa

SEQ ID NO: 686084 - DNA, 1907 bp, Homo sapiens
ggcaggcatggtggcaggcgcctataatcccagctacttgagaggctgagacaggagaatcacttgaacccgggaggcagaggttgcagtgagccgagattgcaccactgcactccagcctgggcgacagagcgagactccatctcaaaaaaaaacaaaacaacaacaacracgacaacaaaaaaccaccgccaccaccaagaggctcctcccatcactgctgtggtgcaactgggctactataaagttctgggaaagggaaagctcccaaagcagtctgtcatcatgaaggcccaattctgatgagctgagaagattaagaatgctggggggcctgtgtgctggtggcttgcagccgcagggaaggaggttcattaaatgctaaatactttttaaaaacaaaaccaaacaaaaagaaatggatatggaaagaataaaaccacacacaacttgtctctcacctggcacacagtgctgaggcgccagagactcgagtccttccccaccccactgctcccccgcaggggtggctcctcgggccccgctttgttcatcgtatccgggatcctttctgcaccctgcctgcctctcctttctgctgttcctcaccttcactaacaattcacccctccacacctgcagataggctccccaggctgccaggcttggctacagtcatcctctcggctcacccttagctcactcacaacttaaactcgcaaggttttgcccatgttctcctcgttaggtatgtaacgcttcctgtccgtgttcaggaaaggcagcgggtgtggtggcttcacaacacaatcgctggagtccataggccaggaggtaagcacaggtcctgccacttactggctgcggggccctgagcaagtatttaacttctccaggcttccatctcaattgcacaatagtgacaggaagagcaacacctcacagggctgtgacagtgcagggaaggagttcgtccagtgtcagtatatagagtgcgatagatactagctcttatgtacctgaggacctgagtgcatgaccttagtttagcctttctttcctccctccctccctccctcctccccgccaccctgccccccagcttccatctcacataactggacacaggctcctgactacagggcatgcctctcccatgtaacagaacacattttctcccctctttacatttgtattaatagatactcccctcttttcagttgggaggaatttgacccatgccagcaaaattcacttatttttaccaaccaagccccccctccccagtaaccatgcctcctattttttttctagtctcttctttctaagagctactgcatcaaatttcaaggatcactagaaaacaacggtacaatgtctctgagggagtcttgagggaaggatgggcaagggtttgcaggcaacggagaggctggctgcagaagggctgcaggtggtgtctgagcccaagaacctcatcaacagagcagggaaccaaggccgtggtcccagcagtcttgtccacacccacctgtggaccgaatcctggagggaaccagagcccaggaaaatggaatgaggcttggagtttggattgggtctccaggcacagaatacgaatgagaattctaggccgagctattaagcagaatgaaggagaacctgggcttccagaatgcctgtggacactgaagggtgggacagctctgggaacaggaagagccatcttccaggacacctgtccctggtcagcctggaagcaagcaatgctggagccacactgcagtcaggggtcgtcattttgtccctcagaacatacaccatatatgccacatctgcacacgtcggatggttctaacctggtgggaggagtgactccctcacagctcactgtttgggaagaggaa

SEQ ID NO: 686085 - DNA, 1907 bp, Homo sapiens
ggcaggcatggtggcaggcgcctataatcccagctacttgagaggctgagacaggagaatcacttgaacccgggaggcagaggttgcagtgagccgagattgcaccactgcactccagcctgggcgacagagcgagactccatctcaaaaaaaaacaaaacaacaacaacgacgacaacaaaaaaccaccgccaccaccaagaggctcctcccatcactgctgtggtgcaactgggctactataaagttctgggaaagggaaagctcccaaagcagtctgtcatcatgaaggcccaattctgatgagctgagaagattaagaatgctggggggcctgtgtgctggtggcttgcagccgcagggaaggaggttcattaaatgctaaatactttttaaaaacaaaacmaaacaaaaagaaatggatatggaaagaataaaaccacacacaacttgtctctcacctggcacacagtgctgaggcgccagagactcgagtccttccccaccccactgctcccccgcaggggtggctcctcgggccccgctttgttcatcgtatccgggatcctttctgcaccctgcctgcctctcctttctgctgttcctcaccttcactaacaattcacccctccacacctgcagataggctccccaggctgccaggcttggctacagtcatcctctcggctcacccttagctcactcacaacttaaactcgcaaggttttgcccatgttctcctcgttaggtatgtaacgcttcctgtccgtgttcaggaaaggcagcgggtgtggtggcttcacaacacaatcgctggagtccataggccaggaggtaagcacaggtcctgccacttactggctgcggggccctgagcaagtatttaacttctccaggcttccatctcaattgcacaatagtgacaggaagagcaacacctcacagggctgtgacagtgcagggaaggagttcgtccagtgtcagtatatagagtgcgatagatactagctcttatgtacctgaggacctgagtgcatgaccttagtttagcctttctttcctccctccctccctccctcctccccgccaccctgccccccagcttccatctcacataactggacacaggctcctgactacagggcatgcctctcccatgtaacagaacacattttctcccctctttacatttgtattaatagatactcccctcttttcagttgggaggaatttgacccatgccagcaaaattcacttatttttaccaaccaagccccccctccccagtaaccatgcctcctattttttttctagtctcttctttctaagagctactgcatcaaatttcaaggatcactagaaaacaacggtacaatgtctctgagggagtcttgagggaaggatgggcaagggtttgcaggcaacggagaggctggctgcagaagggctgcaggtggtgtctgagcccaagaacctcatcaacagagcagggaaccaaggccgtggtcccagcagtcttgtccacacccacctgtggaccgaatcctggagggaaccagagcccaggaaaatggaatgaggcttggagtttggattgggtctccaggcacagaatacgaatgagaattctaggccgagctattaagcagaatgaaggagaacctgggcttccagaatgcctgtggacactgaagggtgggacagctctgggaacaggaagagccatcttccaggacacctgtccctggtcagcctggaagcaagcaatgctggagccacactgcagtcaggggtcgtcattttgtccctcagaacatacaccatatatgccacatctgcacacgtcggatggttctaacctggtgggaggagtgactccctcacagctcactgtttgggaagaggaa

SEQ ID NO: 686086 - DNA, 1907 bp, Homo sapiens
ggcaggcatggtggcaggcgcctataatcccagctacttgagaggctgagacaggagaatcacttgaacccgggaggcagaggttgcagtgagccgagattgcaccactgcactccagcctgggcgacagagcgagactccatctcaaaaaaaaacaaaacaacaacaacgacgacaacaaaaaaccaccgccaccaccaagaggctcctcccatcactgctgtggtgcaactgggctactataaagttctgggaaagggaaagctcccaaagcagtctgtcatcatgaaggcccaattctgatgagctgagaagattaagaatgctggggggcctgtgtgctggtggcttgcagccgcagggaaggaggttcattaaatgctaaatactttttaaaaacaaaaccaaacaaaaagaaatggatatggaragaataaaaccacacacaacttgtctctcacctggcacacagtgctgaggcgccagagactcgagtccttccccaccccactgctcccccgcaggggtggctcctcgggccccgctttgttcatcgtatccgggatcctttctgcaccctgcctgcctctcctttctgctgttcctcaccttcactaacaattcacccctccacacctgcagataggctccccaggctgccaggcttggctacagtcatcctctcggctcacccttagctcactcacaacttaaactcgcaaggttttgcccatgttctcctcgttaggtatgtaacgcttcctgtccgtgttcaggaaaggcagcgggtgtggtggcttcacaacacaatcgctggagtccataggccaggaggtaagcacaggtcctgccacttactggctgcggggccctgagcaagtatttaacttctccaggcttccatctcaattgcacaatagtgacaggaagagcaacacctcacagggctgtgacagtgcagggaaggagttcgtccagtgtcagtatatagagtgcgatagatactagctcttatgtacctgaggacctgagtgcatgaccttagtttagcctttctttcctccctccctccctccctcctccccgccaccctgccccccagcttccatctcacataactggacacaggctcctgactacagggcatgcctctcccatgtaacagaacacattttctcccctctttacatttgtattaatagatactcccctcttttcagttgggaggaatttgacccatgccagcaaaattcacttatttttaccaaccaagccccccctccccagtaaccatgcctcctattttttttctagtctcttctttctaagagctactgcatcaaatttcaaggatcactagaaaacaacggtacaatgtctctgagggagtcttgagggaaggatgggcaagggtttgcaggcaacggagaggctggctgcagaagggctgcaggtggtgtctgagcccaagaacctcatcaacagagcagggaaccaaggccgtggtcccagcagtcttgtccacacccacctgtggaccgaatcctggagggaaccagagcccaggaaaatggaatgaggcttggagtttggattgggtctccaggcacagaatacgaatgagaattctaggccgagctattaagcagaatgaaggagaacctgggcttccagaatgcctgtggacactgaagggtgggacagctctgggaacaggaagagccatcttccaggacacctgtccctggtcagcctggaagcaagcaatgctggagccacactgcagtcaggggtcgtcattttgtccctcagaacatacaccatatatgccacatctgcacacgtcggatggttctaacctggtgggaggagtgactccctcacagctcactgtttgggaagaggaa

SEQ ID NO: 686087 - DNA, 594 bp, Homo sapiens
ttcatggagagttctaatcacagccagcataagcacaggggtaaaaacacagcgtctctaatggggaggttgacctcaccttgggggatcttgaaggctttcctgggcctgtaaaagcagaacaaatatttgaagaataagaagaagctaattaggagaaacgggtgtgggttatattcctggcagaaagttcagggtaagcaaatggcctgcagccacatgaagaatgatgaggctgagcataaagcgggagggccagggtggcatggctgaggccagaggaggttggaagctgtgcataggggtttccgtctgaaatacttgggtgtttctatagagaaacacccccgcccagatgtccctggaccatctgaattgaaacctttgaggtgaagcctgggcatgggatgttgaaataccttccaggagagtttgatgcacagtgaaggttgagaacaccagctgttcttaaagcgtaagagctgacctcgcgaagtggaaggctagttcagacagaggtctcagcttgagtgaaggcctagtggtgagaagctgcctggtttgttgggtcctgggarctggctggtacccggg

SEQ ID NO: 686088 - DNA, 1467 bp, Homo sapiens
tcagcagtggaaagactacaggtccttgaatcggaatcaaaggcctattacctgtgcaacctgggcacattactcaacctctcttttcctcagcttcctcatctgtctcagtgaggacaacattagcagctacagagctgctgtgaaggtgaaatgaaataatatgttctttgttctagcacaatgccaggcgcacacagtaggtgctcaaacaacatgtgttcccttgtaacggtaaagaaactcattcccatttttcctgcctttcaaccacaccagccctgtaatggctggctcaaccctgaggcccagggcctcctcgacataacgtggaaatccttgacattgaacctgaaagggaatggggtgggggaggtggagctggagccaccttggcctcagcccgccagctcatttcacagtgagcctcccawtccgctagctggagacttcccgtcattaagagcctgggctgggttccagctggtgccctggagaggagaggtttcttatcccattaccagcctcctaagccagcccgttccccccaggattaagatcttataaacatcagccagtcctcaggggtgatccgctgagggccgcccccattgattccagatggagaagagacttgttttgaggaacaaatgttaactttctcctttcagcaaggaaaaaaacaacaacacaaccacaaagaacaacgcaacctgaatgtctcacacaaaccaggtgtttttcttcttcttcccaagactcaaagaatgagaagttatttttagggggctgtgggctggaagcaccatgacggtgtgccttttgtcctttggagtctccaccagggccagcgcagagataaggggtggggcgggctctggtggtttcgggtgaaaatctgccatcgcggagagatgccagcaagcaaccaagtggcaatctttatatggaagctctgctctccaagaaaggttttagtttgcttaatttttctcctatgggttgtgcggcaactcttgtctctatctgggctttgtaaaaccccagcagaccctgatacgatgctgttcttttcagtgagaggcaaacagcccatctgctgaagcttccaacatcttcttctctttctgatggagactcttctagtgtataagctcaggccactgttaacatcgggaatggtagtaacagctctcaccttcgaggacagcttggattaccacctgcacagagccccatctctgagccaagttatggttgatttcaattccacgtcacatcgacagggatttgttttcacctccacatatataaataccccaactcacaatttgtaagtcacctggaatttctaattttagaagcactttgaaatatttgaaacagcttgggttgtgaatttagacaacataaatgtaggcaccttccagtcactttctagctctgtgactttaagtagggcacaca

SEQ ID NO: 686089 - DNA, 666 bp, Homo sapiens
cggcccccaggattcaattacctcccaccacgtcctcctatgacatgtggggtttatggggaatacaattcaagatgagatttgggtggggacacagccaaaggatatcacagttccaattttacacaagtagaaaaacaaaacagaatagaaggagggggcattttattcacctaatttaatgagcagtgcaatctcgatgccaaagtcacaggacagtagtagaaaagaaaatggcaggacaatctcaatgatatgtgcaattccaaaaccaaaagcatagtgttagcaaagggaagtcaacatcattttacagatatgcacatttccaagtcagtttggttctctactgcaaagatggaggagtagtagaaaacawttaaatgttattcagctcaataacagattaaagagaaaatgtgattatctcaattgattcagcagctttcacttattatatataattctataatttcacttattaattattaatataattaataaaagagagctcttagtacaagaagactttcttttttttaaatttattattattatactttaagttttagggtacatgtgcacattgtgcaggttagttacatatgtatacgtgtgccatgccggtgcgctgcaccaactaactcgtcatctagcattaggtat

SEQ ID NO: 686090 - DNA, 615 bp, Homo sapiens
catgctggcaccctgagctccaacctcaacctccacaaaataaatgtctgctgtcgacaagtcaccccgtgtgtaatactttgtcagagccgcctgaacagactaagaagaggctgatgaagagaggactctgcacaaaggctgagctctgctcagtagatttgcttctccgagaaggatacatcagcaattctgaacccgctttgtgtctatgccaggaatagaacaaataagtaaatatattgtggataatgagagtccagttctcactgtcagaaaaggaagttacaaataaggaagggggcttgctggaatgattcctctagtgtcggattaaaattggaagtgtcggtattgactcactctctgatacatggatatagatacagacatagatacacatagaaataaatacggaagtgtgtgtatgtgtacaggttaataatatacatgcctttatttccacaactgtccactgagcagcctagaaatgatgatacctcagtagcaaygagcacacctatgtaaaattcatgatttataaaagccattctcttataaaagggatcaggtctgcttggagaagtggctgactccacgacctgagtctggaaa

SEQ ID NO: 686091 - DNA, 1461 bp, Homo sapiens
ctcttccttccccacccatcttgtgcataaggccttgattttacttagatttcccctcatgagctccttgtttattggttggttggttcattggttttgttgagttggtttgttttgttctgttttcacagtcttattaagaaggaaatttacattccgtagaattcacccatgtaaggtgtacaattgaatggtttctagtatattcacagaattatgcatccatcaccactaccagttataaaacattttcactacctggaaaagaaacatggtactcagccatggccgctcaatctctggatcccccactctagtcctaggaaaccactaatctactttctgtccctatagatttgctgatactggacatttcatataaatggaatcacacaatacaaggccttttgtcactggctttttcactaacatgatcttttcagggttatccaacatagcacagatcagtattttattttcattgccaaatcatcttccatcctaaggttataccacatttcctttatctatccattcattatctgctgagaatttgggttatttccactatttggctattataaatattgctgcttatgaacatgtttgtacaagtttttgtatgaacctgtgtttcctgtctctggactacacacctaggagtaagtcatttatttaaccacatgggggctgcaaacacctgcatacatggcggggctctctgtccccggcatcagtcctcactgacttgactattttaacttcatgacgggtgttgcgactctctctgctttattctccttatcaatattatcttgattatttttaaccttttactccttgtaaatactaaaatctgtgcaacatctatatgaaaaacactgcttggattttggaattaaaattaatctatagattattgggggtacacttgaaagcactttaatattgagtactacccgtggatgtggaatatcttaagataatcgttaatgctttttaataaatgtttggcacatttgtgtacagttttgcacatatatcattagttttatgccaagatacttgataacattgttgctcatatgatttttaaattatatcttatgattgctgtttgtttgcagaaacacttgctaggccctccaataaaatgttacaggggtaccatgaaaggagacattcttgtttgtcttccttacttaartaaatgcatctatattttctattgagactctttttgttgtgggacttctgtagttatctcttatgaggttaagaaagtcttcttgtggggaggagccaagatggcggaataggaacagctccggtctacacctcccagtgtgagcgacgcagaagacgggtgatttctgcatttccatctgaggtaccgggatcatctcactagggagtgtcagagagtgggcgcaagtcagtgagtgcatgcaccgtgcgcga

SEQ ID NO: 686092 - DNA, 1461 bp, Homo sapiens
ctcttccttccccacccatcttgtgcataaggccttgattttacttagatttcccctcatgagctccttgtttattggttggttggttcattggttttgttgagttggtttgttttgttctgttttcacagtcttattaagaaggaaatttacattccgtagaattcacccatgtaaggtgtacaattgaatggtttctagtatattcacagaattatgcatccatcaccactaccagttataaaacattttcactacctggaaaagaaacatggtactcagccatggccgctcaatctctggatcccccactctagtcctaggaaaccactaatctactttctgtccctatagatttgctgatactggacatttcatataaatggaatcacacaatacaaggccttttgtcactggctttttcactaacatgatcttttcagggttatccaacatagcacagatcagtattttattttcattgccaaatcatcttccatcctaaggttataccacatttcctttatctatccattcattatctgctgagaatttgggttatttccactatttggctattataaatattgctgcttatgaacatgtttgtacaagtttttgtatgaacctgtgtttcctgtctctggactacacacctaggagtaagtcatttatttaaccacatgggggctgcaaacacctgcatacatggcggggctctctgtccccggcatcagtcctcactgacttgactattttaacttcatgacgggtgttgcgactctctctgctttattctccttatcaatattatcttgattatttttaaccttttactccttgtaaatactaaaatctgtgcaacatctatatgaaaaacactgcttggattttggaattaaaattaatctatagattattgggggtacacttgaaagcactttaatattgagtactacccgtggatgtggaatatcttaagataatcgttaatgctttttaataaatgtttggcacatttgtgtacagttttgcacatatatcattagttttatgccaagatacttgataacattgttgctcatatgatttttaaattatatcttatgattgctgtttgtttgcagaaacacttgctaggccctccaataaaatgttacaggggtaccatgaaaggagacattcttgtttgtcttccttacttaaataaatgcatctatattttctattgagackctttttgttgtgggacttctgtagttatctcttatgaggttaagaaagtcttcttgtggggaggagccaagatggcggaataggaacagctccggtctacacctcccagtgtgagcgacgcagaagacgggtgatttctgcatttccatctgaggtaccgggatcatctcactagggagtgtcagagagtgggcgcaagtcagtgagtgcatgcaccgtgcgcga

SEQ ID NO: 686093 - DNA, 1461 bp, Homo sapiens
ctcttccttccccacccatcttgtgcataaggccttgattttacttagatttcccctcatgagctccttgtttattggttggttggttcattggttttgttgagttggtttgttttgttctgttttcacagtcttattaagaaggaaatttacattccgtagaattcacccatgtaaggtgtacaattgaatggtttctagtatattcacagaattatgcatccatcaccactaccagttataaaacattttcactacctggaaaagaaacatggtactcagccatggccgctcaatctctggatcccccactctagtcctaggaaaccactaatctactttctgtccctatagatttgctgatactggacatttcatataaatggaatcacacaatacaaggccttttgtcactggctttttcactaacatgatcttttcagggttatccaacatagcacagatcagtattttattttcattgccaaatcatcttccatcctaaggttataccacatttcctttatctatccattcattatctgctgagaatttgggttatttccactatttggctattataaatattgctgcttatgaacatgtttgtacaagtttttgtatgaacctgtgtttcctgtctctggactacacacctaggagtaagtcatttatttaaccacatgggggctgcaaacacctgcatacatggcggggctctctgtccccggcatcagtcctcactgacttgactattttaacttcatgacgggtgttgcgactctctctgctttattctccttatcaatattatcttgattatttttaaccttttactccttgtaaatactaaaatctgtgcaacatctatatgaaaaacactgcttggattttggaattaaaattaatctatagattattgggggtacacttgaaagcactttaatattgagtactacccgtggatgtggaatatcttaagataatcgttaatgctttttaataaatgtttggcacatttgtgtacagttttgcacatatatcattagttttatgccaagatacttgataacattgttgctcatatgatttttaaattatatcttatgattgctgtttgtttgcagaaacacttgctaggccctccaataaaatgttacaggggtaccatgaaaggagacattcttgtttgtcttccttacttaaataaatgcatctatattttctattgagactctttttgttgtgggacttctgtagttatctcttatgaggttaagaaagtcttcttgtggggaggagccaagatggcggaataggaacagctccggtctacacctcccagtgtgagcgacgcagaagacgggtgatttctgcatttccatctgaggtaccgggatcatctcactagggagtgtcagagagtgggcgcaagtcagtgrgtgcatgcaccgtgcgcga

SEQ ID NO: 686094 - DNA, 1177 bp, Homo sapiens
caactgccagtttcttcgtattaaaggacatatcctaaattctagaaggggtgttgccaatttgcagagatacgccttcaattttctttctctattctaagctgcaaatgagcttgaacttttgtagggcacatggcttcacaatggcattctgaatcttgtgtgcctagttttgcttattaattgagcagacaacttcaaagggatccatcaagacctagattttgaggtgacacaaatacaaactttggtaaatttatcacccttgttaattaagtcatcattcttttgcagagaaagatctgtgtgtccaatgtaaagtgcaaatgctatgtagctgggacatttccagtggtaacaactctactatgtacaaagctacagtaaaatctaggaatatatatgttttgttgtaatttcttttcttcagcctttttcagtgtaagacagttcctcaatgcaaataaagcagatgcccattccagcaacgtacatgagtgtgtgtgartgtggcgtgtgttttcacatatctgtgtgtatgagtgtgcatatgagcatgtgtctgtgtgtgtccatggcaatctcagattcccagacatcacactgataattgcattaaaccaattttcttaaaaaccatgtttgggccgggcactgtggctcacgcctgtaatcccagcactttgggaggccgaggtgggcagatcacgaggtcaggagatcgagaccatcctggctaacactgtgaaaccccgtctctactaaaaatacaagaaattagctgggcgtgggggcgggcgcccgtagtcccagctacttgggaggctgaggcaggagaatggggtgaacctgggaggtggagcttgcagtgagctgagattgcatcactgcactccagcctgggcgacagagtgagacactgtctcaaaaaaaaacaaaaaaaacccaaaaaaaaccaaaagcaaacatatttgaagataaggaaatattttttggaaacctcagatgcttttctctccttggtacgaaccatttggagtcccatccatacacttctgcaagctgctgacacaagctgggcattgtattgggtctgggatgtgacagagctgccggctgtcatttgatgcgtgaggctcgtcttccaggcagctttcctaaacttggagatgtttta

SEQ ID NO: 686095 - DNA, 1177 bp, Homo sapiens
caactgccagtttcttcgtattaaaggacatatcctaaattctagaaggggtgttgccaatttgcagagatacgccttcaattttctttctctattctaagctgcaaatgagcttgaacttttgtagggcacatggcttcacaatggcattctgaatcttgtgtgcctagttttgcttattaattgagcagacaacttcaaagggatccatcaagacctagattttgaggtgacacaaatacaaactttggtaaatttatcacccttgttaattaagtcatcattcttttgcagagaaagatctgtgtgtccaatgtaaagtgcaaatgctatgtagctgggacatttccagtggtaacaactctactatgtacaaagctacagtaaaatctaggaatatatatgttttgttgtaatttcttttcttcagcctttttcagtgtaagacagttcctcaatgcaaataaagcagatgcccattccagcaacgtacatgagtgtgtgtgaatgtggcstgtgttttcacatatctgtgtgtatgagtgtgcatatgagcatgtgtctgtgtgtgtccatggcaatctcagattcccagacatcacactgataattgcattaaaccaattttcttaaaaaccatgtttgggccgggcactgtggctcacgcctgtaatcccagcactttgggaggccgaggtgggcagatcacgaggtcaggagatcgagaccatcctggctaacactgtgaaaccccgtctctactaaaaatacaagaaattagctgggcgtgggggcgggcgcccgtagtcccagctacttgggaggctgaggcaggagaatggggtgaacctgggaggtggagcttgcagtgagctgagattgcatcactgcactccagcctgggcgacagagtgagacactgtctcaaaaaaaaacaaaaaaaacccaaaaaaaaccaaaagcaaacatatttgaagataaggaaatattttttggaaacctcagatgcttttctctccttggtacgaaccatttggagtcccatccatacacttctgcaagctgctgacacaagctgggcattgtattgggtctgggatgtgacagagctgccggctgtcatttgatgcgtgaggctcgtcttccaggcagctttcctaaacttggagatgtttta

SEQ ID NO: 686096 - DNA, 579 bp, Homo sapiens
agccaaactagttgttaatattttttatatcacctttatttaactcaaaggatttatattttgatggtgtcatttaagacacagtgtgacaaacttaggggtaaagtgagctaaaatgataggataattgagcttccattcctatgcaagaattgatgactttagttycatagaaaagctggaaaatacttaaattttcctccagaaagccattttttttctgggaagaaacatatactcttataacgaacattaatgaacattatttaggaaattcacatcagagaaaaatttttattaaaaaaacagctgttccattaagagaatacttcagtaatactttttccaccattaccaccaccttaccccctcttaggatacttagaggatagaaggctcttaatacatactgacgggtaatttgatgttttggaagatcctatctcattgattctttggcagaagaaacagttgcaatgaaagagaaatgcaagtttggaatgacatccacaatccccagtgggcatgtctggagaaacacatggaatcctgtctcctgtagtttggctacagtcaaaa

SEQ ID NO: 686097 - DNA, 579 bp, Homo sapiens
agccaaactagttgttaatattttttatatcacctttatttaactcaaaggatttatattttgatggtgtcatttaagacacagtgtgacaaacttaggggtaaagtgagctaaaatgataggataattgagcttccattcctatgcaagaattgatgactttagtttcatagaaaagctggaaaatacttaaattttcctccagaaagccattttttttctgggaagaaacatatactcttataacgaacattaatgaacattatttaggaaattcacatcagagaaaaatttttattaaaaaaacagctgttccattaagagaatacttcagtaatactttttccaccattaccaccaccttaccccctcttaggatacttagaggatagarggctcttaatacatactgacgggtaatttgatgttttggaagatcctatctcattgattctttggcagaagaaacagttgcaatgaaagagaaatgcaagtttggaatgacatccacaatccccagtgggcatgtctggagaaacacatggaatcctgtctcctgtagtttggctacagtcaaaa

SEQ ID NO: 686098 - DNA, 1995 bp, Homo sapiens
attttcatatcacagtactgttaataaagaatcttgaaatatcactcataattattattgctttgaaattactgtaaatataagacctggctgctaaattttgttatttagcatgttaattaaaaaatgctatttgactatataacaaattagtttatttaaaatgttgataactatacctcagtataattggcttttgttataattctatacattttattttatgtatttggaaaagaggtcataggactgattatcaaagggcccatgtcacaaagaatgtttaagaaccccctgttctggaatattgtcatcacctctgtggtctaagctaggctgctgccccctctcrtttacacaagtaggaagaggaaagagaacctggaggaggtatggcacacatggcctctgcttacatatcagagaactcagtgtcctggccacagtcaaatacaatagaggccaggaaaggttgtgtatctcggctaacacatgtccagctacaagtttctattacagctgatgaaagagacaactagcgggctctgtacattgattcaatcctgtctgaggatgaccatatagaagcataaggagaggagacaagtgagtcagatagtggccaagtttctgatttgggataccattcacaaagatggggagaagaaaaagtagaagacatttggaagaagaaaaaacattgcaattggacaagttgactttgagattcctatgagcaggggtatactgacaaacctgctctcccagaaaacaaaaacaaaaatcctgtttatagcctttgatgacttccacgatctaaatgtacccatcatggcctatttcaagctaccaagatgatgtcactgaatgagcagttggaaagaaatgtgcatgaataggctttcataagccagcaaaggctgggttcagctcacctctaccagtgaggatttccaaatggaggcatcttaaagacactgggatatgcagagctcaagctaaggagtagaatctaggtgagacattgatttcggaataaatgagattatctggccataggattctaagaagtctgatttgcagttacttatggcttagacaaatgtgatcttgattaagggttccaagtagaaaatagatgcaaaaataagcatggtatagaggatggggttaataaatttccaaaactctgccatcagtaaaattccgtctgacaaagaagctctctggccactctcaaaggagccaactctaaccaaagttggtagtgcatcagtggaaatatcagaccagggatatgaaccacagaactgcttggttgtcaggactgggatcttgtgacatatcagcaatccaagataggtagattcagcctgaggtgattctcctctcgaatgagggactctccgagggaatctcctctagaatgtccatcagtctaatgaaggcacagacacataaggagatacaacagtatagcacatattattacaaagatatgcatacgagactataagagcacaaaggaataaattatcaatgaaaacgattgaggaaagaacagttggcattaaagctcaaacccaaacaatgaataggaattttctaagtttaccaggaagcatggtggagattgagcagtgttggtgcagtgagggaggaggtaataagaatttcaggaagcacagcttgggcaaagactcaggagcttagaagaacaaggtttcttcagagatcaacaagaatttggtatttctactactgtattctaatccaacataaatgtttatttcattaattttgctgcttctccttattttcagtgcattctgtgctacctgacacctattgggtaagtacccagtattttacagaataagtttaaagatctatgaaaaggagattgagaatctaagatttataaaagtgcaatagcaatcatacttttttttcaatgctgctgaaacatatccatacgcactactttctaggcaa

SEQ ID NO: 686099 - DNA, 751 bp, Homo sapiens
atatatatatatatttttgtatatatatatatatatataaaatccttgttcatttatatttgtacatttagttcccttctttttcattcttctttgccgttctctactgtcatttgggagaatttatcttctgcttcaagaactatctttaatattctgtaagacatcttctagtgacaaattctcaaggttacattttaaaaaatcttattttgctttcattttgagggtttcttttgcgggctatacaattctagattgacaagtgttatttatttatttttgtttttggtggttaaaagcatcagcactttgaatatgttacctcattttccttctatttccctaactgccctttgttcctctcttgctttctctctagaatctagatctctcaacccctcactgccccagttgctctctgacrcttaacagatcaaatataacatcctctagcttttctagttgctctcaaaaggagactataagcaagtctactattttgggaaacataaattttatttataattataaatataaactatacacacatctatgtatatgtgtttatgtgtgtgtgtatatatatatccatatatatgcacattctatatgtttttctttttatttcattttccaaacaaatatctgtggctgatgtgtagaaatgcaagtgctttattttaatagtgcttttatataggcacacatagagaacaaagatgattagaagtggccatattgggtacgt

SEQ ID NO: 686100 - DNA, 751 bp, Homo sapiens
atatatatatatatttttgtatatatatatatatatataaaatccttgttcatttatatttgtacatttagttcccttctttttcattcttctttgccgttctctactgtcatttgggagaatttatcttctgcttcaagaactatctttaatattctgtaagacatcttctagtgacaaattctcaaggttacattttaaaaaatcttattttgctttcattttgagggtttcttttgcgggctatacaattctagattgacaagtgttatttatttatttttgtttttggtggttaaaagcatcagcactttgaatatgttacctcattttccttctatttccctaactgccctttgttcctctcttgctttctctctagaatctagatctctcaacccctcactgccccagttgctctctgacgcttaacagatcaaatataacatcctctagcttttctagttgctctcaaaaggagactataagcaagtctactattttgggaarcataaattttatttataattataaatataaactatacacacatctatgtatatgtgtttatgtgtgtgtgtatatatatatccatatatatgcacattctatatgtttttctttttatttcattttccaaacaaatatctgtggctgatgtgtagaaatgcaagtgctttattttaatagtgcttttatataggcacacatagagaacaaagatgattagaagtggccatattgggtacgt

SEQ ID NO: 686101 - DNA, 1498 bp, Homo sapiens
gcctgggtgacagagcaagactctatctctaataataataacaataataaaaacaaagaaaagctaacattcataatacaactggcattgtaattaatgcagtattcctgaatatctatttagtaagaagaatcataaatcccattttgtctttttttgttgttgttgttaaagaaaataggctggagtatagtggcacaatcatagytcgctgcagtctcgaactcttgaactcaagcaattctcctgccttagccaccctggtagctgggattgtaggcatgggacaccacgcccagccaatttttttattttgtaaagacaggagtctgtattgcccaggctagtcttaaattcctgggctcaatcgatcctactgccatggcctcccaaagtgctgggatcacaggtgtgagccaccatgcctggccataaatcccattttattttttaatcccctccttaggaattgattttaagaaaataattgaaaaggggaagaaataatttttatacaaagatatttaaccaacagtgaataagggtccaaattctcaataactggaagactttgaaaaagacaatgatggattaatataatagaatattttataggcattaaacatgacaactatattgactgtcaagagagaaaagtctatacaatataacttaattgaaacttaaatgaaaagttaaatgttgtatatgtattgattaaaacaaaaaagttgtacattcataaatattctaaattgatgggattttatggtgaaaggtgtttcttttccactgcattgacatatttataaggttttactttttatttaaatacatacagctaaaatctaaagcatttcctttcaggtaagaaactgaaatgtgttcacttgtttctctagttgtttccaagcgttaaatactatgtatgtaagattatctgtggtttggggatagtcagttatagttgctaatgattatttcccatttaggcacaaagtcactattcaataagggtttttagtctttgagactaaattttataaacaaactacgcatattgtttattagcactattctgggaaattttttttctggtaataaatccactccagcaaatttcatttgaaaacaaaaatgtagctactaatttagtcttaatagattaccgtcagagcccttgttttgcatttgacttcctggacacagttaaagatctatttaaacaggaaagtactgttatttcagcaattagagcaacagggttatttcattaagagaaaagcttcaggaaacatagcacatgaaatatttgagcattgctccgggtatgaacaagagccatagatgaattgccaaatattatttttgagcggctgccttgtgtaaagagttggttgttgaacagctaacttttaagtcaagttctaacattataccagtgttcactctaattttaaaattcagtttgtaagtatttttctcagaattttaaact

SEQ ID NO: 686102 - DNA, 1498 bp, Homo sapiens
gcctgggtgacagagcaagactctatctctaataataataacaataataaaaacaaagaaaagctaacattcataatacaactggcattgtaattaatgcagtattcctgaatatctatttagtaagaagaatcataaatcccattttgtctttttttgttgttgttgttaaagaaaataggctggagtatagtggcacaatcatagctcgctgcagtctcgaactcttgaactcaagcaattctcctgccttagccaccctggtagctgggattgtaggcatgggacaccacgcccagccaatttttttattttgtaaagacaggagtctgtattgcccaggctagtcttaaattcctgggctcaatcgatcctactgccatggcctcccaaagtgctgggatcacaggtgtgagccaccatgcctggccataaatcccattttattttttaatcccctccttaggaattgattttaagaaaataattgaaaaggggaagaaataatttttatacaaagatatttaaccaacagtgaataagggtccaaattctcaataactggaagactttgaaaaagacaatgatggattaatataatagaatattttataggcattaaacatgacaactatattgactgtcaagagagaaaagtctatacaatataacttaattgaaacttaaatgaaaagttaaatgttgtatatgtattgattaaaacaaaaaagttgtacattcataaatattctaaattgatgggattttatggtgaaaggtgtttcttttccactgcattgacatatttataaggttttactttttatttaaatacatacagctaaaatctaaagcatttcctttcaggtaagaaactgaaatgtgttcacttgtttctctagttgtttccaagcgttaaatactatgtatgtaagattatctgtggtttggggatagtcagttatagttgctaatgattatttcccatttaggcacaaagtcactattcaataagggtttttagtctttgagactaaattttataaacaaactacgcatattgtttattagcactattctgggaaattttttttctggtaataaatccactccagcaaatttcatttgaaaacaaaaatgtagctactaatttagtcttaatagatyaccgtcagagcccttgttttgcatttgacttcctggacacagttaaagatctatttaaacaggaaagtactgttatttcagcaattagagcaacagggttatttcattaagagaaaagcttcaggaaacatagcacatgaaatatttgagcattgctccgggtatgaacaagagccatagatgaattgccaaatattatttttgagcggctgccttgtgtaaagagttggttgttgaacagctaacttttaagtcaagttctaacattataccagtgttcactctaattttaaaattcagtttgtaagtatttttctcagaattttaaact

SEQ ID NO: 686103 - DNA, 1498 bp, Homo sapiens
gcctgggtgacagagcaagactctatctctaataataataacaataataaaaacaaagaaaagctaacattcataatacaactggcattgtaattaatgcagtattcctgaatatctatttagtaagaagaatcataaatcccattttgtctttttttgttgttgttgttaaagaaaataggctggagtatagtggcacaatcatagctcgctgcagtctcgaactcttgaactcaagcaattctcctgccttagccaccctggtagctgggattgtaggcatgggacaccacgcccagccaatttttttattttgtaaagacaggagtctgtattgcccaggctagtcttaaattcctgggctcaatcgatcctactgccatggcctcccaaagtgctgggatcacaggtgtgagccaccatgcctggccataaatcccattttattttttaatcccctccttaggaattgattttaagaaaataattgaaaaggggaagaaataatttttatacaaagatatttaaccaacagtgaataagggtccaaattctcaataactggaagactttgaaaaagacaatgatggattaatataatagaatattttataggcattaaacatgacaactatattgactgtcaagagagaaaagtctatacaatataacttaattgaaacttaaatgaaaagttaaatgttgtatatgtattgattaaaacaaaaaagttgtacattcataaatattctaaattgatgggattttatggtgaaaggtgtttcttttccactgcattgacatatttataaggttttactttttatttaaatacatacagctaaaatctaaagcatttcctttcaggtaagaaactgaaatgtgttcacttgtttctctagttgtttccaagcgttaaatactatgtatgtaagattatctgtggtttggggatagtcagttatagttgctaatgattatttcccatttaggcacaaagtcactattcaataagggtttttagtctttgagactaaattttataaacaaactacgcatattgtttattagcactattctgggaaattttttttctggtaataaatccactccagcaaatttcatttgaaaacaaaaatgtagctactaatttagtcttaatagattaccgtcagagcccttgttttgcatttgacttcctggacacagttaaagatctatttaaacaggaaagtactgttatttcagcaattagagcaacagggttatttcattaagagaaaagcttcaggaaacatagcacatgaaatatttgagcattgctccgggtatgaacaagagccatagatgaattgccaaatattatttttgagcggctgccttgtgtaaaragttggttgttgaacagctaacttttaagtcaagttctaacattataccagtgttcactctaattttaaaattcagtttgtaagtatttttctcagaattttaaact

SEQ ID NO: 686104 - DNA, 1199 bp, Homo sapiens
gtcaggctggtctcaaactccctaccgcaggtgatctgcctgcctcggcctcccaaactgttgggattacaggcgtgagccactgcgcccagcctactgggttcttgggaaccactctgaacaatgcaaattcttcatggtgttctgccctaaccatgaatkatgtcaaaaaaataataataatgatttatctcttaaaatttatagcctgataatgaaaattaaaacagaaaattacattaaaattacttttgtcttttttatctttaagcttaaaagatcctttgaaaagtttgcaggcctttagaatttagagagctgtcaaccagggaaactttaatgtgacattgtgctacacaaaaaccgaaatgtttaagcagcacatgaccatgggaaaaatgtctcctatagcaaaataggagacaaaagaacttccataaaatcagtttgtgtaggccagctggttattgtcaactattcaagaaaaagtcagagaggccctcccttaaaacttccttcccagcaggaattcttttgacaatgacttctgtttagggtcttcctgtccctgtttttcttatttttttttttaacccatcattgaggtaaagaattgttctgtgtttaggtcttttgaagtaatcttacctagcattaattttaatattatgtctttaatttcaaatattaacagttttatgctgtttctcttaatggttataattaacatgcatacaacgtatagatccgaaaccaaattttgatttcaaaatgaagatcacatccagatgccttttagattgattttccactcgcttctcactgtgccacactattttaccttgtttttgctattgtagtttttatatgtatagttggattttaattcagtgaagtaaaaaaaaaaaaaaaagtgttgctctttggggagaaagaaaaactttccaagaggaggaggagattattgattcagccaaaacaaatgtttttttttaattttattttattttattattgttattattattttttttttttaattgatcattcttgggtgtttctcgcagagggggatttggcagggtcacaggacaatagtggagggaaggtcagcagataaacaagtgaacaaaggtctctggttttcctaggcagaggaccctgcggccttccgcagtgtttgtgtccctgggtacttg

SEQ ID NO: 686105 - DNA, 693 bp, Homo sapiens
tttcaagttatacacaactggtggctaactgcatgataagtagtaataagcaacatttatttttgtttctttttatttagatttttcttttttggaacagaagcacataatctgtgagtagctttgatggtgagaattgagagtaaatatcacacacagaaaaatacaaatgctttatttaaggcagattcaaatctattctaattcacctcctatrgcagacagcatcatgactctcacacagaattttaagaaaagtctaaccggttcagaagagtaatacttaagaggtcaattgagccatattgtgcttgactaggcacagtaaacaaataagcaaacaaacaacaacaacaaaaaagaacataatttacaagaaaaagtaatggctagtgctcttatttttttaaatactgactttttagataaaaattttgataaaattagagtcagagaagtgacatcttagcatatataatggatattataaaataagattttggcaatgattatagcatattgattcattgtgaaagagttataaaaaggactatgtttatggatatcttgccttattgcagtaaacacttggattgaaaaatgttaaatcacgtttttcatgtgcctgaattcaatcataacggatgcatagaatcacttttgctgaatgtcaccatcagtttaaataacaat

SEQ ID NO: 686106 - DNA, 672 bp, Homo sapiens
cgaatccccaaaaccatccttggaacgtgtaacagaaatactctttagggtggggtaaattgatagaaattagtggggaaggccaggcacagtggctcattcctgtaatcacagcactttgggaggccgaggctggtggatcacctgaggtcagaagttcgagacaccctggacaacatagtgaaaccctgtctctactaaaagtacaaaaattagccgggtgtggtggcgcacacctgtagtcccagcaacttgggagactgaggctggagaattgcttgagctgagattgggccactgcactccagcctgggcaacaaagtgagagtctgtctcaaaaaaaaaaaaaaaaaaaaattagtggggaatttggagaaataatactattgtggtgttatgtatataaaacatgttttgtacatgtgttttatatttttatattttacatgtgtatgttatatatgtttatatgtgtacatataagcttatatgtttatacatatatacatatatgtatatataacatatataatatatatggcattgttggaccctgacttacatatgtatatataagtttttatatgtatacatayacacacacacacacacacacacacacacacgttttggggcacagttcctaaatcgtaactcccatagccctggtta

SEQ ID NO: 686107 - DNA, 570 bp, Homo sapiens
gagagcacttgccaaggctactgaacaaagggtcaagcacccagccagtcactgagttccagactcttaataacaaggttatgaagctatgcgaagccttcatcccttctcataactacacaggcatgtcggggcttctgaagttgtgacagtgatttcctttaaagaaaacgattctaagtaaaccaaggacacttcacccttgactttgaaaatgtctacaaactttcccagagcaaatctctgccggcgtttctcacttcccgatctgatcggcctgaggagcccacgggctgggctggcacgttcttttgttcagcttctctaccggaaggagtttgtgtaaaaaggaatagaaatcagtgttcatgccacaataggggtaattgttctgagctgccacattccgttaaatgtttacctttttgtttcacaatctaacaggaaacgaggagcraaggatttttggttcccttatccccctttggtcaagactaaaaaagaccagttgttattctagttgctcaaaaatgaaatgctcaaggtaggaaatgagcacagttgctaaag

SEQ ID NO: 686108 - DNA, 371 bp, Homo sapiens
aaaataacccttatgatgactttactgttatgcataatgttggtggctgctttaagatattatattttctgttaatttaattttgttttttgttcactatgagattctattaagaagaaatgttgacttatttcaagtgccattttatatatcagtgtagtgtgggaaaayaaaaacaaatccatttcaggcagaatcaaatgaataatattttactcatttgctatttttgaatgtattcccttaatgaatcttgtcattggaaacaacgttttctcttaaagtcactttttggtggtatcttataatcttaaagtatcagtcttatttgctaaatttttttaatatttttgtctctatattagcaagtg

SEQ ID NO: 686109 - DNA, 610 bp, Homo sapiens
tgtaattcagagttacacagcactagatactgaccatctgtatccctgttgttcctatagataagactgctgaccttagaatcataaggttttaatttaagaattgcttaaggtgttttttagaccctgaattctggctgaatggctgacaccaaacagtttaaagatcctcacagagcaacctagtcatcacgagaatgcagtttcttcctttcctggtcccatgacttggccctgcactctgactaatcaatgatcctcataccccagctcatgctaaaccccttaatatctcttccccaaactcctttgggaggcagatttgagatttcctcctgtttcctcatttggctgccctactattattaagctctttttctgctgcaaccctcagtgttgttgtattgactttctgtgccttgggcaatagatctgctatggtcacaggttcctgaaagagatctgcacccctcacccccatctactttgccgagraactggatgagtcatgagcgaagagagccacttagggcatcatcatatcagaataggatacctggcactgctgtagtccccttacaagcaggtccagaggtctgtgaaatcacac

SEQ ID NO: 686110 - DNA, 658 bp, Homo sapiens
gtaccctagaacttaaagtataataataaaattaaattaaatttaaaaaaggatcttactgtttgcttgggtgattaatcttgacgatcaagaagaagttggattgctgcttcacagtggggacaagaattatggctggattctcggggattctgagggcgcctttttgtgcttccattcccagtagcaaaagttaatggaaaaatgatagcaaccaagagaaggcaggaccagtatagattgaaggtctgtgtcatcccagcaggtaaagagcaaaattagctgagatgctgaatgaaaagaaaacatgggacggagaatggagatagaaattataaacgcttacctactatgacatcctgaccacttacagaaacaaggactgtagcagacatgcatattttctgtcttgcgtattgtgttgtgtgttatctgtgctattttctccagtttcctttaccaatattttatgtaagcgttattgtacagttgaattattttaaagattagtgtttaggtcacagaatattcaggtgggactgtgactgkattataagactagttaaccccacacagagatggatactgtgcctgttgctcaggatggatatgttaactattgggacttggtatcttccctttgtgagaagaggatgac

SEQ ID NO: 686111 - DNA, 648 bp, Homo sapiens
taaataccaggctttcattcttcctggcacaataccgatgctgcatatttaacttgagttactaagaaaactgagggtcttttgcaagatgtggcaacattatgcaaatgactaattccagttaaattcttttaagtgaaatatgttactcagcggtcttttgattgcaagtgatagaaaactaatcaaattaacttagaggaaatttactcatagataatgaagcatctcacattatcaaatgaagggttaaataaccaattcaytggaaggacgagaatgctgctagccctcaaaaataaatgcaaccagagtttcaaacagtgaggattttctgtgtctcttatgttgcttttctctgtatgtcaacttctttctttaaatttcctccacaaggcaagaaacatgccttctggccagtcctaagcatcaaagcatcatagctaacagcttttaataacaaaaaagattttaccctattctttattcaaatacccaggcaaagggttctgatcggtttggctatatcgggtgctcatcctgtaagccgtaaagtgatccttgcatcagactatcagaatatgctctttcctcgtgttccgtatgcctccatcatatgattgtttggcaaagtaagagtgaatgctc

SEQ ID NO: 686112 - DNA, 623 bp, Homo sapiens
taaattaggatggactgtatgccagagttatccttcaatatatcttaaaagggtgaattcatttgctacatttaaaatacaacatttgaaaatacaacacataagacttttataatatatgatgaaagggggatttaaaaataaatgcttattataaggtgaccatttcatttcaaatatgtgttcatatttaatttaaccctctaataaagcagttgtaaaatgctaaatttaagtttaaaaaataaaaaaaatgtatcagatcagcttactgttctggatgtactcaaatattacttcctcttaaatgcctgctgctagagataagaactgtagaacacaaactactgtttagatttatcattaagacatgcgtaaaatactatttggtaaataacattaaaatccacttacggcatttattgttgtgwttcactgtgatagaaatttctttctgtaatttgggaagggaatcaggtttatggttccgttcagtttggcattccctcatcacttacagaggacttgttagacaagttatgccatttaacctttacaactcctaaatgcatgtatagtattgtatatgaagaaactaaaactgtgatttaagtaatttcttc

SEQ ID NO: 686113 - DNA, 1454 bp, Homo sapiens
gttgaactacacattatgaagtttattcccccaaatttgattatgtacctcagttcttctcaaatgtagagaaaaaaaattatttctctacttttcctcttggggacttcgaacaatctctgtctcttccatgaacaatggaggagtaagcaataatgtattttaaaaataataactttaggaatgcaattaaagtttaaaatgatactgattttacttaagccctagtatgacttaagacatacatgttatgcattctgaggtaacaaaatttttaattttaatacgacttttttacaaagatgtcttatccatagtktaaccagggtgctgtaggtacttcggtgtacttgcagcgcacaatggcatccagccaagacagtagtaaaatctagcttttttggcttggccaaccctttgctctgttttgaggctgagccagcctggatggagggttattttatataaatatgcttaaaactgctgcttgttttgcaatttgaatagactctaaatagcatagtggaggccctgcttgacaaagggggttaaataaagatggccatctaagaaactgttttaaatatatggctatcattttggagcagatgggacttttagaggcatgtaaatcatatctcacaggccactatgttactatggagtagtggccttgactgtaaagagtagttcagcattttaagatttagaatttttttttttcctgtttgaggccttgagttgtaaacagccctcaatgcagtggctatatgttttaatatggaaacagttcatgaatagaagtgttctgatagaaatgaaagagacagcttcctgctggagtaaaacacatgcttccttttgagacatatccaccctgctcgtgtagcgtaattatactgcttagaaagaaactcagaaacaaaataataagtatcagctatcacttttctgtaactatccaactaaccttatgtatgacattaaaaagtagctttcattatagtagagttctatttctttttaattgcttccatctttcttgaagtcattaatattcaaaaaattcaattattacacttatttcatttcctttttgagattcttacatgaaagacttcataagctataaaatataaagaattatttccatattggaatagcttttaaaggaggattctgcagtcttgcattacatggaatgagcctggattcttttgatatctaacagatgaaaaattacttttgagaaaatgttcttaggttcaaggccttttgtctcctctgataattgctcaaatgtccacattttacttcatgttttgttctctttagatttctttttcattttaatcacatgcaaaattctgaatatggagaatatgttttaaatttagaaattttatttcagaaacactggcctttctttagagggcagtgttgaaagtgttatt

SEQ ID NO: 686114 - DNA, 1454 bp, Homo sapiens
gttgaactacacattatgaagtttattcccccaaatttgattatgtacctcagttcttctcaaatgtagagaaaaaaaattatttctctacttttcctcttggggacttcgaacaatctctgtctcttccatgaacaatggaggagtaagcaataatgtattttaaaaataataactttaggaatgcaattaaagtttaaaatgatactgattttacttaagccctagtatgacttaagacatacatgttatgcattctgaggtaacaaaatttttaattttaatacgacttttttacaaagatgtcttatccatagtttaaccagggtgctgtaggtacttcggtgtacttgcagygcacaatggcatccagccaagacagtagtaaaatctagcttttttggcttggccaaccctttgctctgttttgaggctgagccagcctggatggagggttattttatataaatatgcttaaaactgctgcttgttttgcaatttgaatagactctaaatagcatagtggaggccctgcttgacaaagggggttaaataaagatggccatctaagaaactgttttaaatatatggctatcattttggagcagatgggacttttagaggcatgtaaatcatatctcacaggccactatgttactatggagtagtggccttgactgtaaagagtagttcagcattttaagatttagaatttttttttttcctgtttgaggccttgagttgtaaacagccctcaatgcagtggctatatgttttaatatggaaacagttcatgaatagaagtgttctgatagaaatgaaagagacagcttcctgctggagtaaaacacatgcttccttttgagacatatccaccctgctcgtgtagcgtaattatactgcttagaaagaaactcagaaacaaaataataagtatcagctatcacttttctgtaactatccaactaaccttatgtatgacattaaaaagtagctttcattatagtagagttctatttctttttaattgcttccatctttcttgaagtcattaatattcaaaaaattcaattattacacttatttcatttcctttttgagattcttacatgaaagacttcataagctataaaatataaagaattatttccatattggaatagcttttaaaggaggattctgcagtcttgcattacatggaatgagcctggattcttttgatatctaacagatgaaaaattacttttgagaaaatgttcttaggttcaaggccttttgtctcctctgataattgctcaaatgtccacattttacttcatgttttgttctctttagatttctttttcattttaatcacatgcaaaattctgaatatggagaatatgttttaaatttagaaattttatttcagaaacactggcctttctttagagggcagtgttgaaagtgttatt

SEQ ID NO: 686115 - DNA, 907 bp, Homo sapiens
tacaggctcatagatgaaagggacttgccttgtcttggatgagactttggacttcgatttttgagttaatgctggaatgagttaagactttgggagactgttgaaaaggcaatattttgtttttaaatgtgaggacatgagatttgggaggtgccagggttggaatgatatggtttggttaagtgtccccacccaaatattaccttgaattgtaataatccccatgtgtcaaggacgggaccaggtggagataattgaatcagaaggacagttcccccatgatattctcatgatagtgagtaagttctcataagatctgatgattttaggaagggcattgctcccaatgctttgcaattctctctcttgttgccatgtgaagatggacatttttgcttccctttccaccatgaatrtaagtttccagagtccttctccagtcatgtggaagtgtgaatcaattacacctcttttttttaataaattacctaatcttgggtattttcttcgtagcagcatgagaaaggactaatacaatattgtactcttatgtggagactatgttcccaacattaccatatttcattttaattacatagtctcttttcttaacatgcaaatggatttttacatctaaattacgcttctatcacctgacctgatagaggtggcagaacgatgttcccaggtctatcaatttccaagaaaatgtaaatcttcaggactcactgtctttctgtatttcagggcttttaataaaatgatttcttaccttgtatagatcaaaactagatttcttctagaggcattattcttcatgggaactttcaattaggtctccatatttttatatacacaagagtctcagagcttgaagatgatgtcaactagcttctcaccctccaaa

SEQ ID NO: 686116 - DNA, 907 bp, Homo sapiens
tacaggctcatagatgaaagggacttgccttgtcttggatgagactttggacttcgatttttgagttaatgctggaatgagttaagactttgggagactgttgaaaaggcaatattttgtttttaaatgtgaggacatgagatttgggaggtgccagggttggaatgatatggtttggttaagtgtccccacccaaatattaccttgaattgtaataatccccatgtgtcaaggacgggaccaggtggagataattgaatcagaaggacagttcccccatgatattctcatgatagtgagtaagttctcataagatctgatgattttaggaagggcattgctcccaatgctttgcaattctctctcttgttgccatgtgaagatggacatttttgcttccctttccaccatgaatataagtttccagagtccttctccagtcatgtggaagtgtgaatcaattacacctctttttttwaataaattacctaatcttgggtattttcttcgtagcagcatgagaaaggactaatacaatattgtactcttatgtggagactatgttcccaacattaccatatttcattttaattacatagtctcttttcttaacatgcaaatggatttttacatctaaattacgcttctatcacctgacctgatagaggtggcagaacgatgttcccaggtctatcaatttccaagaaaatgtaaatcttcaggactcactgtctttctgtatttcagggcttttaataaaatgatttcttaccttgtatagatcaaaactagatttcttctagaggcattattcttcatgggaactttcaattaggtctccatatttttatatacacaagagtctcagagcttgaagatgatgtcaactagcttctcaccctccaaa

SEQ ID NO: 686117 - DNA, 1061 bp, Homo sapiens
tatattgtctgcatacatcttggaggtaaagtactctctttgcattcctcctgcttctttggaagacagcaagaatagttcatttttaaaagcgcattaaatgtttatgtcaactgacctatcatttagtgtaataaagaaagaaatttatcaggcttaactctgaaatatttgtrtgtaaattttccacagcaaatatgcagagccaggctgatttcgggccctcaacatacctttgtgctactttccctagttgtgtatgcttagataattcaatttaatgttattaataaattgaattaaaagagaatcagaaggatacatatttgtgcatatacactcacatggaaacaaaaacatgcacatgtactcaggtgcgtgcatgcacacccacatggtgaagaagtaaaataacatccactttgttctgtgaattcataggtacttctattcaattctttaactcaagccttgccaatatatggcagggtatagaaatatgtgaggaatttgaagcaggatctacaatgatgggacaataaattattttttaaaaaattactaatatggaggaatcaagtgagagttcgatttctaaaaaaaagacaagtgctgttctctttaaggcttggaaacatctgaaataataggaaaagatgaatgctccttacaattgtctggagaagtaatcaatttgtagaagaatgatagcatgaaaaaaatctgtgaatagaacctggatgagttggaggaaaatttgataaaattcttgcattcattctgtagcaaaatatagcaagtgaaatagaaaggtgaaattatcgtaaaacagtatgggaatatttagtgtaacccaaattttgttttgttttttgtaaaaattttgtcatgctactataaaaaaatacccaaaactgagaggcttaatataacataaatttattgtctctcagttctacgaagctaaagtctgaaatctaggtgttggcagggccatgctccttctgaagcctgtagagaagatcctcctttgcctcttctgagcttctggtggtggccat

SEQ ID NO: 686118 - DNA, 1061 bp, Homo sapiens
tatattgtctgcatacatcttggaggtaaagtactctctttgcattcctcctgcttctttggaagacagcaagaatagttcatttttaaaagcgcattaaatgtttatgtcaactgacctatcatttagtgtaataaagaaagaaatttatcaggcttaactctgaaatatttgtatgtaaattttccacagcaaatatgcagagccaggctgatttcgggccctcaacatacctttgtgctactttccctagttgtgtatgcttagataattcaatttaatgttattaataaattgaattaaaagagaatcagaaggatacatatttgtgcatatacactcacatggaaacaaaaacatgcacatgtactcaggtgcgtgcaygcacacccacatggtgaagaagtaaaataacatccactttgttctgtgaattcataggtacttctattcaattctttaactcaagccttgccaatatatggcagggtatagaaatatgtgaggaatttgaagcaggatctacaatgatgggacaataaattattttttaaaaaattactaatatggaggaatcaagtgagagttcgatttctaaaaaaaagacaagtgctgttctctttaaggcttggaaacatctgaaataataggaaaagatgaatgctccttacaattgtctggagaagtaatcaatttgtagaagaatgatagcatgaaaaaaatctgtgaatagaacctggatgagttggaggaaaatttgataaaattcttgcattcattctgtagcaaaatatagcaagtgaaatagaaaggtgaaattatcgtaaaacagtatgggaatatttagtgtaacccaaattttgttttgttttttgtaaaaattttgtcatgctactataaaaaaatacccaaaactgagaggcttaatataacataaatttattgtctctcagttctacgaagctaaagtctgaaatctaggtgttggcagggccatgctccttctgaagcctgtagagaagatcctcctttgcctcttctgagcttctggtggtggccat

SEQ ID NO: 686119 - DNA, 647 bp, Homo sapiens
ttttgtctattataaccagtgacccttctaagcattcagtcatcacaatttatagttatacagtgattacagtcacacagtttcttgctgagaggtcrtccttgtttctggcacccaaagttgcatccctagttctatgacctctgcataacattaaaaaaaaatgaaagttgaagtgatctgaggaagattcacagtcataccaatattctcacccatctttacttcctaacattctctagaaaagccaagtaatctatcaagggggaggaatctacacttcctggcccctgtagtttgactgctgattgtaagaacaatcaaaaatgagatcttgatgcccttcccaaggtaatgagtgagttctcactatattagttcacatgagagttggtcatttataagaagcctggcacctttctctttccttctcttttttcatctcttgccatgtcatacgctcactccctttccccattgcaccacgattggaagcttcttgaagtcctcaccagaagcacgtgctggtaccatgattcttgtatgacctgaagaaccatgagccaaataaacctcaattatttacaaattacccagtctcagctgttcatagggcaacaggattccagcagttccttaagtagatc

SEQ ID NO: 686120 - DNA, 647 bp, Homo sapiens
ttttgtctattataaccagtgacccttctaagcattcagtcatcacaatttatagttatacagtgattacagtcacacagtttcttgctgagaggtcatccttgtttctggcacccaaagttgcatccctagttctatgacctctgcataacattaaaaaaaaatgaaagttgaagtgatctgaggaagattcacagtcataccaatattctcacccatctttacttcctaacattctctagaaaagccaagtaatctatcaagggggaggaatctacacttcctggcccctgtagtttgactgctgattgtaagaacaatmaaaaatgagatcttgatgcccttcccaaggtaatgagtgagttctcactatattagttcacatgagagttggtcatttataagaagcctggcacctttctctttccttctcttttttcatctcttgccatgtcatacgctcactccctttccccattgcaccacgattggaagcttcttgaagtcctcaccagaagcacgtgctggtaccatgattcttgtatgacctgaagaaccatgagccaaataaacctcaattatttacaaattacccagtctcagctgttcatagggcaacaggattccagcagttccttaagtagatc

SEQ ID NO: 686121 - DNA, 638 bp, Homo sapiens
aagagagttcttcgggttgttaaaaaaaaaaaaagatcccatagggaaatayaaaattgttaaagaaatgatcagcaaagaaaacggtaaatgtgataatataaatattcacttagtagtgacagtaccaagtcatactagtaatacatttgtgtctatatggttggtttaacaaatgtaaaattaaaataatcaaaaggcagcaagtaaatggcattaaagccttctaaggttctagaaatagtcaacagtgcagattataatctttagtaaaagtttatataaatagcagattgatagaggatataacaagtcaatgatgcatgttataattcctagtataagaatgtataactagagtaataaagaataaaatgaatcataaaagttaattcaaaagaaaataaaagcagaaagaaaaaggtgctgggtcacatacaccagcaaattgtaaaatgtataatagaaaccaaatgtagcagtaattacattaaatgtaaatggactgcaaattccaattactaagactaccagataagatgaaaacacaaaacccaaatatacactgattatgagacacactttaaaggatgcaggatgtttgtaagcatcatgatggaagatatatatcatacaaa

SEQ ID NO: 686122 - DNA, 675 bp, Homo sapiens
ccaatttacaccttcccgtgatttctaaaatcagcacttccttaaggaagcccttattagcctctgcatcttggtcaattacctcatgtttttgttgcattatctatcccttagggattccagtttgcagagttgcagttttctgtgtaatcatttgactaacaactgcctctctcactatatggtcaacaccctgtgaacaagtactttttgtttttactcacactatattccttccaccaagtatttgctaaataatgaatgaagcatttataatgttctacgtattcttctaagtgatttataaacattaacttgatttttctttacataaatactatgagggaggtagaattattttattctgtaagtcaagataatctaagttaccttgtggtaacagccccccaaatccagtgatttaagatgacctcagccaaagtttttttctggcttattctttgtgtaacatacaggttagcaggtggaaggcattgttgtagttattcagagactcaggttagatgtttcatcttgacacatgcttctgaattgttgcagaagggaagacggatgatggagaatcatgtcccagatcytaaatgcttctacctagaagtgacacacttgggaaaagcaagttgcctagccatgtctaactacaagggggtagag

SEQ ID NO: 686123 - DNA, 698 bp, Homo sapiens
ttcccggctgcatctagtccaccatcttggctcttctctgtagtcaaatgttatcctcaaacataaactttgaacaaaactgatcttattaaaggtttttctgctagtttttgccagagatttgatgagtcaattatgtttactatttttttttttttttttwtttttttgagatggagtcttggtctgtcccaggccgaagtgcaatggcgcgatctcggctcattgcaccctctacctcctggttgaagcgattttcccacctcagcctcctgagtagctgggactacaggcatgcaccatcacccccagctaatttttgtatttttagtacagatggggtttcaccacgttagccagagtactcacgaactactgacctcaagtgatccatctgcccgtctgtctcccaaagtgctgggattacaggcgtgagtaccgcgcctggcctatgtttactaagttttaatcagaaatacatttccctgtgtagtgtcactctggaccattaaatgaatttgagaacataatgagtagttaaccttgaagctctaaatttacttgggcttttatgaaaataaaacccaaaactagcatttatgttagagagtaagcaataagctatttacttatttgcttttaaccataggacaagaggaaaaagaatggaaaatttgaatgtgtttttattaatcatg

SEQ ID NO: 686124 - DNA, 922 bp, Homo sapiens
gttttaataaaggtaagcaatatgaaaaatataaatgtattgtgatgtcagtaagattttaccatcccacttaatcttttgctttgaatttttaaaaagtagtgtattcattttggggagtatattgagactgagaaattttgaaacatgttttaagctcattttcaaaatctttgcattgttttaccagaactaaatttrtgttagaagatcttgtgttagaagataccagtactaaatctgtgttagaagatagtaaattgctgttagaaggttgttttaccagtgctaaatttgtgttagggcacgaagattgtgttagatttgtgttcgtaaaatttgccaactataaccactaaggaaaatacatcagaatgattattggttatattgccatttaagtgttctcgataattgttttcactgaatttaaataaatataaaactcttaagttttaaaggaggataaattgctatgtgacttttcttagtaatgtcacaattagtaatcttgacaaggcatgttttaaaatagtaactattcattagcacaattacataaagaactaatataataatgtttaaagaacttttatattttttcaaaattttttccaagttgaaattcttaattctacatttctattcccgcagttgtttttcataataattaatatctttaagtaatatataatttttaaaatcaatgttatttactgaccataaagttcctttctatgtaatatctactgaaagattttccctgttagttgcccactaattttatatgaagtaactgtcatcagctatctaaaccagtaaatatttccaaatatattgtaaattttgaaacattatttattataaaaataacttcatatattatatttagatttcagaggtttaaaagctgaaaactaca

SEQ ID NO: 686125 - DNA, 922 bp, Homo sapiens
gttttaataaaggtaagcaatatgaaaaatataaatgtattgtgatgtcagtaagattttaccatcccacttaatcttttgctttgaatttttaaaaagtagtgtattcattttggggagtatattgagactgagaaattttgaaacatgttttaagctcattttcaaaatctttgcattgttttaccagaactaaatttatgttagaagatcttgtgttagaagataccagtactaaatctgtgttagaagatagtaaattgctgttagaaggttgttttaccagtgctaaatttgtgttagggcacgaagattgtgttagatttgtgttcgtaaaatttgccaactataaccactaaggaaaatacatcagaatgattattggttatattgccatttaagtgttctcgataaytgttttcactgaatttaaataaatataaaactcttaagttttaaaggaggataaattgctatgtgacttttcttagtaatgtcacaattagtaatcttgacaaggcatgttttaaaatagtaactattcattagcacaattacataaagaactaatataataatgtttaaagaacttttatattttttcaaaattttttccaagttgaaattcttaattctacatttctattcccgcagttgtttttcataataattaatatctttaagtaatatataatttttaaaatcaatgttatttactgaccataaagttcctttctatgtaatatctactgaaagattttccctgttagttgcccactaattttatatgaagtaactgtcatcagctatctaaaccagtaaatatttccaaatatattgtaaattttgaaacattatttattataaaaataacttcatatattatatttagatttcagaggtttaaaagctgaaaactaca

SEQ ID NO: 686126 - DNA, 922 bp, Homo sapiens
gttttaataaaggtaagcaatatgaaaaatataaatgtattgtgatgtcagtaagattttaccatcccacttaatcttttgctttgaatttttaaaaagtagtgtattcattttggggagtatattgagactgagaaattttgaaacatgttttaagctcattttcaaaatctttgcattgttttaccagaactaaatttatgttagaagatcttgtgttagaagataccagtactaaatctgtgttagaagatagtaaattgctgttagaaggttgttttaccagtgctaaatttgtgttagggcacgaagattgtgttagatttgtgttcgtaaaatttgccaactataaccactaaggaaaatacatcagaatgattattggttatattgccatttaagtgttctcgataattgttttcactgaatttaaataaatataaaactcttaagttttaaaggaggataaattgctatgtgacttttcttagtaatgtcacaattagtaatcttgacaaggcatgttttaaaatagtaactattcattagcacaattacataaagaactaatataataatgtttaaagaacttttatattttttcaaaattttttccaagttgaaattcttaattctacatttctattcccgcagttgtttttcataataattaatatctttaagtaatatataatttttaaaatcaatgttatttactgaccataaagttcctttctatgtaatatctactgaaagattttccctgttagttgcccactaattttatatgaagtaactgtcatcagctatctaaaccagtaaatatttccaaatatattgtaaattttgaaacattatttattataaaaataacttcatatattatatttagatttcagaggtttaaaagmtgaaaactaca

SEQ ID NO: 686127 - DNA, 602 bp, Homo sapiens
cgccgtggctgccaggttcctcaggcagccccggtgggaggctgcggaccatggggactcagctctgcatggcaggcaraggcccagggacactgacgtgcatgagcttgctgctttccagggtgtgttgagggtggccatgggtgacacgtcccactctttctgatggaggggcatccgtggtgccttctagcttagaaccattttccaggtctcttctgggttgggcaggactgatattcccaagctggtggaagatggttcatcttcctcgcacagtgtgggttcttggagttcatccagggaaggcggcgcctctttctcaggtcctgcaggctggtctctgagcctgcccccacgaactttctggattccaaggtgggatggtgatccctttgacccctgcagaccctctacttgcgaaaagcagcattgaagcagccttttcccattgtagaagggacagggagtcagatcccctcaaccccccggcttcagggaccccagaagtgccttccaagcttcccccaagatccacatcacccacgaccctgccactgtttttgctgtgttcaccacatctctgatcctgaagtgaattc

SEQ ID NO: 686128 - DNA, 1392 bp, Homo sapiens
ttttaggatgattaagaaaacataaaaatgacaaaatttattaattttaagccaagttggaatgaatgtacaggtctagaaactgacacattttaaggagatgaattcggtaaagtaaaaagatatatttatttgtcagggtcaaaatcccaggtgaccatgggtcctgtcctcactgtggctacggcagctctgcaggaatgcagcctgactcgcctcacactcagatctttcaagagatgctctcagcccaaatgtttatgtgaaattactacattttatacactgccaatcaaacagaagtcatgaagtcaaccaagggccactcttatctaatcatcttccatagtcatgctacttatgtcagtatagatatcaatgtattgcttctcatttagataagacattttcttaaacttgactatgaggacattttctgctgcctctcactctataaatacccaacaccaattcacatttcataacacaatgaagacagctttttcccagagcagataaattctgtactaaaattgttgggctctgctgtcaattttcctagctccatcacactgaactctataagtagcataaaaatcaaaatgtattctttcaggccacatttctcttaatgttatgattgttctctgagtgacttcaccttgcacagctcatgtcatttcatataacagagataaagactgctgttcagctaatagaaaaaaatagataactctcagtccctgtagtaaggtataaattcatttggctaaattttgttttctaggtaatttcatggtgttagctctttgaggagccaggtgctttgccttaatgtgtttttagatttagagtatattagagaaaatccatacaaaaatccagtgttcataggcttctatagtaatcctcaatacgtgctcacgacatgmaattttaaattactccatcagcacaagtgaaggatagaatctcttgcacagtttgcacaaggtgacaactgagttactacaaactataaatgttctacaagcctaggaaatgtagcacagaatgcatattaagtgatatatttttagatacacacatacaccaggaacagaaatacgagccactcattttcactaatgcagccattaaaaacgaattctccaatgctatgtagtcacctggaaaataatttatggtataattttaagtgaaaaacacaaactacaaaattctaccaaaactatgtttatggctctgtgaagtgatgtacaagtatggcttaagttggggaaaaaaaaaatgaaaaaatcactgatggctgattttttccaaaggcagataatatgtgctttttttttcttttactattgacataatgttttgtaataagcgaatgtaaaa

SEQ ID NO: 686129 - DNA, 1392 bp, Homo sapiens
ttttaggatgattaagaaaacataaaaatgacaaaatttattaattttaagccaagttggaatgaatgtacaggtctagaaactgacacattttaaggagatgaattcggtaaagtaaaaagatatatttatttgtcagggtcaaaatcccaggtgaccatgggtcctgtcctcactgtggctacggcagctctgcaggaatgcagcctgactcgcctcacactcagatctttcaagagatgctctcagcccaaatgtttatgtgaaattactacattttatacactgccaatcaaacagaagtcatgaagtcaaccaagggccactcttatctaatcatcttccatagtcatgctacttatgtcagtatagatatcaatgtattgcttctcatttagataagacattttcttaaacttgactatgaggacattttctgctgcctctcactctataaatacccaacaccaattcacatttcataacacaatgaagacagctttttcccagagcagataaattctgtactaaaattgttgggctctgctgtcaattttcctagctccatcacactgaactctataagtagcataaaaatcaaaatgtattctttcaggccacatttctcttaatgttatgattgttctctgagtgacttcaccttgcacagctcatgtcatttcatataacagagataaagactgctgttcagctaatagaaaaaaatagataactctcagtccctgtagtaaggtataaattcatttggctaaattttgttttctaggtaatttcatggtgttagctctttgaggagccaggtgctttgccttaatgtgtttttagatttagagtatattagagaaaatccatacaaaaatccagtgttcataggcttctatagtaatcctcaatacgtgctcacgacatgaaattttaaattactycatcagcacaagtgaaggatagaatctcttgcacagtttgcacaaggtgacaactgagttactacaaactataaatgttctacaagcctaggaaatgtagcacagaatgcatattaagtgatatatttttagatacacacatacaccaggaacagaaatacgagccactcattttcactaatgcagccattaaaaacgaattctccaatgctatgtagtcacctggaaaataatttatggtataattttaagtgaaaaacacaaactacaaaattctaccaaaactatgtttatggctctgtgaagtgatgtacaagtatggcttaagttggggaaaaaaaaaatgaaaaaatcactgatggctgattttttccaaaggcagataatatgtgctttttttttcttttactattgacataatgttttgtaataagcgaatgtaaaa

SEQ ID NO: 686130 - DNA, 1392 bp, Homo sapiens
ttttaggatgattaagaaaacataaaaatgacaaaatttattaattttaagccaagttggaatgaatgtacaggtctagaaactgacacattttaaggagatgaattcggtaaagtaaaaagatatatttatttgtcagggtcaaaatcccaggtgaccatgggtcctgtcctcactgtggctacggcagctctgcaggaatgcagcctgactcgcctcacactcagatctttcaagagatgctctcagcccaaatgtttatgtgaaattactacattttatacactgccaatcaaacagaagtcatgaagtcaaccaagggccactcttatctaatcatcttccatagtcatgctacttatgtcagtatagatatcaatgtattgcttctcatttagataagacattttcttaaacttgactatgaggacattttctgctgcctctcactctataaatacccaacaccaattcacatttcataacacaatgaagacagctttttcccagagcagataaattctgtactaaaattgttgggctctgctgtcaattttcctagctccatcacactgaactctataagtagcataaaaatcaaaatgtattctttcaggccacatttctcttaatgttatgattgttctctgagtgacttcaccttgcacagctcatgtcatttcatataacagagataaagactgctgttcagctaatagaaaaaaatagataactctcagtccctgtagtaaggtataaattcatttggctaaattttgttttctaggtaatttcatggtgttagctctttgaggagccaggtgctttgccttaatgtgtttttagatttagagtatattagagaaaatccatacaaaaatccagtgttcataggcttctatagtaatcctcaatacgtgctcacgacatgaaattttaaattactccatcagcacaagtgaaggatagaatctcttgcacagtttgcacaaggtgacaactgagttactacaaactataaatgttctacaagcctaggaaatgtagcacagaatgcatattaagtgatatatttttagatacacacatacaccaggaacagaaatacgagccactcattttcactaatgcagccattaaaaaygaattctccaatgctatgtagtcacctggaaaataatttatggtataattttaagtgaaaaacacaaactacaaaattctaccaaaactatgtttatggctctgtgaagtgatgtacaagtatggcttaagttggggaaaaaaaaaatgaaaaaatcactgatggctgattttttccaaaggcagataatatgtgctttttttttcttttactattgacataatgttttgtaataagcgaatgtaaaa

SEQ ID NO: 686131 - DNA, 1368 bp, Homo sapiens
ttgcccagatcatgggagtttgtcttaaaatactcaaaggagttactatcaaagatggcagtcagcactcattagtatttataaggcattccattacagtagcatctctcaaatgaaaaggtaaagaacacttatcaatattaaaaccatcatcttttaaaaaggttaaatcgatttttctccaccacttggattccatcaatgccagtgtcagcgcaatgaagtggacattatcatgtgacagcttaaattgataattcccaaatgaactttccctagttttctatcatttctcagtctgtggattttgcaacccatttcatagagcctcggctagaacaaaggcttagaatgattaaaaacatccaaatcaatcttcccactgagctaaaatactgcaaatgagtttttaaatatgaagcaattattaggttctattaagggaggtaaacatgacacattatatggcattaaagttaaatgagtctctccaccatcaatatttccaaacaacaagagcatcagccactgcagctactccttaaggggaggctatggtgcttcaggtatcaggtactaagcactttagaaatactatcctataatcctcataactctataaggtaggtactattagacgactcattcactgacgaataaactgaggcacagaaagcttaagtaactttcccagtgacacacaattactacatagtagagctgagattcaggaccattggctcagctccaaatacttgacctttaagccacctgtccttcagtctctgacacctcatttcctgtaggtgacggtttcagtgtccattcctaatatgtgtagcattgcaaagggtccttcagcaaagttccaagaggctacacaatgtgagaggaacagagataaaagtgacgacctctccccaagcctttgccagtccctcccattcttccagactcaagtcacatttttcctccccactctcagcctacacagacctcatctgcctttaaaatcctctctgctccgaagaggttaccactaataatcttttcatgaagatgaagcttgacactccagggagacaagttttttgaaactagaaaacatttccattttctctattgccctgtttaaacgtgaaatcatagckgatcaatatttttggctggggggggagcaatcagaaatgtaggtatgtgctccaatgaagccattgactaggtttcaccttccaaagccttcaaaggtactcttttgtctatatagatatatatatatatatatacacacacacacacatatatttatatatgtatacacatacatatgtatatacacatttacatatacatatgtatatgtataag

SEQ ID NO: 686132 - DNA, 1406 bp, Homo sapiens
tggaatggaaaaccaagtctcctggagattgtaagaactttggtgggattctggctgaagacatcatgaggtgcttagactctgctcttcgtgtcaaagaaaagtccttctctttccaggccagartaaaaaaatactgggtcatgtttacctggcttggttatctatgaagctactactgcttttcttctcagcctctcttctctgtctagttttactccatgagacaatggcgagagacttctattgtccccgagaaagacaaggagaaagctgatctgcacctcagtggcctgtgcagttgatcataatcctgggaaaccccatagtatttcctgaaagactggactggcgactagccgactttcaaaggccatctgcagaacttctgaagaggcacctgggaagttagagcagaggcttgccaggactcctcctctgtgctctagcttgaagattaacaatgtcaagttgagagtaggcaaaaaatgtcatgctcacagacagcaccagacaactagggctcagttgaagttggtgggggagacatgcagtgccagcatcaggaccatctgggaaagaacatctagagagtgggagacatagctgcatggaaatgctgagaaataaggacacctaaactgaggcccctggattgggagaaacttgtccttggcagtgcactgcagatgcactgcaggaaggacatgataggttgtagaaatttcctagattattgtatgaagcagggcagtgttgtggaaagagcatgggctcagaaatctgactcgtgatccctggttggttgtgtgtccctggacaaaattacctaagaagtctgagctctattgcctcatgtgaaaaatgtgggtgatatatataaagctgctcactgttcacaataggaaagccttggagccaacccaaacgcccatcaatgatagactggataaagaaaatgtggcacatatacaccatggaatactatgcagccataaaaaaggatgagtctacgtccttttcagggacatggatgaagctggaaaccaacattctcagcaaactaacacatgaacagaaaaccaagcacacatgttctcactcataagtgggagttgaacaatgagaacacatggacacagagaggggaacatcacacaccagggcctgtaagggggtggggggctaggggagagatagcattaggagaaatacctaatgtagatgatgggttgatgcgtgcagcaaaccaccatggcacgtgtctacctatgcaacaaacctgcacgttctgtacatgtatcccagaacttaaagtataatttttttaaaaaagcaaattatatatatatatggctgttaacatagttcttagagaattgtggacctccgatgtactggattta

SEQ ID NO: 686133 - DNA, 1406 bp, Homo sapiens
tggaatggaaaaccaagtctcctggagattgtaagaactttggtgggattctggctgaagacatcatgaggtgcttagactctgctcttcgtgtcaaagaaaagtccttctctttccaggccagagtaaaaaaatactgggtcatgtttacctggcttggttatctatgaagctactactgcttttcttctcagcctctcttctctgtctagttttactccatgagacaatggcgagagacttctattgtycccgagaaagacaaggagaaagctgatctgcacctcagtggcctgtgcagttgatcataatcctgggaaaccccatagtatttcctgaaagactggactggcgactagccgactttcaaaggccatctgcagaacttctgaagaggcacctgggaagttagagcagaggcttgccaggactcctcctctgtgctctagcttgaagattaacaatgtcaagttgagagtaggcaaaaaatgtcatgctcacagacagcaccagacaactagggctcagttgaagttggtgggggagacatgcagtgccagcatcaggaccatctgggaaagaacatctagagagtgggagacatagctgcatggaaatgctgagaaataaggacacctaaactgaggcccctggattgggagaaacttgtccttggcagtgcactgcagatgcactgcaggaaggacatgataggttgtagaaatttcctagattattgtatgaagcagggcagtgttgtggaaagagcatgggctcagaaatctgactcgtgatccctggttggttgtgtgtccctggacaaaattacctaagaagtctgagctctattgcctcatgtgaaaaatgtgggtgatatatataaagctgctcactgttcacaataggaaagccttggagccaacccaaacgcccatcaatgatagactggataaagaaaatgtggcacatatacaccatggaatactatgcagccataaaaaaggatgagtctacgtccttttcagggacatggatgaagctggaaaccaacattctcagcaaactaacacatgaacagaaaaccaagcacacatgttctcactcataagtgggagttgaacaatgagaacacatggacacagagaggggaacatcacacaccagggcctgtaagggggtggggggctaggggagagatagcattaggagaaatacctaatgtagatgatgggttgatgcgtgcagcaaaccaccatggcacgtgtctacctatgcaacaaacctgcacgttctgtacatgtatcccagaacttaaagtataatttttttaaaaaagcaaattatatatatatatggctgttaacatagttcttagagaattgtggacctccgatgtactggattta

SEQ ID NO: 686134 - DNA, 623 bp, Homo sapiens
agatctgcacatggctggtgctgttttgtcccttgagacttagctcaaaccaacttctttctagagaagagtttcctgatagcaccatttaaaagtatcttatttatttgtttacctgtaatttatctttccctataagaaaacttaattgttaatgagatctgagatctttattttattcactactgtgtcttagtgtatagaacagagcctagcgcatagtaagcactcaataaatatatgcagaatgaatgtgtgtaagttttaaaacatgtacacaaattggcactttcccattgagaggcaggatctatgtctactccccttgattctaagctaatttaatgactagrtgactagtagatgataatagaagtgacactatgtggtctaaaaatgtgatgcagcttctgccttggtctctgggccacttgtgctagagcctgggccaccatgtacacgtctgaccactctaaggctactatgctgtgaggaagcccaatctagcccatgcggagagatcatttggagaaaccctaatataacataaagagagagagacgcatggtcaaccccagctgcttcagccccccactgttttacttctagccagtctgactgca

SEQ ID NO: 686135 - DNA, 623 bp, Homo sapiens
agatctgcacatggctggtgctgttttgtcccttgagacttagctcaaaccaacttctttctagagaagagtttcctgatagcaccatttaaaagtatcttatttatttgtttacctgtaatttatctttccctataagaaaacttaattgttaatgagatctgagatctttattttattcactactgtgtcttagtgtatagaacagagcctagcgcatagtaagcactcaataaatatatgcagaatgaatgtgtgtaagttttaaaacatgtacacaaattggcactttcccattgagaggcaggatctatgtctactccccttgattctaagctaatttaatgactaggtgactagtagatgataatagaagtgacactatgtggtctaaaaatgtgatgcagcttctgccttggtctctgggccacttgtgctagagcctgggccaccatgtacacgtctgaccactctaaggctactatgctgtgaggaagcccaatctagcccatgcggagagatcatttrgagaaaccctaatataacataaagagagagagacgcatggtcaaccccagctgcttcagccccccactgttttacttctagccagtctgactgca

SEQ ID NO: 686136 - DNA, 797 bp, Homo sapiens
atctttaaaggcagtgtaagagttagccgccttgctgctggatgcacacagatatatgtgggtcacatccaaagttctttttgtctgtgctgacagcagattctcccagttagaataagtggatttgtgatgacacattctgaagctttaaagagttcaaaccaaacatctgtgtcctctccatttatcttgaaacagccaagttaaaaaagatgaaatcctgttagtgagttctaaacctgacgctccactttgacttttttctttttttttttttggagacagaggcgggctctgtcacccaggctggggtgcagtggcatgatctcagctcactgcaacctccaccacccaggctcaagcaattctcctgcctcagcctcctgagtagctgggattacaggcgaatgccaccacacccggctaatttttgtattttagtaaagatggggtttcgcccgttgtccaggctggtcttgaactcctgacctcaggagatttgcctgcctcggtctcccaaagtgctgagattacaggcatgagccaccatgcttggccctagtttgacttttgcaggtagagaaggacttcgyttaggggtgcatgttgtctcacacattcccttcatgcacccacctccattcctcaatatttctgactccttctggctgatatcacttctcttgaattcaaatatctgtaacttcgcagaggatagagaattgacgagttttgagtaaggcagaggaactcttcctagcatgcaggcttaagggagcttccgagagggtacacaa

SEQ ID NO: 686137 - DNA, 961 bp, Homo sapiens
aggtctcctgtcaaagtcagggccagagaagaaggcacagggaacctactgcacgagactttcacttgcaacgagcaacccatgatgaggagggaggattcctgggggcattgagtcccccagacacaaggacccaagaccttcttgcttggaaagtgaattcctcagaattccgagatgatgccagtcttggaggaagatgacatgaggacccaaaaccttcttgcttggaaagtgaattcctgagaattccgagatgatgccagtcttggagaaagatgacatgaggacccaaaaccttcttgcttggaaagtgaattcctcaraactccacaaagactccagtcttggaggaagatgacatgaggacccaaaaccttcttgcttggaaagtgaattcctcagaactccacgaagactccagtcttggaggaagacgaggtgttgagagatagctgggatccctgaggaaggcagccccagtctccggtggagaattaagaggggcccaagcagatggttggtggtggaaacgtcacctcagtatagtactatggagtttcctttcacccccaacagccgacggtttccaggggcgaagagtgaaaattgaagcaaggtgtctactgtccaggtgagagccacatcctatggctgagggcctgggggcattggggaccaccaagaatgaatacttttccaattaagtgaagtcttttgcacaatattcctgaccaatagctaatgttctctgagagagtcagagcttcagcccgtgaaagggcgagggaacttgtaggaagatatatgtgagtacagatgtgaggagaacatgctgaagtagcccaggggctcagttgaagctgaggactggtggttctggtggctgtgctgggggtgggggtggcagtgtgagatggaagtgagtgagcaggttgggtgggaaagaggaagaaaccta

SEQ ID NO: 686138 - DNA, 961 bp, Homo sapiens
aggtctcctgtcaaagtcagggccagagaagaaggcacagggaacctactgcacgagactttcacttgcaacgagcaacccatgatgaggagggaggattcctgggggcattgagtcccccagacacaaggacccaagaccttcttgcttggaaagtgaattcctcagaattccgagatgatgccagtcttggaggaagatgacatgaggacccaaaaccttcttgcttggaaagtgaattcctgagaattccgagatgatgccagtcttggagaaagatgacatgaggacccaaaaccttcttgcttggaaagtgaattcctcaaaactccacaaagactccagtcttggaggaagatgacatgaggacccaaaaccttcttgcttggaaagtgaattcctcagaactccacraagactccagtcttggaggaagacgaggtgttgagagatagctgggatccctgaggaaggcagccccagtctccggtggagaattaagaggggcccaagcagatggttggtggtggaaacgtcacctcagtatagtactatggagtttcctttcacccccaacagccgacggtttccaggggcgaagagtgaaaattgaagcaaggtgtctactgtccaggtgagagccacatcctatggctgagggcctgggggcattggggaccaccaagaatgaatacttttccaattaagtgaagtcttttgcacaatattcctgaccaatagctaatgttctctgagagagtcagagcttcagcccgtgaaagggcgagggaacttgtaggaagatatatgtgagtacagatgtgaggagaacatgctgaagtagcccaggggctcagttgaagctgaggactggtggttctggtggctgtgctgggggtgggggtggcagtgtgagatggaagtgagtgagcaggttgggtgggaaagaggaagaaaccta

SEQ ID NO: 686139 - DNA, 961 bp, Homo sapiens
acttactccacacctttctgcaaaatgctcataataaacctcctgtctacattgtgttccaatgaaaactttagtcatattttacatttattattaatataacatgctatgtaaatgtacaggagcctgacaaatgacaatctacttacataatttaaataacacaagtgcttgctgcagtctttattagtacacagctttgttatggcttcttagaaataattttaaaaagtgcatgattcttgtgggctactctgtttaggaaagattacagataacacatttctaagaatgaattagtcagctgtatatgggttcagattagaaaatattaaataaatacagggaaaaatatttttaattagcttaatttatatatgaagatattttatttaatttgtttttgagacagggtctttctctgtcacccagactggtgtgcaatggcacaaacacatctcattgcggcctggacctcctggcctcaggtactatgcctagctaattttttttattttttgtagagatgcattctcactatgttgcccaggctggtcttgaactcctggcctcaagtgatcctcccgtctttaccttccaaagggttgggattacaggcctgagccactgcacccagtcccattttacttaaatatcaaattcaaatcttcagtgttctacttattttgggtgttaattccattatacaccrtcttatttcagtaatttccatattgtgccagacaagatataaaaataattcaactccagtcaataataccatctgtcttcatgtgaccaggatgaaaagcttctgctcccaacatggaagccacagtaagaaaagaatctgtctaatccactagcaacaagcagttaatactgtagttcggaataatactaggacattaacattctaattccagcaaacaaggactgactcttttcaaaattcaacttt

SEQ ID NO: 686140 - DNA, 287 bp, Homo sapiens
aacccgggaggcagaacttacagtgagcctagaatgcgccactgcaccccagcctgggggacaaaaacggactctgtctcaaaactaaaaaaaaaaattcccacattagagttggggaaatgggcagtcctggtggaagktagggaacagatctgggacacgttatagccagctggactacaggaggccataagctcaattcttccttgactctgaaaccttccactggtcctaatgcctagtaattccaggcctttcccagttgtgccaggcttggaggtgaacac

SEQ ID NO: 686141 - DNA, 1854 bp, Homo sapiens
ccggagtgcagtggcacaatctcagctccctgcaacctccacctcccaggttcaagcagttctcctgcctcagcctcccgtatagctgggattacaggtgtgtgcctccacacccagctaattgtttgtatttgtattagagtcgaggtttcaccatgtgtagcaggctgatctcaaactcctgacctcaagtgatctgcctgcctcggcctcccaaagtgctgggattacaagcatgagccaccatgcaggaagtagcattttaaagaagcaccacccaccccctcattcattgtgagccatgaagttgggcattcgttgccctggaggatcaggtagctaaaagagatggtgacccgtgaggatctgtgacagtgaatgtgcaggagattttggtaagtctgcttatatagagattctgtttaagacccctaggtgttcctcctaaaaataatgtggttttaatgaaggaaaaggggcctatttctcacctcattaacaagctctgagaagtttctctgtgtcattatatagttagtagaagagggttgtgtgttgtaatcttctatttctactcttttatctcctgggtccaaacactttgtttctcccttgaagaagcagaattaacataactaattccagtattagtaacaggattaatgggagtagctctaagttgtaatttaaaataataataaatgaaatcactttggataagtatcatgttcaggcatggtggctcacatctgtaatcccagtactttgggaggccaaggtacgcatgtgtgcgcgcgcacacacacacacacacacgtttcacttttctatttagagaaaatgtgtagccaactagacttgtaagagaatgaagaagtcgtgagacacaaagggacaagcttaatataaagcctaccaaacaaaattagatttagaaggtatttgggtatatatgtattaacatctccaatgtccctttctttgtaattatatttccactaggaagtaacctaagaatctagaatatatactcctgtaatatagactgttttgtaacaaaaaaacagacactttaatcctagtacgagaggaaataggaatgaggatgggaaagaaggcaaggaaggtaatagtcaaagaacaaagacaaaagcaggagaatatgcctcatggaagctgacaggtgtctaggttgagtggaaggtccctctagagaaaaaggttaaatattaagatgacagaaagtgactggtggagaagagggtgccgcaggcaccactgtaagggggagtagaaccctgggcaagaaggcaagaagtaggcacagatacagaggagatagtagtagggagatggagaaatcaagggagatcaggcctaatgtcctcttggatgccacagaatgcatgagtttagggacacagagttcacacagagttccagtgagggtggaaattaggtaggggatgtgaggacagagacagatttggaattgttaagrgaaacgagaaagggaagtggccaagtataacttggttttaaagaccagtggcattctatgatttgtcggaacctttactcagttaaaggaagaaataaagttataattacttctatattacacatgtgggggatttagaattgtttctttgatatacctttttatattcagttattgttcttttttttgagttagggtcttgctctgtcatctgggctacagtgcagtggtgcaatcgtggctcactgcagcctcaaactcctgggctcaagggacacccctgtctcagccttctgagtaactagggctacaggtgcatgccaccatgcccagctaattaaaaaaattttttt

SEQ ID NO: 686142 - DNA, 1854 bp, Homo sapiens
ccggagtgcagtggcacaatctcagctccctgcaacctccacctcccaggttcaagcagttctcctgcctcagcctcccgtatagctgggattacaggtgtgtgcctccacacccagctaattgtttgtatttgtattagagtcgaggtttcaccatgtgtagcaggctgatctcaaactcctgacctcaagtgatctgcctgcctcggcctcccaaagtgctgggattacaagcatgagccaccatgcaggaagtagcattttaaagaagcaccacccaccccctcattcattgtgagccatgaagttgggcattcgttgccctggaggatcaggtagctaaaagagatggtgacccgtgaggatctgtgacagtgaatgtgcaggagattttggtaagtctgcttatatagagattctgtttaagacccctaggtgttcctcctaaaaataatgtggttttaatgaaggaaaaggggcctatttctcacctcattaacaagctctgagaagtttctctgtgtcattatatagttagtagaagagggttgtgtgttgtaatcttctatttctactcttttatctcctgggtccaaacactttgtttctcccttgaagaagcagaattaacataactaattccagtattagtaacaggattaatgggagtagctctaagttgtaatttaaaataataataaatgaaatcactttggataagtatcatgttcaggcatggtggctcacatctgtaatcccagtactttgggaggccaaggtacgcatgtgtgcgcgcgcacacacacacacacacacgtttcacttttctatttagagaaaatgtgtagccaactagacttgtaagagaatgaagaagtcgtgagacacaaagggacaagcttaatataaagcctaccaaacaaaattagatttagaaggtatttgggtatatatgtattaacatctccaatgtccctttctttgtaattatatttccactaggaagtaacctaagaatctagaatatatactcctgtaatatagactgttttgtaacaaaaaaacagacactttaatcctagtacgagaggaaataggaatgaggatgggaaagaaggcaaggaaggtaatagtcaaagaacaaagacaaaagcaggagaatatgcctcatggaagctgacaggtgtctaggttgagtggaaggtccctctagagaaaaaggttaaatattaagatgacagaaagtgactggtggagaagagggtgccgcaggcaccactgtaagggggagtagaaccctgggcaagaaggcaagaagtaggcacagatacagaggagatagtagtagggagatggagaaatcaagggagatcaggcctaatgtcctcttggatgccacagaatgcatgagtttagggacacagagttcacacagagttccagtgagggtggaaattaggtaggggatgtgaggacagagacagatttggaattgttaagagaaacgagaaagggaagtggccaagtataacttggttttraagaccagtggcattctatgatttgtcggaacctttactcagttaaaggaagaaataaagttataattacttctatattacacatgtgggggatttagaattgtttctttgatatacctttttatattcagttattgttcttttttttgagttagggtcttgctctgtcatctgggctacagtgcagtggtgcaatcgtggctcactgcagcctcaaactcctgggctcaagggacacccctgtctcagccttctgagtaactagggctacaggtgcatgccaccatgcccagctaattaaaaaaattttttt

SEQ ID NO: 686143 - DNA, 585 bp, Homo sapiens
aaaaaagaaaacaaacaacaacacaaataarttaaaacatctagctttttgaaagatgaaaaaaaatgttggccttctactctggctatacatttttacttagactttggaattgtgatccaactttcaacaagcagagtgtaagattttcattgtattacttcctcagctgtgcaatttctataaaatgggcaagaggctctgaagagaatgcctggtgacgccatgccatgtgcttagttcattataaatcatttcaagtacctccagcctcgctgagccagtcaaaacagaaatcttctaacgcatttgagagaatcttgttttatagagtgcttaagagaggcatgaaaagcatactagatttcaaatgtaccaaattatccagaaaggattttggaactggttcctattaggttacttttcattattatttaatacgacatataaaatataacgcttttctgtttgagctgctagtgcctggaatggttctgccttctacaatttcgcaagcaaatgttaacgcatgtctattctagtctagttactaccttattgctagacatcaaaagtgaaaagtgt

SEQ ID NO: 686144 - DNA, 585 bp, Homo sapiens
aaaaaagaaaacaaacaacaacacaaataagttaaaacatctagctttttgaaagatgaaaaaaaatgttggccttctactctggctatacatttttacttagactttggaattgtgatccaactttcaacaagcagagtgtaagattttcattgtattacttcctcagctgtgcaatttctataaaatgggcaagaggctctgaagagaatgcctggtgacgccatgccatgtgcttagttcattataaatcatttcaagtacctccagcctcgctgagccartcaaaacagaaatcttctaacgcatttgagagaatcttgttttatagagtgcttaagagaggcatgaaaagcatactagatttcaaatgtaccaaattatccagaaaggattttggaactggttcctattaggttacttttcattattatttaatacgacatataaaatataacgcttttctgtttgagctgctagtgcctggaatggttctgccttctacaatttcgcaagcaaatgttaacgcatgtctattctagtctagttactaccttattgctagacatcaaaagtgaaaagtgt

SEQ ID NO: 686145 - DNA, 634 bp, Homo sapiens
gcacaaatccagattgtcctctctttgtggtttgctgcaggtacccagcgtgccaatgcccgggctccagccccttacaagcgggatttcgaagccaaactgaggaacttttacaggaagttagagactaaaggatatggacaaggcccagggaagttaaagtaagtcaaagtgacacaaaccacataatgtatagatggtgaaaggagrgggcacagttgggcctctaggaaattgattgtgatttgggatgactagccttcattttagtcggcataattattttggaatttgtaaattataggatcatctaaaacatagtcctggaatgaaacatgattaagcttaacattttaaaacaaatagtgaagacactgccacttttcatgcaaaaataaaggcaaaataaaaggctgatttatttttttcctctgaaaagtatgtctttgttggtgcatagtatattcattagctataaagctatcccaatgtcctccactgcaagtttctgtctcctgaactgacctgagtgtaggaatagtgctcagctctgttcagttctgtgaaacaaacttcacagcagaacatgtcatgaatgttgtttcggcctttcttcatccatctcctcctttca

SEQ ID NO: 686146 - DNA, 624 bp, Homo sapiens
tcggctcactgcagcctctgccttaggttcaagcaattctcctgcctcagcctcccgagtagctgggattacaggcgtgtgccataccaaacccagttaattttttgtatttttagtagagatggggttttgccatgttggccaggctggtctcaaattcctggcctcaaatgatctgcccacctcagcctcccaaaktgctgagattacagacgtgagccaccgcggccggccaatctcatagtcaatgttaatggatgccactccatgtcaggcactgtgcctgagttggggaaaagaggcagtgcctgccctcagtaaactcctaagttgggagggagaagtgtgggagacagggatatccacatggtgcactaactgctgtggctgacatcctcacagtggctactgaagcaccatggagtggctggtgactaggaagacttcctgaagacgaggatgctacaaatggggcaagaaggagttttcctggcaggcatgtggaagagatccaggctaaggacatagttaaataaaaggtttgggggcttgagggcttagaggaaccaccattaggccagcatggtaaagctatgtgggtcacgtgggcttggcaaaagccaa

SEQ ID NO: 686147 - DNA, 598 bp, Homo sapiens
caaaaaaaggaaaagtcataaaacaaatttaaaacctgaaagaaatatttgcaatttataccacaaaatatatcataatctcctaattaacaaacagttcttaaaaactgggaagaaaggcaccaaataccagttgggaaaagatgtaaagagacagttaaaaaaaaaaaaagcaagcaattgtccttaaacttatgaaaaaggctgaccttcctcataataacataaaggcatacagacatccctcagaaacattgcaggaaatattacacacaaatttaaggtttccaagtgcatataaaagttatgtttacactatactgcagtctattaagtgtgtaataacattgcatctaaaaaagcaaygtacataccttaattttaaaatactttattgctaaaaatgctaacaatcatctgagccttcagtgaattataatattttttgctgatggtcttgcctctatgttgatggtggctgctgaagactggggaggctgtggcaatttcgtaaaataagacaacggaagtttgccacctcaattgattcttcctttcacaaaagatttctctgtagcattctatgctttttgatagc

SEQ ID NO: 686148 - DNA, 629 bp, Homo sapiens
caataaaaccataaatagaaataacaatgaaaagaaatctattaatgaggtattaatataggaatatatactgtacatatatattgcattatataagtatattatatattatatatgtaaatatacattacatatacatatatattatacatatatagatatatacatattccccagaggtttagaccgaggaaaccaggtcaagctgcttctcaggtgcttgctgtataattaaccacttttagatttgagtcttggctattccacatgcatctgtgaccttgggcaattacttgatctcagagagcttccagttcctcatctataaaatragtacaaaaatttctcatatgattaacaccagatctaaaaaaatacctggaatgtaaaatgagctagaacagtgtaagatatgaataaccttattactgtaatttacgtgactatttaagcaaaacgctaaaatgatttgagcaatgtctcaaaagaaaagaataattatattctatctggagtgtttcatagttaattccctttattgaggaaatggtctggagtttccagaagtctcacttatttcagaaaagcaccggctgggtttacaggacacttaggactctgcaaagtga

SEQ ID NO: 686149 - DNA, 660 bp, Homo sapiens
cctgatcttagggggaatatatccagccttcaccatgatgttagccgtggtttgtcacagatatcttctatcaagattgagtgcatttatcatggaagggtgttgaattttacaaatgttttttctgcatctattgaaatggtcatatagtttttgtttttattctattgatacagtgtttggcattcactgattttcatacattaagccaatcattccttgtaaatcctactttgtcatggtatacaattctttttatatgctgttggattcagttcgtgagtgtgttattgaggatttttgygtctatattcataagagatattggtctgtagtttgctcttcctgtgatgtctttggttgaaattttttaaaggtaaaatacattaccacactccaaaaaggagtctttcatgtctttagcctttcatttgtttttatctttcttctgatttttcttaacatgtaattatcatcaacctggcaccattcccaatcagaaggtattttcatctggatttagcaagcttggggaagggaggtgcaggtggtacataggatgactttgaaaataggatagatatattgtagagctcttgtgtgaaagaggaaaggatctgatgaattaaagccttgtgtatctgtgaagatctttgattt

SEQ ID NO: 686150 - DNA, 650 bp, Homo sapiens
tccttaaaaaattaatttaaaaaatctatctgatatgaataacatgactttttttctaaaattagaggccacttgaaattgtctaaattcctaatttttgctgcctattttaaagttgcattgttattatactttaagttttagggtacatgtacacaatgtgcaggttagttacatatgyatacatgtgccatgttggtgtgctgtacccattaacttgtcaattagcattaggtacatctcctaaagctatccctcccccctcccccgaccccacaacagtccccagagtgtgatgttccccttcctgtgtccatgtgttctcattgttcaattcccacctatgagtaagaatatgcggtgtttggttttttgttcttgtgatagtttactgagaatgatgatttccaatttcatccatgtccctacaaaggacatgaacccatcattttttatggctgcatagtattccatggtgtatatgtgccacattttcttaatccagtctatcattgttggacatttgggttggttccaagtctttgctattgtgaatagtgccgcaataaacatacgtgtgcatgtgtctttatagcagcatgatttataatcctttgggtatatacacagtaatgggatggctgggtcaa

SEQ ID NO: 686151 - DNA, 650 bp, Homo sapiens
tccttaaaaaattaatttaaaaaatctatctgatatgaataacatgactttttttctaaaattagaggccacttgaaattgtctaaattcctaatttttgctgcctattttaaagttgcattgttattatactttaagttttagggtacatgtacacaatgtgcaggttagttacatatgcatacatgtgccatgttggtgtgctgtacccattaactygtcaattagcattaggtacatctcctaaagctatccctcccccctcccccgaccccacaacagtccccagagtgtgatgttccccttcctgtgtccatgtgttctcattgttcaattcccacctatgagtaagaatatgcggtgtttggttttttgttcttgtgatagtttactgagaatgatgatttccaatttcatccatgtccctacaaaggacatgaacccatcattttttatggctgcatagtattccatggtgtatatgtgccacattttcttaatccagtctatcattgttggacatttgggttggttccaagtctttgctattgtgaatagtgccgcaataaacatacgtgtgcatgtgtctttatagcagcatgatttataatcctttgggtatatacacagtaatgggatggctgggtcaa

SEQ ID NO: 686152 - DNA, 650 bp, Homo sapiens
tccttaaaaaattaatttaaaaaatctatctgatatgaataacatgactttttttctaaaattagaggccacttgaaattgtctaaattcctaatttttgctgcctattttaaagttgcattgttattatactttaagttttagggtacatgtacacaatgtgcaggttagttacatatgcatacatgtgccatgttggtgtgctgtacccattaacttgtcaattagcattaggtayatctcctaaagctatccctcccccctcccccgaccccacaacagtccccagagtgtgatgttccccttcctgtgtccatgtgttctcattgttcaattcccacctatgagtaagaatatgcggtgtttggttttttgttcttgtgatagtttactgagaatgatgatttccaatttcatccatgtccctacaaaggacatgaacccatcattttttatggctgcatagtattccatggtgtatatgtgccacattttcttaatccagtctatcattgttggacatttgggttggttccaagtctttgctattgtgaatagtgccgcaataaacatacgtgtgcatgtgtctttatagcagcatgatttataatcctttgggtatatacacagtaatgggatggctgggtcaa

SEQ ID NO: 686153 - DNA, 1503 bp, Homo sapiens
tggaygaatacagttcataaatatgtaaatgatagaattccattgtactgtattttttcaaaatattttacgaagaattgtaatacattttcttacaagtaatttggaaattactgtattacacttccagtgtttaattcaaaacattaaaaatgattatacagccagtggggtggcttgtgtctgtagtcccagctgctctggaggatgtggcaggaggatcgcttaagcccaagaatttcagcctgcagtgaggtatgatcatgctcccgcactggagcatgggtgacaagagtgagaccctgtctctaaaaaatacagtaaaatgaaacagtacaatacccatgtaaatgccatttaccaaagacaaaattgatgtttaagaaaagcccagaaaaaccttcttatttgttagcactgaattaagtgcattatgttcattcatttataaacaaaaataattctataaaggacacctcaaatctcctgagagctccttcattgcaaaaagacagcagagattctgatatcgttaattgaatatatttcggaggggtttttacctgattatttgcttctgtttctaagacagactaatatcttatgatttcagccgaaaatccaaatgtgttagcattgtgtagaatgccttatggaacctggccacaaaccacatttttaagtcaaatctcttctctttctattcccatctatttaaaaattacaaatctatttaaaatatctgtatcattccaaatgttagtcttagtgtataattttatttctcaaattctcctttttcattaaaaaaataaatttgcaataattataggctcacagaaaattattaaaaaatacagaaaagtcccagctacctgtcacttagtttccctcaataataacatctttcataactctagtctgatatcaaaacaaagacattaaaatcagtataatcccataatttagtcagcttctaccatatgtatatgcactcaaatgtgtgtgttttgagtgtattctatacaacgttatctcctatatatttatataatagctaccataatcaaaacacttaactattccatcaccacaatatccctcttgctactcttttccaattatttgcctagtaaataggcagcttaattactattgttttctaaacctatcctgaggctgcaggtactgtgtgtccttgtgctctcagagctccctgtgtgggctgtttcaaaaactcttactacattacattttagttactcttaaaatgtacatcttactaactaaactgactgcaaactctttgaagttggaagagtaatgtgtgttgaatgggtacctactgggaataataaaatttgtcaaagacgcctcagataatcataccttgttcaaataacaattttctgaacctacaactttaaaatactatctctgtgctataaatgagttaattgacttctaatgtacacatgctttgggcccaatttttacaaaaat

SEQ ID NO: 686154 - DNA, 1503 bp, Homo sapiens
tggacgaatacagttcataaatatgtaaatgatagaattccattgtactgtattttttcaaaatattttacgaagaattgtaatacattttcttacaagtaatttggaaattactgtattacacttccagtgtttaattcaaaacattaaaaatgattatacagccagtggggtggcttgtgtctgtagtcccagctgctctggaggatgtggcaggaggatcgcttaagcccaagaatttcagcctgcagtgaggtatgatcatgctcccgcactggagcatgggtgacaagagtgagaccctgtctctaaaaaatacagtaaaatgaaacagtacaatacccatgtaaatgccatttaccaaagacaaaattgatgtttaagaaaagcccagaaaaaccttcttatttgttagcaytgaattaagtgcattatgttcattcatttataaacaaaaataattctataaaggacacctcaaatctcctgagagctccttcattgcaaaaagacagcagagattctgatatcgttaattgaatatatttcggaggggtttttacctgattatttgcttctgtttctaagacagactaatatcttatgatttcagccgaaaatccaaatgtgttagcattgtgtagaatgccttatggaacctggccacaaaccacatttttaagtcaaatctcttctctttctattcccatctatttaaaaattacaaatctatttaaaatatctgtatcattccaaatgttagtcttagtgtataattttatttctcaaattctcctttttcattaaaaaaataaatttgcaataattataggctcacagaaaattattaaaaaatacagaaaagtcccagctacctgtcacttagtttccctcaataataacatctttcataactctagtctgatatcaaaacaaagacattaaaatcagtataatcccataatttagtcagcttctaccatatgtatatgcactcaaatgtgtgtgttttgagtgtattctatacaacgttatctcctatatatttatataatagctaccataatcaaaacacttaactattccatcaccacaatatccctcttgctactcttttccaattatttgcctagtaaataggcagcttaattactattgttttctaaacctatcctgaggctgcaggtactgtgtgtccttgtgctctcagagctccctgtgtgggctgtttcaaaaactcttactacattacattttagttactcttaaaatgtacatcttactaactaaactgactgcaaactctttgaagttggaagagtaatgtgtgttgaatgggtacctactgggaataataaaatttgtcaaagacgcctcagataatcataccttgttcaaataacaattttctgaacctacaactttaaaatactatctctgtgctataaatgagttaattgacttctaatgtacacatgctttgggcccaatttttacaaaaat

SEQ ID NO: 686155 - DNA, 1503 bp, Homo sapiens
tggacgaatacagttcataaatatgtaaatgatagaattccattgtactgtattttttcaaaatattttacgaagaattgtaatacattttcttacaagtaatttggaaattactgtattacacttccagtgtttaattcaaaacattaaaaatgattatacagccagtggggtggcttgtgtctgtagtcccagctgctctggaggatgtggcaggaggatcgcttaagcccaagaatttcagcctgcagtgaggtatgatcatgctcccgcactggagcatgggtgacaagagtgagaccctgtctctaaaaaatacagtaaaatgaaacagtacaatacccatgtaaatgccatttaccaaagacaaaattgatgtttaagaaaagcccagaaaaaccttcttatttgttagcactgaattaagtgcattatgttcattcatttataaacaaaaataattctataaaggacacctcaaatctcctgagagctccttcattgcaaaaagacagcagagattctgatatcgttaattgaatatatttcggaggggtttttacctgattatttgcttctgtttctaagacagactaatatcttatgatttcagccgaaaatccaaatgtgttagcattgtgtagaatgccttatggaacctggccacaaaccacatttttaagtcaaatctcttctctttctattcccatctatttaaaaattacaaatctatttaaaatatctgtatcattccaaatgttagtcttagtgtataattttatttctcaaattctcctttttcattaaaaaaataaatttgcaataattataggctcacagaaaattattaaaaaatacagaaaagtcccagctacctgtcacttagtttccctcaataataacatctttcataactctagtctgatatcaaaacaaagacattaaaatcagtataatcccataatttagtcagcttctaccatatgtatatgcactcaaatgtgtgtgttttgagtgtattctatacaaygttatctcctatatatttatataatagctaccataatcaaaacacttaactattccatcaccacaatatccctcttgctactcttttccaattatttgcctagtaaataggcagcttaattactattgttttctaaacctatcctgaggctgcaggtactgtgtgtccttgtgctctcagagctccctgtgtgggctgtttcaaaaactcttactacattacattttagttactcttaaaatgtacatcttactaactaaactgactgcaaactctttgaagttggaagagtaatgtgtgttgaatgggtacctactgggaataataaaatttgtcaaagacgcctcagataatcataccttgttcaaataacaattttctgaacctacaactttaaaatactatctctgtgctataaatgagttaattgacttctaatgtacacatgctttgggcccaatttttacaaaaat

SEQ ID NO: 686156 - DNA, 286 bp, Homo sapiens
ggctgaagttctctttttttaatactttgtatttaatttttttcttttatcatgttaacggtttgagtcatgtcaytaacatgctataagtttctgaccccatacaaaatagacacttgagatatgctgcaaagccttattttttatcagaactgatggcctgaactgcaaaatttggttccatttccattagccatggctgctttaacgcttgctccaacctgtgtcatttgtgttctttttcttggaatacagacttttctttagatttattaggttcatgcaa

SEQ ID NO: 686157 - DNA, 1264 bp, Homo sapiens
ttgattatttattggacttggaattggtgggtcaaatccgtatagttttaaagatcaaaagagacctgttcctcttatcccattttgtgacatgcaaacttgacagtaaggaagccaaataaacctaccaaactaaaagctcttgatacggaggctgtgaaaagtatgatgtattttctttgtcaatcactagattttattgaagatctaaaaggtcttagcacaatattaggtacttgggatataatttagacattaggtattctctatgtcttcaggagatgaacagttattgactacttacaacttgacaaatggaccacccctcaaaaacgtcaggggcctactttctaatatagaaatttatacgccttgagtaggaatacttttactttctgcttggctgatattgctttcataactctgaaatttgactcattttgctaacatacttgatgttaacattttagccttatatatttataaaaataatagtttgaattactgtcccatagaaagaaatgcaagcaatttaaaatatgcttcccctcaactcaaattttgtcattaaaattcaatgaagcttcttcatgatcctataagttatcttaaatactaactgcttactgctcttagcatcttgggaagaaaaccaatggggtattgctgaattttttggaggcatgccattgaaacaattgtaaagatatgttcaaacaagggcctccaaggtcaggtctatgcttattttataaatttgtttcaatgatcatagtctgctctctgggtcatataattgattaaaagattgtctcccatctggcctatgtacctggtaggctgccaccaactaaattkatatcccataatgaaatccataccattttaggatcactatagttaaccataatgtatgatatagtttcaaatagctaggaggaggatattgaacgttcccaacacaaataaatgataaagctttgagataacagatatgctaattaccctcatctaatcactatatattataggtatccaaacattactatgtaccccatgaatatgtatgaatatggcaattattattcgtcaattaaaaaaatacaattaggccaaaaaaatttaaaaaaatttttttttaaagaaatggtaagttttaattgtgagccagtctatattctaatacattaagggatccttttagagagtgttgggtggtcagatgagctagtattgtacaggctcacataaattggcatgtatt

SEQ ID NO: 686158 - DNA, 1264 bp, Homo sapiens
ttgattatttattggacttggaattggtgggtcaaatccgtatagttttaaagatcaaaagagacctgttcctcttatcccattttgtgacatgcaaacttgacagtaaggaagccaaataaacctaccaaactaaaagctcttgatacggaggctgtgaaaagtatgatgtattttctttgtcaatcactagattttattgaagatctaaaaggtcttagcacaatattaggtacttgggatataatttagacattaggtattctctatgtcttcaggagatgaacagttattgactacttacaacttgacaaatggaccacccctcaaaaacgtcaggggcctactttctaatatagaaatttatacgccttgagtaggaatacttttactttctgcttggctgatattgctttcataactctgaaatttgactcattttgctaacatacttgatgttaacattttagccttatatatttataaaaataatagtttgaattactgtcccatagaaagaaatgcaagcaatttaaaatatgcttcccctcaactcaaattttgtcattaaaattcaatgaagcttcttcatgatcctataagttatcttaaatactaactgcttactgctcttagcatcttgggaagaaaaccaatggggtattgctgaattttttggaggcatgccattgaaacaattgtaaagatatgttcaaacaagggcctccaaggtcaggtctatgcttattttataaatttgtttcaatgatcatagtctgctctctgggtcatataattgattaaaagattgtctcccatctggcctatgtacctggtaggctgccaccaactaaattgatatcccataatgaaatccataccattttaggatcactatagttaaccataatgtatgatatagtttcaaatagctaggaggaggatattgaacgttcccaacacaaataaatgataaagctttgagataacagatatgctaattaccctcatctaatcactatatattataggtatccaaacattactatgtaccccatgaatatgtatgaatatggcaattattattcgtcaattaaaaaaatacaattaggccaaaaaaattwaaaaaaatttttttttaaagaaatggtaagttttaattgtgagccagtctatattctaatacattaagggatccttttagagagtgttgggtggtcagatgagctagtattgtacaggctcacataaattggcatgtatt

SEQ ID NO: 686159 - DNA, 2956 bp, Homo sapiens
gtcaaaacaaatcctgttttggaaatgcagggctattctggtagggtccatcccaggacctaagaggggaggaaaattggctaaaaagagcaagactcacccaagaagctgtgatggaggcacacccgtgctgccctgatggctggctggcactgtagatgagttccagataggttactggcaaagaaaagagcacttcttcctgctttgcatcggcaacctgtgcctggattatgagctgctggagcaagggtagactggaaggacaccaggaggtttctgctgtctgataacattcctggggctcaaggaattcttccatccagtctcctacttccaggaggcttcctcccctggtttctccccaggtaccatgatgggcctttcctttgatatagagcagctatttccacactgtctctgtccatgcctccatctgtgagagtttgttgtattcttggttgacccaggtgatcacaatcgcctgttactgacaaattagattaccatgcaataagtactctaagcagaaggtacatatgtttgttgttaccaagaatgtctaacttaactttaatccataacaactcgtgttaggggaaatggcataccagttttccttttcagagagttttctttatcattgttcattttatctttgtacctctttggaccatgtagagattagtcaaattacctgcatttgacaaacgagaacaatacagccccatagtgacttgtctgaagaagcccagagaattggtgacaaagctgacatctggtctcctgatttccattctgggattctttctactgatctttcttatttcatttattcaatgtaccaactcaaatgaaaacgtgcctactacatggcatggaagaaacaggcttcttgtcttatctcgcacagtctgcccacgcaaaccatctgtccagccaaaccaaaatagcactgtgcttccagcctctgcaccctggctcctgccttgtcgctggcttgaaccaccctcccccaactctctgcttaatgaaacttaatcatcctttaatccgaagctcaactgtcctgtcttctatattgccttcctgattattacagcaggaagtaatttctcttgctcgaaatgcagttaattaaaaaaatgggcgactttggtgccatcatactctgccttggattgtagtgttttgttggtgaattttatctccccaagtaagctgtgggcctgaagaaggcagcaactgtatttcacacatcttagtattcctcacagtcttgcgtatgatgtaagctaaatatttattgaatgagtcaatgaaagtgattttcagtgttgagagctgaattcagaaccccacaatctgatctccatgtttcttctaccaagtcattctgaaagcaatgcagtttctactatgatttgcctctttgtaagccaatcacggttgaaaataggctgtttcatatggtgcagtctaacccaatgcatatggaactgtttggacagaataaaatagtttaaatggctgagcttgaaaactgaacttcctgtgctgttgctggctagcattaaatgcgtatcccctcccaagaaggcctccttctttcataaacttgtattagttctcaccaggagtagtgtgagaataaagtatagtggtcgttggggtgtatccatggaccaaatgaagaggagaatgagggagtgacctggtgttgtgtcttccgtcagtcatccattcactatttccataagcattgactaagcgtgttctgtcactggcctagatgatgtgaatacagaaataacacaaatctctatagagtcccaatctactgatcatctgtggccacggcaaagaatttaagtaaaattctcaaatttactggataatcgttcttactcttctttttgcttcagctgaagaactgaattaagggtggaactccaggcaccattctgtaaatgaaacatatactgaaaatggaaacagtatactgaatcaatctgtatactgatatgtaataaaacagataatatgcttactaggagcctctcaggaagctgtttggggtagcaatggaacgctgagacttccaagggcctgctcaagtaaccacagaccttcccttcacctacctgccttcaaagagggctgggggtgttggttactgctattgtcacattctgctgagcagagggtacaagtttgagtcagagctgaattgttgaagccagtggagaagaggcccatcctatcctctttcctctgtgcttatcaggctgtctttaaataaatcataagcgtatatttaaagaatatgggctgaagcaatactaaattggcctacacagacagctgtctgtcttcgtctagccttgattatctgtatccatttacttcaaagggaatgaaacattccctgggcagtagcagaagccacagagaaactcaggtgtcttaaccaagtctggcatcctatgcattaatatcccattgctaatagtaattcatcccatttgtttatttattaatgacagttatatgcattgctcagataacttcctcatccaaattaaatattagcatattaggtcaacaacatcagtcttctgaaggtgatatctctctgaagtacaaaagggattcaacaaatcaagcaaagacctgtagcctacttcctaccaggcattttcctaggtactgtgacacttagttcattcagaagactaccgtgatagacaagctaagaaatgtctttgtggaagaacaaaaataatcttcagtacatcatctttacaaaagtgtagacatatcctaaacagctctatctccctttaacaactcattgtgagtactttatccatgcagttatctgaatcccttcagcatrtattctgttcatgtctctagcactgcttggtatgatgaatgtataactcaaagagta

SEQ ID NO: 686160 - DNA, 2956 bp, Homo sapiens
gtcaaaacaaatcctgttttggaaatgcagggctattctggtagggtccatcccaggacctaagaggggaggaaaattggctaaaaagagcaagactcacccaagaagctgtgatggaggcacacccgtgctgccctgatggctggctggcactgtagatgagttccagataggttactggcaaagaaaagagcacttcttcctgctttgcatcggcaacctgtgcctggattatgagctgctggagcaagggtagactggaaggacaccaggaggtttctgctgtctgataacattcctggggctcaaggaattcttccatccagtctcctacttccaggaggcttcctcccctggtttctccccaggtaccatgatgggcctttcctttgatatagagcagctatttccacactgtctctgtccatgcctccatctgtgagagtttgttgtattcttggttgacccaggtgatcacaatcgcctgttactgacaaattagattaccatgcaataagtactctaagcagaaggtacatatgtttgttgttaccaagaatgtctaacttaactttaatccataacaactcgtgttaggggaaatggcataccagttttccttttcagagagttttctttatcattgttcattttatctttgtacctctttggaccatgtagagattagtcaaattacctgcatttgacaaacgagaacaatacagccccatagtgacttgtctgaagaagcccagagaattggtgacaaagctgacatctggtctcctgatttccattctgggattctttctactgatctttcttatttcatttattcaatgtaccaactcaaatgaaaacgtgcctactacatggcatggaagaaacaggcttcttgtcttatctcgcacagtctgcccacgcaaaccatctgtccagccaaaccaaaatagcactgtgcttccagcctctgcaccctggctcctgccttgtcgctggcttgaaccaccctcccccaactctctgcttaatgaaacttaatcatcctttaatccgaagctcaactgtcctgtcttctatattgccttcctgattattacagcaggaagtaatttctcttgctcgaaatgcagttaattaaaaaaatgggcgactttggtgccatcatactctgccttggattgtagtgttttgttggtgaattttatctccccaagtaagctgtgggcctgaagaaggcagcaactgtatttcacacatcttagtattcctcacagtcttgcgtatgatgtaagctaaatatttattgaatgagtcaatgaaagtgattttcagtgttgagagctgaattcagaaccccacaatctgatctccatgtttcttctaccaagtcattctgaaagcaatgcagtttctactatgatttgcctctttgtaagccaatcacggttgaaaataggctgtttcatatggtgcagtctaacccaatgcatatggaactgtttggacagaataaaatagtttaaatggctgagcttgaaaactgaacttcctgtgctgttgctggctagcattaaatgcgtatcccctcccaagaaggcctccttctttcataaacttgtattagttctcaccaggagtagtgtgagaataaagtatagtggtcgttggggtgtatccatggaccaaatgaagaggagaatgagggagtgacctggtgttgtgtcttccgtcagtcatccattcactatttccataagcattgactaagcgtgttctgtcactggcctagatgatgtgaatacagaaataacacaaatctctatagagtcccaatctactgatcatctgtggccacggcaaagaatttaagtaaaattctcaaatttactggataatcgttcttactcttctttttgcttcagctgaagaactgaattaagggtggaactccaggcaccattctgtaaatgaaacatatactgaaaatggaaacagtatactgaatcaatctgtatactgatatgtaataaaacagataatatgcttactaggagcctctcaggaagctgtttggggtagcaatggaacgctgagacttccaagggcctgctcaagtaaccacagaccttcccttcacctacctgccttcaaagagggctgggggtgttggttactgctattgtcacattctgctgagcagagggtacaagtttgagtcagagctgaattgttgaagccagtggagaagaggcccatcctatcctctttcctctgtgcttatcaggctgtctttaaataaatcataagcgtatatttaaagaatatgggctgaagcaatactaaattggcctacacagacagctgtctgtcttcgtctagccttgattatctgtatccatttacttcaaagggaatgaaacattccctgggcagtagcagaagccacagagaaactcaggtgtcttaaccaagtctggcatcctatgcattaatatcccattgctaatagtaattcatcccatttgtttatttattaatgacagttatatgcattgctcagataacttcctcatccaaattaaatattagcatattaggtcaacaacatcagtcttctgaaggtgatatctctctgaagtacaaaagggattcaacaaatcaagcaaagacctgtagcctacttcctaccaggcattttcctaggtactgtgacacttagttcattcagaagactaccgtgatagacaagctaagaaatgtctttgtggaagaacaaaaataatcttcagtacatcatctttacaaaagtgtagacatatcctaaacagctctatctccctttaacaactcattgtgagtactttatccatgcagttatctgaatcccttcagcatgtattctgttcatgtmtctagcactgcttggtatgatgaatgtataactcaaagagta

SEQ ID NO: 686161 - DNA, 605 bp, Homo sapiens
acagtactagtcacatgtggttataatgctgagtaaaatgttatttactttactaagttggtttgcctaacggaagtagtctccctggagatgggatatcaatgcagaactgactcagcaataatctctccctagtcataaaacagccttactttttgttactgtcactaacatgaactaacatgctttggattggttgtatatcagaagctatgatttttgtcgccctattatatacttagttgtttttaccttatgtcatgttatcctggaaaggccgagacttaggtctctaacacarctagtgggagcttgaatttgattttaggtcctgctaaatctaaggcttatgttgtttgtgttataccacagtctgccaataatgctggccaaataagaaacattttgatgaatcgtgtatttgttagtatattacataagatattttccccataagaaaatgaagcataacctcttaggattttaggcttctctagtgtacagtatctatagagcaaaatttaaattgtggtagtgttttatagactaaaaaagaatcagaagcccctccaaatgaataaggactgtgttcccggaccttaccc

SEQ ID NO: 686162 - DNA, 605 bp, Homo sapiens
acagtactagtcacatgtggttataatgctgagtaaaatgttatttactttactaagttggtttgcctaacggaagtagtctccctggagatgggatatcaatgcagaactgactcagcaataatctctccctagtcataaaacagccttactttttgttactgtcactaacatgaactaacatgctttggattggttgtatatcagaagctatgatttttgtcgccctattatatacttagttgtttttaccttatgtcatgttatcctggaaaggccgagacttaggtctctaacacagctagtgggagcttgaatttgattttaggtcctgctaaatctaaggcttatgttgtttgtgttataccacagtctgccaataatgctggccaaataagaaacattttgatgaatsgtgtatttgttagtatattacataagatattttccccataagaaaatgaagcataacctcttaggattttaggcttctctagtgtacagtatctatagagcaaaatttaaattgtggtagtgttttatagactaaaaaagaatcagaagcccctccaaatgaataaggactgtgttcccggaccttaccc

SEQ ID NO: 686163 - DNA, 1508 bp, Homo sapiens
  misc_feature 1276, 1277, 1278, 1279, 1280, 1281, 1282, 1283, 1284, 1285,1286, 1287, 1288, 1289, 1290, 1291, 1292, 1293, 1294, 1295,1296, 1297, 1298, 1299, 1300, 1301, 1302, 1303, 1304, 1305,1306, 1307, 1308, 1309, 1310, 1311, 1312, 1313, 1314: n = A,T,C or G
  misc_feature 1315, 1316, 1317, 1318, 1319, 1320, 1321, 1322, 1323, 1324,1325, 1326, 1327, 1328, 1329, 1330, 1331, 1332, 1333, 1334,1335, 1336, 1337, 1338, 1339, 1340, 1341, 1342, 1343, 1344,1345, 1346, 1347, 1348, 1349, 1350, 1351, 1352, 1353: n = A,T,C or G
  misc_feature 1354, 1355, 1356, 1357, 1358, 1359, 1360, 1361, 1362, 1363,1364, 1365, 1366, 1367, 1368, 1369, 1370, 1371, 1372, 1373,1374, 1375: n = A,T,C or G
aatgttaggtagctttgctgaagttttcttctctaaaaaaaaaaaaaaaaaaaaaattgttaaagcaaagaaagaacatagggatgttattttaacaaattatttcccatttcctcatgtgaatacattagtccttatcaatgtattattccttgtcattgaaattatgtaaagggctattgttacatttttttaagaatggcaaattatgccataggactaacccactcaccatgcattttattgctccaaattgttctttctgacaaaattcaaaataaatctttaggtgaaaaatacatattttccttcagtatgattttgtttatagcaaattgaaagaagcatttaatttagctcaaatatttatgtttttattactgacaaccagatgaatatgaaccctcattttaccttaaatagtcttctttcatattcatgccagtgttttttaaaaaaccaaagaaattacaattaaaaaagcatttcctttcaattaaatatcaactttggttccaaagactgaccatttttccaacccattaactttatagggatgacagaactaatgacaggaggttttaaagcctttttttagtccatttttattttgatatgctttagattcactaactcaaagatctgtgataaattctgttaacagagctaatgtaagtatactgaccgaagtgaaatatcgattagatatactttctgtagtggcattgtcttcttgaaaatgtgttagaaattggaaaagaaagaaaatatctcattaaatgaattaacttcggttattcaaaaaaagtttatttagcatctgtgtgggaagtgaaaatgaagaaggaaagcataatcacttcgacagattttctcagaggactttgttttcctttgtaataatggagaaaattgaggatttggggagcaaaatgataggtaaattaaaaagctgtgaaagatttttagttctcatttttttgtgtatccattctccctaaattgtatatccagtgtttattataaaagtttttwaggaaaatattattgtgcatttttagttctagtatacgctagaaataaattttacagcttcgactttaatttgatatcagataacttatcttttggtttgaaataaaaggaaaccattcatttttactgtttagctgacatatgttacattaaaaagaataatagaaaatatattgagtcccaaattatttttttcacattacatctcaaacaaactggtggaatccctctatttttatcnnnnnnnnnnnnnnnnnnnnnnnnnnnnnnnnnnnnnnnnnnnnnnnnnnnnnnnnnnnnnnnnnnnnnnnnnnnnnnnnnnnnnnnnnnnnnnnnnnnnatttagtcgtgcaccaaatgaaaagccataataggacagttgcttatgtataagacatgtgtatgggcctgtatattatatatatttatgtatcgtatatatttatgtgttatatattcttattcttatatat

SEQ ID NO: 686164 - DNA, 768 bp, Homo sapiens
tgaaccagcgtgctagctagctagccaggcagaaacaatagcatgtcttcaacttaagcaaggaattccattttctttttcccaagtgattgttgatttcctggtgatcatgactcaagacaaagcttaatgcaaaaacttcacatttccatgtcaagctgattgttggggtctgtattagtttcctatttctgctctaataaattacctccaacctaatggcttaaaacaacacaaatttatcatctgacacttgttcatcgcatgtctcagtggactaaagtcaaggtgtcacagggctgcatatctttctggaggctctaagggagattctgtttctttgcccattccagcttccagaggcttcytatagttcttggcttgtggtcctttccctgcatcttcatagccagcaacagcagtctgagttcttctcacaacacactactctcacctctcctccctcctctactttgaaggacccttgtgattatattgcacccacaagaataatccataatattcttccttcatttaggttgagctgagtagcaaacttcattccatctgcatcattaatttcctttgccatgtaacctaacgtattcacaggttcctgggattagaatgtggatgactttgggggaagggcattattttaccacagactcatttttactttgactgatattttttttcaacaatcatttccaaaagctacctggggagagtaaacaggaaaacatatcttccagccacgtctattct

SEQ ID NO: 686165 - DNA, 452 bp, Homo sapiens
atayacacacacacatatatgtatatatgtgtgtatatatgggatttttaatacacacacacacacatatatatatagtcctccctaagggaatgaataaatgaataaatgaggctcagtaagagttcagataaattttgattaatagattaagaaatgacattcaagagaaggttaagaatgttgaaggtacagtcctactcttttgagggaaatgtgatgaactgtcaggaagcctgactctaaattagtggcactaagtgacagaatacagggcttgatacacagtacattttttatgttcctataaccaaaggattactttctgcttcctcttccaggttttgttagttgtataggatagtagcattgatcaagtttttgatatctgtagatgggaaatatctcattcatggatataaattattatatttccatagtgttcttgaagc

SEQ ID NO: 686166 - DNA, 452 bp, Homo sapiens
atatacacacacacayatatgtatatatgtgtgtatatatgggatttttaatacacacacacacacatatatatatagtcctccctaagggaatgaataaatgaataaatgaggctcagtaagagttcagataaattttgattaatagattaagaaatgacattcaagagaaggttaagaatgttgaaggtacagtcctactcttttgagggaaatgtgatgaactgtcaggaagcctgactctaaattagtggcactaagtgacagaatacagggcttgatacacagtacattttttatgttcctataaccaaaggattactttctgcttcctcttccaggttttgttagttgtataggatagtagcattgatcaagtttttgatatctgtagatgggaaatatctcattcatggatataaattattatatttccatagtgttcttgaagc

SEQ ID NO: 686167 - DNA, 452 bp, Homo sapiens
atatacacacacacatataygtatatatgtgtgtatatatgggatttttaatacacacacacacacatatatatatagtcctccctaagggaatgaataaatgaataaatgaggctcagtaagagttcagataaattttgattaatagattaagaaatgacattcaagagaaggttaagaatgttgaaggtacagtcctactcttttgagggaaatgtgatgaactgtcaggaagcctgactctaaattagtggcactaagtgacagaatacagggcttgatacacagtacattttttatgttcctataaccaaaggattactttctgcttcctcttccaggttttgttagttgtataggatagtagcattgatcaagtttttgatatctgtagatgggaaatatctcattcatggatataaattattatatttccatagtgttcttgaagc

SEQ ID NO: 686168 - DNA, 666 bp, Homo sapiens
ccgagatcagataagattgagtgcattcagagtggtatggccatagattcctcatttatttctgtgactgaatagtattcattccactaatggctgtcatttaaccagtctcctattgattgtcatctgggatgtttctaatgtattgttgttaaaaatgccttaattaatatgtctgaacatatgtcatttcacatagatggaatatgtataactgaggataagtttttagaagtagaattcctaggtcaaagaatacgttccgttttaattttgatagatactacccaaatactgtctatagattcattgccactttatacttccataagctagcatctactttctacagcctcaccaacacaatattattacacagtctgacccttcccaatctgataggtttttcaaaatgtctttaatttgctgtctttataaattaggttgaataatgttcatatgtaaaagagatattttctaccaactgtagtacgttgccccttttttctatttaattgttggtctttttcatattgacctataggagtgtttcacatattagggaaattatgagttgaaaatatcattcctactttgccatttacttttaactttgttatggtttgtactaygaagattttttttaacatagttaaattattggta

SEQ ID NO: 686169 - DNA, 794 bp, Homo sapiens
aggtgagaagaggaaaagaaatggagatgaagtaggggctggtgtatgctctaacttcctaaaacaataaatagggtattttaattatctgataatggagcacaattgatctgcctctctcgctttcttgacccttcagacatagcattctgtctccatatagattacctaaagatttctttccttcaagccacacgttatcctcatattctagattttagggaaagactacctgctattatccccttagaatgacatcccagaaaagatattaaagctgtttgttttttcctttctactgggaaccaaaggctgtataatgatagccaagaagaatcaaacctcatctgtgcactttccagctgacagatacttctttaaaaataaaatgaacctgacaccctccgtgtacactcacagttcagtttacaaggactcacatttgcgccttcccaacacctgtgccttgaagatggaaaggccacacccttgccataaratccctgatcaataaaagtagaccaggaccccagtctcatccagtgcccatccatttctaattttcttagcttcttattgccagctaggcccttgcccttggacttgatgcctgaaactgctacttaccaggctctcagacctgttgtgttaagcaggcaccgtggcatgccctccagctaacctaaccttgccttcaacacactgctaccctttatgatcatctcttaagctatcccttcccagaaactttggtcacctaagcaagccaaagatgctcaacccagctcttcatg

SEQ ID NO: 686170 - DNA, 794 bp, Homo sapiens
aggtgagaagaggaaaagaaatggagatgaagtaggggctggtgtatgctctaacttcctaaaacaataaatagggtattttaattatctgataatggagcacaattgatctgcctctctcgctttcttgacccttcagacatagcattctgtctccatatagattacctaaagatttctttccttcaagccacacgttatcctcatattctagattttagggaaagactacctgctattatccccttagaatgacatcccagaaaagatattaaagctgtttgttttttcctttctactgggaaccaaaggctgtataatgatagccaagaagaatcaaacctcatctgtgcactttccagctgacagatacttctttaaaaataaaatgaacctgacaccctccgtgtacactcacagttcagtttacaaggactcacatttgcgccttcccaacacctgtgccttgaagatggaaaggccacacccttgccataagatccctgatcaataaaagtagaccaggaccccagtctcatccagtgcccatccatttctaattttcttagcttcttattgccagctaggcccttgcccttggacttgatgcctgaaactgctacttaccaggctctcagacctgttgtgttaagcaggcacygtggcatgccctccagctaacctaaccttgccttcaacacactgctaccctttatgatcatctcttaagctatcccttcccagaaactttggtcacctaagcaagccaaagatgctcaacccagctcttcatg

SEQ ID NO: 686171 - DNA, 794 bp, Homo sapiens
aggtgagaagaggaaaagaaatggagatgaagtaggggctggtgtatgctctaacttcctaaaacaataaatagggtattttaattatctgataatggagcacaattgatctgcctctctcgctttcttgacccttcagacatagcattctgtctccatatagattacctaaagatttctttccttcaagccacacgttatcctcatattctagattttagggaaagactacctgctattatccccttagaatgacatcccagaaaagatattaaagctgtttgttttttcctttctactgggaaccaaaggctgtataatgatagccaagaagaatcaaacctcatctgtgcactttccagctgacagatacttctttaaaaataaaatgaacctgacaccctccgtgtacactcacagttcagtttacaaggactcacatttgcgccttcccaacacctgtgccttgaagatggaaaggccacacccttgccataagatccctgatcaataaaagtagaccaggaccccagtctcatccagtgcccatccatttctaattttcttagcttcttattgccagctaggcccttgcccttggacttgatgcctgaaactgctacttaccaggctctcagacctgttgtgttaagcaggcaccgtggcatgccctccagctaacctaaccttgccttcaacacaytgctaccctttatgatcatctcttaagctatcccttcccagaaactttggtcacctaagcaagccaaagatgctcaacccagctcttcatg

SEQ ID NO: 686172 - DNA, 1349 bp, Homo sapiens
  misc_feature 596, 599, 806, 807, 808, 809, 810, 811, 812, 813, 814, 815,816, 817, 818, 819, 820, 821, 822, 823, 824, 825, 826, 827,828, 829, 830, 831, 832, 833, 834, 835, 836, 837, 838, 839,840, 841, 842, 843, 844, 845, 846, 847, 848, 849, 850: n = A,T,C or G
  misc_feature 851, 852, 853, 854, 855, 856, 857, 858, 859, 860, 861, 862,863, 864, 865, 866, 867, 868, 869, 870, 871, 872, 873, 874,875, 876, 877, 878, 879, 880, 881, 882, 883, 884, 885, 886,887, 888, 889, 890, 891, 892, 893, 894, 895, 896, 897: n = A,T,C or G
  misc_feature 898, 899, 900, 901, 902, 903, 904, 905: n = A,T,C or G
agagcttatgtaatctgaaaattttctcttccttaaatgtttcgtagaatttacttataaagtttttcaggcctagtattgtcattgtgcaaaatttaaaatattgattcagcttctataaatattataagaaaattcatgtttcctatttctatttattcttgagtcaggctttaatcgttgatatctatctttatatctgcctatttaaaaatgttttaaagtacattggcatgaagttggttataaaattctttggttttcttttcaatctctgttatgtttctcttttttgtatttatttttgtttcatctcttttatcttaaaaaatcattagagattgtarttttgtttaaaaaacactcaagatttattgatctatctttgtaatttaataatttctgctcttgtctttattattgccttctgcttttctgagtttattctattttattttccttaagtatagtgtttagatattacttttcagactttcttatttttttaacactcattttaaagctaaatactcaaatcccaactttagcactttggatacgtggtgttttgatatgttttcattcttatttagctntanatatattccagtctttattatgaatccctttacatatgaatttggttttttcttttgttttttgagacaaggtctttgttctgtcgccccaggcttggagagcaagtggcaccaattattagctcactggaagcctcgaaccttccaggctcaagtggatccttccccctaagccttccacaggtagcttgaactataagacctaannnnnnnnnnnnnnnnnnnnnnnnnnnnnnnnnnnnnnnnnnnnnnnnnnnnnnnnnnnnnnnnnnnnnnnnnnnnnnnnnnnnnnnnnnnnnnnnnnnncagtttattgtctctcttcccttaaaactcacagctttaaaatccatgctctcagatcttccatttcctgctgttatcagcagtcacctcccaatccaaggaggtctcatctgctagagccaggcctactctaattcactccagcactattcctgttgtacataatcctttatgatttttcacacactgaagatgactcttccaaataccctgacctcctgagtccttaaacttttctcctcctatgatcttgtcttccaccctcttccatatcagccacccacttccatgagcattcccaagacttcattcaaacaagcattacaccctctctagaatctccctttcaagcttcccactctgtggctaccatctaattctctttagcctttctattccaatagtatttcagccacaccagagcataaaatccattaaatcagt

SEQ ID NO: 686173 - DNA, 1312 bp, Homo sapiens
tgtttaaccaaataaacatgagggtttttccgtgaaaattaaataaaatagggggaaaatatatttttatgattgaaatgtatccttcaccaaattcatatgctgaagtcctaattcccagtatcttagaatagaaccctatttggagattggttctctataaagggaatcaagataaataagatcttgagggtggtccctaatccggtatgactggtgttcttataaaaaggggaaatttgggccaggaatagtggctcatacctgtaaattccagcactttgggaggctgaggcagaaagatcacttgaggccaggagtttaagaccagcagtgaagacatggggagaagatgatcatctacaagccgacacatccttttctcatggtgctcagaaggcaccaactctaccaatgacttgattttggacttccagcctccacaactgtgagacaatgaatttctgttgtttaacacactttgtctgtggtactttgttaatgcagtactagtaaactaagaaacacatcacagacatctttccacaccaataaacatagatctccttttaatgattgcatgtataagagcttttcctccaaacaaagtaggtcttggctttagaacaaaagttccttcaaagcaatctctatcagtttttctcatgtaatttttgctaaaggaaayagtgaagtggaagaaagattttcagaattgtgtaacagaatatgctgtagaagaccaaaaatataccaccccaaaatataattatagaagaccagaatatgcctccctaaaatatgcctctttggcataaggattattttgagaaactacagacaccagaacagctctgaaaacaaagaagttatccttttgtaagggaaatttacatttataaagcaagtctccattctctgaaccaggaagataataaggatgactaaactatagagcctcatcaatggagaaggcacaaacttaaaaatctgcatatcaaaacttactaatgtttacagtacttttcctggatacctccccaaaatctgccttcccctcacccttcttaatctcagaggaagatgacatttatgcctgaagcctgtcacctctttgagagttactcatttctctgagtacctctcatgtatacatgatatgtacatgtgcatgtattaaatttcagtttttctgttgttaatctgtcttttgttacagaggtccatcccaactaagaactgagaaataaaaataaaattctagaacccccaaccaagtaaacagataccactgttagccaaggggacctca

SEQ ID NO: 686174 - DNA, 1257 bp, Homo sapiens
tcaatgctgctctctagcccctccccaaaatgtttcgaatccagatcactatgagtggggctcaggaatctacacttttaacaagattccctaagcgactcttctgcacagtgaagtttgagaaatattgatgtaggggctggactaaggttgtgaagggtcatttcagggcataatcatcagcatttgtgcagttcataaagtttgctttccttcttcctgggcatgtagtttgacaagtgccatttattaagttatatacttaaacataaagaagtaaagaaaattatcgggacaaagttgttgcattgtttctgaagttagacaaaaaaaatttaatgtaagctaaattgaaacaggatgtatctgttgagttttacatgtgattaaatggattttcaaatattttccaaaagtcaagttaagaaaagtcatctctcaaattcctgagtgctctgaactctggtgtttaacctttagatcctcgtactcagttcccaaatccagaggctaaacctgaaatgacaatgccagatgttttcacacacacacacacacacacacacacacgatattttgctcttcttaaaataaacaaggaaatttaggcacacgaggcagaatcggatcccagctattacatagccttgtttgtggagcaaatgaaaaaatcattacatgttttattacccttcagaatctatttacaaccatgtagtcattctgagtttggattttcctttgaaataaaaagccctgtaacaaaaaataaaagagagggatactgtgttggaagactggcgatgaaactataagaaaatcaaaataaattataccattgttattgtttaagattcgttcaatattcacttaaaaaaataggatccaggcaacattctaggcactcaacaacagcagtgaataaaactaaacaatcatccttattcttgtggggtcttattctagttggaaaggagataaatacacaaatatatagaatatcgtgtgttgagagatgctatgaagaaagattaaagcagggttagggagaattgaacaaggtagaggggacacttaaacagaaaggtggcttagtaaacctgggcttgctmtaggctatgcccttatggagaaatcttttgtaagtcagctctttaggtgacaaccaagaggaagcaagttctgctctttaccagtcttctaagagaaagtctccaagttgtggggttgcactctttcccatgccagattattcca

SEQ ID NO: 686175 - DNA, 599 bp, Homo sapiens
ctgagaaaggaaaggggtctagaagagcggttagaaatggggactttggttttcccctcaggcttagctcactactttctataaataagagatgtctgaaagagaagcagataaaaggagaaagccttcagcaaatttgtgagttgataagcatggattgattggctctgttggcctgggttcttgaggagtttgctgctatttcrgaatttctgtagagaaaccctggcattgtcaggatatgggtatgccacatgtttcccttcctcccccttccctccactccttcttattacctagctagctacacctggaattttggttctagaataatttaaaagatactttgtcaagaaaatatctttggaaaaatcatgcatatattatttttccttttttctttttaactacttcctggttctttaggctcctctaattcttacatgcatgtgcttgatctctgggccatgcttgcttctagttaagtagcctttcaggatggtgtttaatttattctgagccctttataatatcccctgacaagagcatggagtggatagagggagtcttagtcaatatgtattataaatagatttagg

SEQ ID NO: 686176 - DNA, 568 bp, Homo sapiens
tgagaacccaccactgcactccagcctgggcaatagagtgagacttcgtctcaaaaaaaaaaaaaaaaaaaaaaaaaggcaaaaggactttggagatgatttgggcaaaactctttgtggtacagatgaggaaactaagtttcagattgagtaagtgagttgtactggctcacatggccacttgcacctagacttaacactctttaatcaaatccatgtctttccaagagtaaattggagaaaatcgctttccaaagatgtgcctcagtttcttgaaatgaaacaagagaaagtctccttttcaagaatgggtattgagtccaaagggcaaaaccagcatcatcgacaacaaaagcttcaaacacttgccaaagcctgcawtaaacaattacccataatttggcaatgcactggccacatacaacatgagcttgatgtctttaagttgggacatgcggtcctgaagttccgtgatggttggcatttccaaggcagctgcctggtgctgagccacgtgctgctcccaggtttctgcaggctccacggagatacgcacaggattgctttc

SEQ ID NO: 686177 - DNA, 647 bp, Homo sapiens
gccaggctggtcttgaactcctgacctcaagtgatccacgtgcctcggcctcccaaagtgctgggattacaagtgtgagtcactgcacctggccaaaacacacattttcaaaatataaagattgattcttttgagtttctgagacttccttcatggcctatgtgttttcaatttttataaactttttcatgtgtcctagaaatgaatgtgtgttctctgtgggatccagagttccatatatatttattaaaccaagcttatacaacatttctggaagcaatttttataccacaactaatttacaactaatttcattttttgaacacggttatggtttaacattcagcttggttcagaattaagtatctttcagttatgtacctcttcaacactcctacaatatgaacgttactatctcctttttgccaaagcaggactagatgttcaaagggtaacttgtccaaattccacagcaattgaaatagttgaaatttgaactttgatctgtttcagtttgttacaacacaaggcttctagcctagaaatctcagctattctttattccacctttyccttcatcttccaatatctattgggacatgggacctttaaattctacaccctaaaatgttccctgatccatctca

SEQ ID NO: 686178 - DNA, 675 bp, Homo sapiens
agagtccatatatttcccagattctttatttcccagtcccttctttatcacttttctccastgtgcctcttcaggctctctattccacatcaggcctacccacttaacctgcttcatcccatctagagattttttaaaaatccatttaattgtaaagttattggatcagcatgtaggttaatctagtcagagctgaccagtctaagtatatatttaaagacttgcaataggcaccactcagaaaagaggaaattccttttcatttatttttgtcttctttaattttttttaattcttaatttttatgggtacataacagttttatgtatttaggagtacatgtgatgtttgatacaagcatacaatatgtaataataaaaccagggtgacttggatattcattacctcaaacacttttcatttcattctgttaggaacattccaaatccactcctgtagttattttgatatctacaaaaaattttctttcagcaatgtttgatagttttcagtgtacaagtctttcacctacttggttaagtttattcctaagtattttattcttttgatgctcttgtaaatggattttttaaaaaatttccattttgaattgctcattgttagtgtataaaaacagaattgatttctgttatgttgattttgtagcctgcagct

SEQ ID NO: 686179 - DNA, 675 bp, Homo sapiens
agagtccatatatttcccagattctttatttcccagtcccttctttatcacttttctccagtgtgcctcttcaggctctctattccacatcaggcctacccacttaacctgcttcatcccatctagagattttttaaaaatccatttaattgtaaagttattggatcagcatgtaggttaatctagtcagagctraccagtctaagtatatatttaaagacttgcaataggcaccactcagaaaagaggaaattccttttcatttatttttgtcttctttaattttttttaattcttaatttttatgggtacataacagttttatgtatttaggagtacatgtgatgtttgatacaagcatacaatatgtaataataaaaccagggtgacttggatattcattacctcaaacacttttcatttcattctgttaggaacattccaaatccactcctgtagttattttgatatctacaaaaaattttctttcagcaatgtttgatagttttcagtgtacaagtctttcacctacttggttaagtttattcctaagtattttattcttttgatgctcttgtaaatggattttttaaaaaatttccattttgaattgctcattgttagtgtataaaaacagaattgatttctgttatgttgattttgtagcctgcagct

SEQ ID NO: 686180 - DNA, 675 bp, Homo sapiens
agagtccatatatttcccagattctttatttcccagtcccttctttatcacttttctccagtgtgcctcttcaggctctctattccacatcaggcctacccacttaacctgcttcatcccatctagagattttttaaaaatccatttaattgtaaagttattggatcagcatgtaggttaatctagtcagagctgaccagtctaagtatatatttaaagacttgcaataggcaccactcagaaaagaggaaattccttttcatttatttttgtcttctttaattttttttaattcttaatttttatgggtacataacagttttatgtatttaggagtacatgtgatgtttgatacaagcatacaatatgtaataataaaaccagggtgacttggatattcattacctcaaacacttttcatttcattctgttaggaacattccaaatccactcctgtagttattttgatatctacaaaaaattttctttcagcaatgtttgatagttttcagtgtacawgtctttcacctacttggttaagtttattcctaagtattttattcttttgatgctcttgtaaatggattttttaaaaaatttccattttgaattgctcattgttagtgtataaaaacagaattgatttctgttatgttgattttgtagcctgcagct

SEQ ID NO: 686181 - DNA, 1242 bp, Homo sapiens
tagaaacatcagatcctgtcctttcaagaataaatactctgtttttagcctgtgttttagcctctggattctcccatggaaggcagtttttaagttggattagtacattaaacgtcttcaaawctaaggactttaaagcactcttataagcacagttatttcatataatggcactcatttgaagtccataggtctaggcaaaattttcaatgtgggtaaataagaagcacagagaagataaccaagattttttttttgtattcatatgttcccttcttgcttttttttttctgattcaagtcagagtttacacagtccatgagtagaaagtgctacctactcagaaataagatggcttcgaactgaagccacaccctggtggcccccaggctgtatttgacatgcagaatgttctttaaaatgagattaattgataacatttaaaaatgatgaatttcagatatgattctggatttctggctcctgaagggaaaagggagggtgggggtggtatgaggctctccttcccatgtgtcctcaatgggctgaagcagaaagtttcctggaggtgaattggacagtgagatgattgagccctcacttcactgactgggctgtatggctcctaccagccccatcatatatttgtagtcagttttttctgtacagtcataggctgcatacaatgttttggccaatgatgaactgtccgtacaatagtggtcccataagatttaatatgctatttttactgcaccttttctatgtaattagatatgctcagacacacaagtaccattgtgttacagttgcctacaagtttgtgacctaggagcaatagattatcctaaatagcctaggtgtgtagtaggctgtaccatatgggtttgtgtcagtacactctatgaggttcacacattaaaattgcccaatgatgcatttctcagaatgtatcctgattactgagcaatgcataactgtatatataatattatattggcaaataatcagctaaatttatttctagccatgtgtaattcctctcttgtttagcatttaaaacaaacccatggccaaggcatcttttttcataggcccagaaaaaaaaatttagtaggaattattttaacatattctattttatattatggaaatatgacattagaattgttttcattatcaaactcttttttctttttgatagttggcagagctagctgagggtttattttggaaaaaaaa

SEQ ID NO: 686182 - DNA, 1242 bp, Homo sapiens
tagaaacatcagatcctgtcctttcaagaataaatactctgtttttagcctgtgttttagcctctggattctcccatggaaggcagtttttaagttggattagtacattaaacgtcttcaaatctaaggactttaaagcactcttataagcacagttatttcatataatggcactcatttgaagtccataggtctaggcaaaattttcaatgtgggtaaataagaagcacagagaagataaccaagattttttttttgtattcatatgttcycttcttgcttttttttttctgattcaagtcagagtttacacagtccatgagtagaaagtgctacctactcagaaataagatggcttcgaactgaagccacaccctggtggcccccaggctgtatttgacatgcagaatgttctttaaaatgagattaattgataacatttaaaaatgatgaatttcagatatgattctggatttctggctcctgaagggaaaagggagggtgggggtggtatgaggctctccttcccatgtgtcctcaatgggctgaagcagaaagtttcctggaggtgaattggacagtgagatgattgagccctcacttcactgactgggctgtatggctcctaccagccccatcatatatttgtagtcagttttttctgtacagtcataggctgcatacaatgttttggccaatgatgaactgtccgtacaatagtggtcccataagatttaatatgctatttttactgcaccttttctatgtaattagatatgctcagacacacaagtaccattgtgttacagttgcctacaagtttgtgacctaggagcaatagattatcctaaatagcctaggtgtgtagtaggctgtaccatatgggtttgtgtcagtacactctatgaggttcacacattaaaattgcccaatgatgcatttctcagaatgtatcctgattactgagcaatgcataactgtatatataatattatattggcaaataatcagctaaatttatttctagccatgtgtaattcctctcttgtttagcatttaaaacaaacccatggccaaggcatcttttttcataggcccagaaaaaaaaatttagtaggaattattttaacatattctattttatattatggaaatatgacattagaattgttttcattatcaaactcttttttctttttgatagttggcagagctagctgagggtttattttggaaaaaaaa

SEQ ID NO: 686183 - DNA, 625 bp, Homo sapiens
acttttaaaatatcaaatttcaaatgtttctgattgccctactagtattcaaaatttatacaaaggatataatttgaaatcatctttaggtataccagtattctaggaagtcaaataaataacttcaaaatatgtgtattattgggtatacttattccttactcgttgaagaagtttatctctgtagtgttctacttgctcctgaaaactctggcctggttttttaggtcttttcccagattccaattcatcctgaaacttcataactttgagctgtgaaataaaatattttaaaaataagcattttcatcattctagattctcaagcactgttttgcttcttttctatagcaaagtagtaactaattagtactcagtcaaaatataacctcacctgaaggccacttgtcagacaagtccaactaggcaaaaatcagctgaccagatgggaaccctctctggtcatgagaggactcaaaaaccgtgaaccgtgcttcatggctgtaagaactcacttattctctcaacacaattataacaaatttggtatctggttccccaaattagaaaagcaaggttgctaaagacacgcacrctgccagcatgatatgacagtcagaatgca

SEQ ID NO: 686184 - DNA, 1249 bp, Homo sapiens
ccacagaaggaataaggtcagctattgtgggacatgctctgaggaactgctggaagtagatctatgtagaatgctttgcagaatacaggtttggggaatgggaggctagacaaagacacagaaattgggcaaaataaagataaacacacatatctgaaagagctcatagtattttggctcacataaatgggcaaacaccactttgttagactctttccaggctctatacttaattgaatctttggtgttttcttttaataaaatatgcccctgcatccatacttctgatttttagccagaatcatatagtctagtatgattttagactgttttttttcccaaaggaaactcatcataaaagttattttacaaaaatttccatcaccrtattatctttgtggtaaccctaatttctctaacaaagctttcagtattatttacgcacattaagatgtgagtgacccgaagtgatagttccctgaggtatattttcatctcataagaggaaacacaacaataatttaaccaaagatataggctgctagtggcagaattcaaagtgtcaactattgatcaatggggagatatttttatagcccggatcctttcatgatactcatcaattctcactacttaagtttatcttactagcatgtaagaatagcttagcccatacataaagcaaaagatacaagcatgtatttatgctaaaatgtctgggatatgaattttgagaaaaccatgaaacatcagctcaatatatatttgattcaaatattagctgaatattctgcttaactctcagttacttcctctgtgcttcaactttcccacttcagtgatgtctctgtaggtacagtgttgacccaagttatacttacagaacatactaactcagttaagtaataccagacctgtcctgtgtcatctactttatctctagttatgggaaaggtgtatatcctacattaatatgttttccagcaaattgaagtttaatttgtaaatgagaactattcattataacaattttaatgtcaattttaggaactatacagtgcaccccctgcattcttagagtacaataattgctattcagtgtttaatgatcaatgacctagaccatcagtataagtaagaattgtactctgagatactgtacaaataatttcaggtcttacattatttgaatgtgtttccaggtggccatttagtaactgtgcaattacctgtgtatattaacataatg

SEQ ID NO: 686185 - DNA, 1249 bp, Homo sapiens
ccacagaaggaataaggtcagctattgtgggacatgctctgaggaactgctggaagtagatctatgtagaatgctttgcagaatacaggtttggggaatgggaggctagacaaagacacagaaattgggcaaaataaagataaacacacatatctgaaagagctcatagtattttggctcacataaatgggcaaacaccactttgttagactctttccaggctctatacttaattgaatctttggtgttttcttttaataaaatatgcccctgcatccatacttctgatttttagccagaatcatatagtctagtatgattttagactgttttttttcccaaaggaaactcatcataaaagttattttacaaaaatttccatcaccgtattatctttgtggtaaccctaatttctctaacaaagctttcagtattatttacgcacattaagatgtgagtgacccgaagtgatagttccctgaggtatattttcatctcataagaggaaacacaacaataatttaaccaaagatataggctgctagtggcagaattcaaagtgtcaactattgatcaatggggagatatttttatagcccggatcctttcatgatactcatcaattctcactacttaagtttatcttactagcatgtaagaatagcttagcccatacataaagcaaaagatacaagcatgtatttatgctaaaatgtctgggatatgaattttgagaaaaccatgaaacatcagctcaatatatatttgattcaaatattagctgaatattctgcttaactctcagttacttcctctgtgcttcaactttcccacttcagtgatgtctctgtaggtacagtgttgacccaagttatacttacagaacatactaactcagttaagtaataccrgacctgtcctgtgtcatctactttatctctagttatgggaaaggtgtatatcctacattaatatgttttccagcaaattgaagtttaatttgtaaatgagaactattcattataacaattttaatgtcaattttaggaactatacagtgcaccccctgcattcttagagtacaataattgctattcagtgtttaatgatcaatgacctagaccatcagtataagtaagaattgtactctgagatactgtacaaataatttcaggtcttacattatttgaatgtgtttccaggtggccatttagtaactgtgcaattacctgtgtatattaacataatg

SEQ ID NO: 686186 - DNA, 1311 bp, Homo sapiens
ttggcttcactttcatcatagagagtctcacagggggcaaaacctttactctgccatcttgataagatccctggggtccctctgtgggtctccctaggattttccacgtgtacaagagatgaaaaggtttttaagatctaagaaacaaagcaatctattatttatcttgaaaatcatattatgtcttgtgttgtataggcacagtaggcataktaatgtgcagtctatcaaagacacaagaacaaagatgttaaattgatatcatatagcacctagcaggaaagaatcatttctacttggaaggtagggagatgaaagtgggaagttagagaggacaaacatgtggaaggcaaatcatagccctctctacaccacaggaatgtttacacatcagaccaagcactctcgtgttgagctcagatgcagctcaggatccttctcaacacagtccactgggaagccattgtcaatctcaagttgccatgccagaggaaaattttattcatttctgatgtcttgggtgatttgtatccaatgcagggataattatgggctgatccaagaggccactctagagatattccctattaaaccctgtatttaaaaaatctaataagatgggaggtgttcttgtaattatttcatcatcgtagtatgccatgttttctgttgcagtggagttttcatgacagctcagtgttagtattttatcccgttaattgcaagtttactgcattgtcagctagtttatttcattaatagctgttttatctcattagtagtaggctcccatctgctttgaagcctttgactaagatctctgtgttgtctctcctgactttcagtagtgcatccctgacctctcctctccagagtttctaaattttgaataagctctaatttgcctcaaatctttcatacctgaaatacaaagagtggtttctgtttctctgtctgaactccaggcaaaaaagagatgttatattttatagtcaaagcagtgcaaatgtttttctattttgagctctaaatatagtagctttttcatccacatgttcctttctctgtgtccctaagcaggaaatttcatgctgtttatatattatgctaaacactagttgtttcacctgtgtttagttatatccacaaaggaaggttttttatctctttgagagttgaagactaggcagtattcctattttccttctgacattgtggctttaaaaatttttgaacagccaattgagagaaaaccacaacttatttcaaattagtgctataaaatatttctgtcattcaagttaatgatag

SEQ ID NO: 686187 - DNA, 906 bp, Homo sapiens
caaagtttcccctattagctgtactgtctcagtaacagagttttgaattgcaacttaatttctcctaatattgtgtcctacagttttgatacctaatagttgcatggatatctgctatcattctttggttgctttagttgtgaggactgttacattctctaaaaattctgttttagccyccaaatgcttagagccagaggagtgggatgaatttgctaacccataatcacagttagtatattgatagccactggaagattttgttgctgtttatggccacacaaatcagtctcaggctggattgtttgggctttgtttgaatttgctacttaactttgaactctaggttttgaaaatttccactcagttgcaggcatataaccttaggaaattggattctcaagagatagctgaagatagtgttgagcatgccgtttagatacaaaataggactaaagagcctcatcctgctgaaattatttaccattggagcctctgaatataaatgtactcctaaaggcagtgaagcttcaggaagccatatgaaggtgaataagaaaagatttctattattatacatatgggacgctgagaaagagatgagaaaagaaccacaaggaaaacataaaatggatgtaagatcgacattgcattttgaatatatgaagatattgtcagaggaaaattctattttcacgtacgataattctatgcaacacacataaaccaacaaattcttattcaaaagcctaatccaggtttaagaagtgggaaaacaatctttgcattttgaatctgtccttgtagtgagaaagagctgaattatgatttgaactcttactgatagataggaactcagaaactgcacagaacatttgaagtatgtatttgataaaaattcagtga

SEQ ID NO: 686188 - DNA, 906 bp, Homo sapiens
caaagtttcccctattagctgtactgtctcagtaacagagttttgaattgcaacttaatttctcctaatattgtgtcctacagttttgatacctaatagttgcatggatatctgctatcattctttggttgctttagttgtgaggactgttacattctctaaaaattctgttttagcctccaaatgcttagagccagaggagtgggatgamtttgctaacccataatcacagttagtatattgatagccactggaagattttgttgctgtttatggccacacaaatcagtctcaggctggattgtttgggctttgtttgaatttgctacttaactttgaactctaggttttgaaaatttccactcagttgcaggcatataaccttaggaaattggattctcaagagatagctgaagatagtgttgagcatgccgtttagatacaaaataggactaaagagcctcatcctgctgaaattatttaccattggagcctctgaatataaatgtactcctaaaggcagtgaagcttcaggaagccatatgaaggtgaataagaaaagatttctattattatacatatgggacgctgagaaagagatgagaaaagaaccacaaggaaaacataaaatggatgtaagatcgacattgcattttgaatatatgaagatattgtcagaggaaaattctattttcacgtacgataattctatgcaacacacataaaccaacaaattcttattcaaaagcctaatccaggtttaagaagtgggaaaacaatctttgcattttgaatctgtccttgtagtgagaaagagctgaattatgatttgaactcttactgatagataggaactcagaaactgcacagaacatttgaagtatgtatttgataaaaattcagtga

SEQ ID NO: 686189 - DNA, 906 bp, Homo sapiens
caaagtttcccctattagctgtactgtctcagtaacagagttttgaattgcaacttaatttctcctaatattgtgtcctacagttttgatacctaatagttgcatggatatctgctatcattctttggttgctttagttgtgaggactgttacattctctaaaaattctgttttagcctccaaatgcttagagccagaggagtgggatgaatttgctaacccataatcacagttagtatattgatagccactggaagattttgttgctgtttatggccacacaaatcagtctcaggctggattgtttgggctttgtttgaatttgctacttaactttgaactctaggttttgaaaatttccactcagttgcaggcatataaccttaggaaattggattctcaagagatagctgaagatagtgttgagcatgccgtttagatacaaaataggactaaagagcctcatcctgctgaaattatttaccattggagcctctgaatataaatgtactcctaaaggcagtgaagcttcaggaagccatatgaaggtgaataagaaaagatttctattattatacatatgggaygctgagaaagagatgagaaaagaaccacaaggaaaacataaaatggatgtaagatcgacattgcattttgaatatatgaagatattgtcagaggaaaattctattttcacgtacgataattctatgcaacacacataaaccaacaaattcttattcaaaagcctaatccaggtttaagaagtgggaaaacaatctttgcattttgaatctgtccttgtagtgagaaagagctgaattatgatttgaactcttactgatagataggaactcagaaactgcacagaacatttgaagtatgtatttgataaaaattcagtga

SEQ ID NO: 686190 - DNA, 906 bp, Homo sapiens
caaagtttcccctattagctgtactgtctcagtaacagagttttgaattgcaacttaatttctcctaatattgtgtcctacagttttgatacctaatagttgcatggatatctgctatcattctttggttgctttagttgtgaggactgttacattctctaaaaattctgttttagcctccaaatgcttagagccagaggagtgggatgaatttgctaacccataatcacagttagtatattgatagccactggaagattttgttgctgtttatggccacacaaatcagtctcaggctggattgtttgggctttgtttgaatttgctacttaactttgaactctaggttttgaaaatttccactcagttgcaggcatataaccttaggaaattggattctcaagagatagctgaagatagtgttgagcatgccgtttagatacaaaataggactaaagagcctcatcctgctgaaattatttaccattggagcctctgaatataaatgtactcctaaaggcagtgaagcttcaggaagccatatgaaggtgaataagaaaagatttctattattatacatatgggacgctgagaaagagatgagaaaagaaccacaaggaaaacataaaatggatgtaagatcgacattgcattttgaatatatgaagatattgtcagaggaaaattctattttcacgtacgataattctatgcaacacacataaaccaacaaattcttattcaaaagcctaatccaggtttaagaagtgggaaaacaatctttgcattttgaatctgtccttgtagtgagaaagasctgaattatgatttgaactcttactgatagataggaactcagaaactgcacagaacatttgaagtatgtatttgataaaaattcagtga

SEQ ID NO: 686191 - DNA, 726 bp, Homo sapiens
ccaaatatctttttattttattttatttttgagacagagtctcgctctgtggcccaggctggagtgcagtggtgcgatctcggctcactgcaagctccaactcccaggttcatgccattctcctgcctcagcctccccagtagctgggactacaggcgcccgccaccatgcctggctaattttttgtattttttagtagagacggggtttcatcgtgttagccaggatggtctccatctcctgacctcatgatctgtccgccttggcctcccagagtgctgggattacaggcgtgagccaccgtgcccagccaagtctaaatgtctttaccagacattctagcacttctttcagggtcttcatcaaccctgttcgtggcttcttgccctctgggttttaagaacatggctggttaagcccccattcyttttcacaatttcgctacctttctaatgtggttaactacaactcatcattcaaggctcaattagaaccctctacacaggtttataacttttggtaaattcttcaataaatacattgtttctattctgaagtactcaccacacttaaaattgttttcaatcagcatgacttactattctacaaactctattagggcaaggatgttacctgcctagttcctaccagaacctgagctccttgcacggtgctgcctagcagttagtagctgctagataagcattgtcaaacaaattatttccc

SEQ ID NO: 686192 - DNA, 726 bp, Homo sapiens
ccaaatatctttttattttattttatttttgagacagagtctcgctctgtggcccaggctggagtgcagtggtgcgatctcggctcactgcaagctccaactcccaggttcatgccattctcctgcctcagcctccccagtagctgggactacaggcgcccgccaccatgcctggctaattttttgtattttttagtagagacggggtttcatcgtgttagccaggatggtctccatctcctgacctcatgatctgtccgccttggcctcccagagtgctgggattacaggcgtgagccaccgtgcccagccaagtctaaatgtctttaccagacattctagcacttctttcagggtcttcatcaaccctgttcgtggcttcttgccctctgggttttaagaacatggctggttaagcccccattctytttcacaatttcgctacctttctaatgtggttaactacaactcatcattcaaggctcaattagaaccctctacacaggtttataacttttggtaaattcttcaataaatacattgtttctattctgaagtactcaccacacttaaaattgttttcaatcagcatgacttactattctacaaactctattagggcaaggatgttacctgcctagttcctaccagaacctgagctccttgcacggtgctgcctagcagttagtagctgctagataagcattgtcaaacaaattatttccc

SEQ ID NO: 686193 - DNA, 726 bp, Homo sapiens
ccaaatatctttttattttattttatttttgagacagagtctcgctctgtggcccaggctggagtgcagtggtgcgatctcggctcactgcaagctccaactcccaggttcatgccattctcctgcctcagcctccccagtagctgggactacaggcgcccgccaccatgcctggctaattttttgtattttttagtagagacggggtttcatcgtgttagccaggatggtctccatctcctgacctcatgatctgtccgccttggcctcccagagtgctgggattacaggcgtgagccaccgtgcccagccaagtctaaatgtctttaccagacattctagcacttctttcagggtcttcatcaaccctgttcgtggcttcttgccctctgggttttaagaacatggctggttaagcccccattcttyttcacaatttcgctacctttctaatgtggttaactacaactcatcattcaaggctcaattagaaccctctacacaggtttataacttttggtaaattcttcaataaatacattgtttctattctgaagtactcaccacacttaaaattgttttcaatcagcatgacttactattctacaaactctattagggcaaggatgttacctgcctagttcctaccagaacctgagctccttgcacggtgctgcctagcagttagtagctgctagataagcattgtcaaacaaattatttccc

SEQ ID NO: 686194 - DNA, 650 bp, Homo sapiens
tgggttcatatccaaaaaaattattgcccagaccagcgatacagagttctctaccatgttttcttccagcacctttattcgttaatcctttattcccttaatttctatgtactgacaccatacctgagcaacaataaaataatagcatgcttcacttcatactgstcctccaccaaataagctgattatattatttctattttttctttcagtacttacctttacacttcaaagtatattatcagctttaaataatttaaagtcctaacattaaaagagcaagaaagaatacttatgtcacctcatgtcttctcacttccaacttgttataacatttctgaaaccatagtttgcacagttgattttattgtaatcctatagcaaattattttactgtagcttctccatttctcttgtttggacactatgctcttatggtttctccacaaaatactcatgaaaaatagtccctaatttttccatgtttagaaatgcttatgtattgcagttatacatgttagtttgatgtgttcccctgctaaaatgtactctatttaataaagacaggaatattttacatttttctcactgatgtatctcccagtaccaagaacagtacctggcacatagttgttacactgaaaatagtt

SEQ ID NO: 686195 - DNA, 597 bp, Homo sapiens
ggttctgtgagcagggatgacgggggcgttattcctgccaccagtcctcaggtgagggagctgggattcagggaggataagtgggcttcccaagacaccaggcactggaagctgagatgtgaacctgcctgcctgttctccttgcctaagcctgttctgtcatcctgagccctctctctgtgcatctcaaatttatatcattttcttgatcagaggggacagaggggtaaccagagacaggtggagattcactcaaagtcactctgctttaagctgcagagctgcaactagaacccagacctcagccctctccaggctcccaccatgcctgcaggcggggccagtatacccaactctcacccacctccccacgatcactggcatgaggtctgcccagggtgggcgtggccttggcctgagaggctggtgcagcaccgaggactggagggaggaggagggatctgggcaccaagacggggcctcctcagggtgcygtggggcatcccttggtgctggccactggccttgctctgcagtgcctctgttgaggtgaggagcccagagacagcctgcctctgcctgggctccactggggca

SEQ ID NO: 686196 - DNA, 607 bp, Homo sapiens
tacatggagagagaaggtgtggagagacaggagggggaagggagggagtagggagaatgaaaaaaataggatcaggtagccccctagtctcttccaactataaatgtttgcattgaaccttatctaaaagatgactagtggtcgtgtttgcatgccagcactgactttgggggcatgagcaaggatgagattagagaaygaacctttgggcttatctttacaaagtaaaagaaataaattaattaagtgcttagtgagcatctttagtgaatactatatccaggctgcatccccaatcccagttatttcagtctcctaaaattttaattttgtatactctctattcaattcagcaaaaatcacccttgtcccataaagcaatgatcagatagctgcagtaattttttctttctttctttctttttttttttttttttgagatgagtctcactctgtctcccaggctggagtgcagcagcaagacctcagctcactgcaacctctgcctcccgggttcaagtgattcttgtgcctcagcctcccgagaagctaggattacaggcgcacgccaccataccctgctaatttttctatttttagtagagac

SEQ ID NO: 686197 - DNA, 607 bp, Homo sapiens
tacatggagagagaaggtgtggagagacaggagggggaagggagggagtagggagaatgaaaaaaataggatcaggtagccccctagtctcttccaactataaatgtttgcattgaaccttatctaaaagatgactagtggtcgtgtttgcatgccagcactgactttgggggcatgagcaaggatgagattagagaatgaacctttgggcttatctttacaaagtaaaagaaataaattaattaagtgcttagtgagcatctttagtgaatactatatccaggctgcatccccaatcccagttatttcagtctcctaaaattttaattttgtatactctytattcaattcagcaaaaatcacccttgtcccataaagcaatgatcagatagctgcagtaattttttctttctttctttctttttttttttttttttgagatgagtctcactctgtctcccaggctggagtgcagcagcaagacctcagctcactgcaacctctgcctcccgggttcaagtgattcttgtgcctcagcctcccgagaagctaggattacaggcgcacgccaccataccctgctaatttttctatttttagtagagac

SEQ ID NO: 686198 - DNA, 624 bp, Homo sapiens
ggctaaccctcatttccaaggcctccatctctttatattgtatctttatggattaaaagttaatgcagtttctcagtgcctgcatcaccaacaaatcacatacagtgagttgaagctggatttgtgggaacaattactgttggttgtatttattatataaatacatttgatgattcccaacagttctggagagacatggtcktaataattcaggaaaatattgggaatgcattctctaaaaacacagctaatcaatacaatatagagactaataacaaaatgaataactttttaaaaattatttccattttaattctttgttaaactgggaaaacgcacatctatgcagatcaacaactgtaaatgattttaaattgtgcaatgtggaagtgaacgttgctgagtttgcccaggacaaactgtgctgacatatgggaaatttagtttatttcagtttttacagaaaagtatcttcacagtctaaagtactggtaaaaaaaaaaaaaaaaaaaaaaagaaaaagaaaaaagaaaaaggtgactcaggaatcaacacctatatgtgataagtaggagtctcatttttactcccctactcaactttctctctgttagatgtgataat

SEQ ID NO: 686199 - DNA, 624 bp, Homo sapiens
ggctaaccctcatttccaaggcctccatctctttatattgtatctttatggattaaaagttaatgcagtttctcagtgcctgcatcaccaacaaatcacatacagtgagttgaagctggatttgtgggaacaattactgttggttgtatttattatataaatacatttgatgattcccaacagttctggagagacatggtcttaataattcaggaaaatattgggaatgcattctctaaaaacacagctaatcaatacaatatagagactaataacaaaatgaataactttttaaaaattatttccattttaattctttgttaaactgggaaaacgcacatctatgcagatcaacaactgtaaatgattttaaattgtgcaatgtggaagtgaacgttgctgagtttgcccaggacaaactgtgctgacatatgggaaatttagtttatttcagtttttacagaaaagtatcttcacagtctaaagtactggtaaaaaaaaaaaaaaaaaaaaaaaraaaaagaaaaaagaaaaaggtgactcaggaatcaacacctatatgtgataagtaggagtctcatttttactcccctactcaactttctctctgttagatgtgataat

SEQ ID NO: 686200 - DNA, 669 bp, Homo sapiens
tttttccccttaaatgacacaggaaagctggagaggaagaaaagtgtagaggattctacttcacaaacttaaacaaaatccatctactggagagtgagcatttgtaatggaagacagaggctttacaatgggtgccaccgttctctaagccctgccagagtcttgagggcatctttcttatatcctcactgagaacctggcagggtttctggaggtaaatcccacaaaagtgtggggcttctttaaggttgtggctctgtagacttcagagtctccacattgagcctctagcaattatcaatattgccatttaagtccatatctaagatgttacttatracacagtttataagatacagaaagaaataattcattcaattaacaaacaataagacaaaacaaactaaaaaaaaagctggaatgaattattgttggaattaaaatgaaaatcaaatattttatgatgatcttttaaggccatgtatgctttaaccatattccatttcacccctctcctaatgagcctgctacaaccataaaagtcacaaagtttttggatatgttatttcctctggctgaaattctctcatttctcataggcctctcttgttttgttctttcaatctcaccttatacagttctggttagagacattttttttcttaatca

SEQ ID NO: 686201 - DNA, 669 bp, Homo sapiens
tttttccccttaaatgacacaggaaagctggagaggaagaaaagtgtagaggattctacttcacaaacttaaacaaaatccatctactggagagtgagcatttgtaatggaagacagaggctttacaatgggtgccaccgttctctaagccctgccagagtcttgagggcatctttcttatatcctcactgagaacctggcagggtttctggaggtaaatcccacaaaagtgtggggcttctttaaggttgtggctctgtagacttcagagtctccacattgagcctctagcaattatcaatattgccatttaagtccatatctaagatgttacttatgacacagtttataagatacagaaagaaataattcattcaattaacaaacaataagacaaaacaaactaaaaaaaaasctggaatgaattattgttggaattaaaatgaaaatcaaatattttatgatgatcttttaaggccatgtatgctttaaccatattccatttcacccctctcctaatgagcctgctacaaccataaaagtcacaaagtttttggatatgttatttcctctggctgaaattctctcatttctcataggcctctcttgttttgttctttcaatctcaccttatacagttctggttagagacattttttttcttaatca

SEQ ID NO: 686202 - DNA, 669 bp, Homo sapiens
tttttccccttaaatgacacaggaaagctggagaggaagaaaagtgtagaggattctacttcacaaacttaaacaaaatccatctactggagagtgagcatttgtaatggaagacagaggctttacaatgggtgccaccgttctctaagccctgccagagtcttgagggcatctttcttatatcctcactgagaacctggcagggtttctggaggtaaatcccacaaaagtgtggggcttctttaaggttgtggctctgtagacttcagagtctccacattgagcctctagcaattatcaatattgccatttaagtccatatctaagatgttacttatgacacagtttataagatacagaaagaaataattcattcaattaacaaacaataagacaaaacaaactaaaaaaaaagctggaatgaattattgttggaattaaaatgaaaatcaaatattttatgatgatcttttaaggccatgtatgcttyaaccatattccatttcacccctctcctaatgagcctgctacaaccataaaagtcacaaagtttttggatatgttatttcctctggctgaaattctctcatttctcataggcctctcttgttttgttctttcaatctcaccttatacagttctggttagagacattttttttcttaatca

SEQ ID NO: 686203 - DNA, 669 bp, Homo sapiens
tttttccccttaaatgacacaggaaagctggagaggaagaaaagtgtagaggattctacttcacaaacttaaacaaaatccatctactggagagtgagcatttgtaatggaagacagaggctttacaatgggtgccaccgttctctaagccctgccagagtcttgagggcatctttcttatatcctcactgagaacctggcagggtttctggaggtaaatcccacaaaagtgtggggcttctttaaggttgtggctctgtagacttcagagtctccacattgagcctctagcaattatcaatattgccatttaagtccatatctaagatgttacttatgacacagtttataagatacagaaagaaataattcattcaattaacaaacaataagacaaaacaaactaaaaaaaaagctggaatgaattattgttggaattaaaatgaaaatcaaatattttatgatgatcttttaaggccatgtatgctttaaccatattccatttcacccctctcctaatgagcctgctacaaccataraagtcacaaagtttttggatatgttatttcctctggctgaaattctctcatttctcataggcctctcttgttttgttctttcaatctcaccttatacagttctggttagagacattttttttcttaatca

SEQ ID NO: 686204 - DNA, 653 bp, Homo sapiens
acaaatttggtgcatgtttttctaatattgagttctaacactttttttactgtaatttttttaacgtaagtattatataggttacaccatacgtaaatgcccacagtcaaccatttttaatccagaaaaaaacttcattttacttgaaccaaactaacctttgagcagtgctaaaactacgacaaacaggagcataatatttactactcagagataaataatattttggtgaggtggatatttattgatgtttttactttatctgatgatttgttggataaattttacaaagaaatcctgagatcaattggaatgaaggtgtttgaagactcttaatacacattataaaagtagtttctcagaaagtttacattcataccttacgtatataccataaattcatcagttttgatttttcattttagagttcaagcatgctaaatatggctacttatgcattttaatgtgtatatacattatcaagccttattgtttgcttattggccgcatttttagagtttgcttatgaatttgtatgttttttcacattaaaatgaagctaagacwttttaaatattttcaggctttgtcattgaattttgttaaggtgattttaatacacatttttaattatatctttttaaaagtaatca

SEQ ID NO: 686205 - DNA, 671 bp, Homo sapiens
ttttctgaaaaattatgaggttcatgacccccctgagaagcccaccttggaaatgaagatgtctattgtgagaggaaatggtctcatatctcaggtaatgcaaaaaattatattcatttgtagtcagggcatggaaacatttctgtaaatcattcaaacttttcatcttacacttttaatcctgatttatacttttattactaaaatatcccttagtccatctaaatattgactatgytctgtgagagagaagtaacagttataaccatgaggaataaaataattctttttgggtctctcttttcatactgtctattttgtcagtacctgtctttctaaaattctgtttaatctgctgaatggttcccttgtctttcaacctactattattctctgatgtcgttttctccatcttttgggcaatatttgaaaaattcctataatcattcattctctgattcctttagttagttctattcagtcagcaaaatttcaaagtgcagtgaaattaaaaattacaagcactgccaaattccaaacttactgacctcgccaaatggacttgagaaaatgttctccaatataaactttaattttttcctattggttaaaaattctttccaaaggatgtcagaaagtaataaagagggaaacatttttaggtctaacta

SEQ ID NO: 686206 - DNA, 655 bp, Homo sapiens
tttttttccccaaaccaatgctggcatcactgtttaaggaattggaataaagagctgtggattccaggttgccaataactttcttcatgaagtctagctgattacatggaaagccaggagcaaggtttattgggagaaagaaagaataaagagtttaaaatttggttaggaagaaaagagaaatatatgaaaatatagttagttaacatggcatatgataagggcaaattagtcttgcattattctcagtttatttacattggactggggaagactcatcattragtttggttttgaaataactctgatttgaaacaaatgagacattttagtagaattctgaattgtttaaaaaatatttggcctaactcctgggagatagattatatattttttcaaatgttcttctcaaaagcacagtctattatatcttgttagtaaatattagatgaaagtttgaaagggataatgatgaatcagccttcgggtttggtttcctcatgtgtgaaatgtggttagcaactagatgatttacaccatctctcttactcttagctccatgagtttaatatggagctgtacataagacagaaaagcaaaattaagaggatcttcaaaataatattagatttaaaaatccattttgtcttttggg

SEQ ID NO: 686207 - DNA, 1196 bp, Homo sapiens
aatggcattccattaaaaagataatgctagtccagaaatactgagataatggaagcaattgcctagaaggcttattttcccttcttttagcttcattaatcagaaaaggagaatgaagcctggactgaggactacagttcatagtaagaggaagaatcttatttttccatctttaatttctatgatagtccaaatctatattaaaaacaccgagaacattcaaaatgttcatgaagtattttaagcaacaataatagcgcaatatagtacactatgtatagagaaaagaaagagaatagcttatcaccaactttatgaaacttactgactctaagtagagaacgagccrgtcaggtttcaagtttttcttaaatgtcaatattctaaaaaagaaagctgattcttggggagtctaaggaaataaatgattcttcaagcatttgcatattttgtgactaaaatcataggcaacttgttcctcacaacatgaaactaattttacatgtgtctacttaatgaaatatgttttttggaaataatcttatttatttccctgtatcccatgaagccaaatctctcctcaaatcaatctcttcctttctctcctttttagtgtaacagacatttgttgtttttgctattgggacctgggtagttaaaaaatttgattatcaactcaaaatttccaaggtacgtattttcttatgggaagtgatggatagatgtcataaaatgcaatgctaatgtcatgagacattaaaaacaataagcgtccagaactttaatcgctaactgaataaggcttccatcaaagtagtcacctttggagacgagatgcttggatgatcatgcccctgctctaaacaattttggaacttttcttttggaaagaactttggagtaaggaatgggcaatgccaaaaattatttcaagattgtaccgactaactatcttttgtacgagaagacatgttacccagcataatcacccacatgcagacttgacttctttatccgtcagggttcaagcaagaaatatattgctcacttacataatgtgagtgtgtgtgtgtgtgtgtgtgtgtgtgtttaattgaggaccttttaacaaaggtctatttataaaagatgtggaagggataatgggaaaccaataagggatgggggagcctttatttttcctaggtttggattgg

SEQ ID NO: 686208 - DNA, 1196 bp, Homo sapiens
aatggcattccattaaaaagataatgctagtccagaaatactgagataatggaagcaattgcctagaaggcttattttcccttcttttagcttcattaatcagaaaaggagaatgaagcctggactgaggactacagttcatagtaagaggaagaatcttatttttccatctttaatttctatgatagtccaaatctatattaaaaacaccgagaacattcaaaatgttcatgaagtattttaagcaacaataatagcgcaatatagtacactatgtatagagaaaagaaagagaatagcttatcaccaactttatgaaacttactgactctaagtagagaacgagccggtcaggtttcaagtttttcttaaatgtcaatattctaaaaaagaaagctgattcttggggagtctaaggaaataaatgattcttcaagyatttgcatattttgtgactaaaatcataggcaacttgttcctcacaacatgaaactaattttacatgtgtctacttaatgaaatatgttttttggaaataatcttatttatttccctgtatcccatgaagccaaatctctcctcaaatcaatctcttcctttctctcctttttagtgtaacagacatttgttgtttttgctattgggacctgggtagttaaaaaatttgattatcaactcaaaatttccaaggtacgtattttcttatgggaagtgatggatagatgtcataaaatgcaatgctaatgtcatgagacattaaaaacaataagcgtccagaactttaatcgctaactgaataaggcttccatcaaagtagtcacctttggagacgagatgcttggatgatcatgcccctgctctaaacaattttggaacttttcttttggaaagaactttggagtaaggaatgggcaatgccaaaaattatttcaagattgtaccgactaactatcttttgtacgagaagacatgttacccagcataatcacccacatgcagacttgacttctttatccgtcagggttcaagcaagaaatatattgctcacttacataatgtgagtgtgtgtgtgtgtgtgtgtgtgtgtgtttaattgaggaccttttaacaaaggtctatttataaaagatgtggaagggataatgggaaaccaataagggatgggggagcctttatttttcctaggtttggattgg

SEQ ID NO: 686209 - DNA, 1196 bp, Homo sapiens
aatggcattccattaaaaagataatgctagtccagaaatactgagataatggaagcaattgcctagaaggcttattttcccttcttttagcttcattaatcagaaaaggagaatgaagcctggactgaggactacagttcatagtaagaggaagaatcttatttttccatctttaatttctatgatagtccaaatctatattaaaaacaccgagaacattcaaaatgttcatgaagtattttaagcaacaataatagcgcaatatagtacactatgtatagagaaaagaaagagaatagcttatcaccaactttatgaaacttactgactctaagtagagaacgagccggtcaggtttcaagtttttcttaaatgtcaatattctaaaaaagaaagctgattcttggggagtctaaggaaataaatgattcttcaagcatttgcatattttgtgactaaaatcataggcaacttgttcctcacaacatgaaactaattttacatgtgtctacttaatgaaatatgttttttggaaataatcttakttatttccctgtatcccatgaagccaaatctctcctcaaatcaatctcttcctttctctcctttttagtgtaacagacatttgttgtttttgctattgggacctgggtagttaaaaaatttgattatcaactcaaaatttccaaggtacgtattttcttatgggaagtgatggatagatgtcataaaatgcaatgctaatgtcatgagacattaaaaacaataagcgtccagaactttaatcgctaactgaataaggcttccatcaaagtagtcacctttggagacgagatgcttggatgatcatgcccctgctctaaacaattttggaacttttcttttggaaagaactttggagtaaggaatgggcaatgccaaaaattatttcaagattgtaccgactaactatcttttgtacgagaagacatgttacccagcataatcacccacatgcagacttgacttctttatccgtcagggttcaagcaagaaatatattgctcacttacataatgtgagtgtgtgtgtgtgtgtgtgtgtgtgtgtttaattgaggaccttttaacaaaggtctatttataaaagatgtggaagggataatgggaaaccaataagggatgggggagcctttatttttcctaggtttggattgg

SEQ ID NO: 686210 - DNA, 633 bp, Homo sapiens
tggacagaggtatggattacctaatagggcttctacttctctggcacaattaggctatcttttatccaaattaagagattgaacatttttcctatgaaaatcaggtcaatttttggtcttgtaattcaccagttattgtgcacagttactatctctgtctgttgaataacagtggttcaaaggtcctaaatgagatactaggagaaagcatttattgtatgttcttttgagtaattgagacagaatagagtgtgatatcaaaactggtttttgtccttaagaaaacccgaggtacagatggattcagtggtaacttctagcaaatatttaagggagcgatgccaatcttatacaaattctttcagaaaatagaggaggagaaaatgtgtcccaacctgtcttatgagccaacayagccctgatgccaaaacctgtcaaagatattaccaaaaataaaaaaaaagaaaagacaggaaaattgcagaccaatatttctcatgaacatagggaccagattctcaatgaaatatcaacaaattaaatcaatagcacataaaagaatattacataataacaatgtggaagttattccagaaatgcaagattgatttaatacttaaaaatcaatcaacg

SEQ ID NO: 686211 - DNA, 597 bp, Homo sapiens
tcttcatttcacagacataatagagcatcatggtagatatttccaaaacaaatgattcactgaaaacattctccaacaaatgcctccttccgtactcttttgtagttttacccttgaacttcatctgaaaagtagacaaaagggttggataataagaaaacccgaaatagagttaaagatactgagtttgcattaaggtttcaccctttgtcagccatttgactttaggcaaatatcttaatctctctaaacttgtatttcctcctcaaaagaattctttcttctgtgtagtcatgagcattaccagaggtgtggtatttgaaagcattttgttatctctaaatcactatgctgataagaaattgtaaatttcctgaaagtgttatgagatcaaaatgtaaaaaggtaaaacaaatatttcttctgtaaatgaatttaaaaggatcaagagagaactgtgaggatttggaatatggggtacttctcaggaatggttctgctcagttgggtagaaaataatgtgtaagtaaatcccaccagagcaggtacagggcagtgtgcacrtgtgattaatgttagtggtaactggagtctcca

SEQ ID NO: 686212 - DNA, 599 bp, Homo sapiens
cttctcttgtagtatatattcatacattttggcctatgtaattgaactttwtttgtgattttttaacattaaaatctttttattttttaggattcataattgacctataatatatgcacatttgacaatcttccctgttaagagtttctgggtttcacatcataattagaaagtctttcttcgttttagaattatataatgttttctaaattacttattaagatttattcatctctcctagaatttattttgttataaggaacaaacattatgattattccatttattctgtttttacctaatactgttacaaattttattttatcagtaatttctactataaattcctgactgaggagaatgacctaaaatttcttgtcatcggtcactgagcagctttgcccttcacagaatagaaccacattcataaatcgtgacatgcaagagaactttataacacaaaatatacaattcacactgaagttaggacatgtatgcatacatttttttctgcattaaaaaaatcaccaaatatttataatccaaaggcatagaacaataaataataaaaatcttagtagaaaaagaactaatctgcc

SEQ ID NO: 686213 - DNA, 676 bp, Homo sapiens
ataatattataaaatggctaccatataaaatttttttaattctgccaaaaatgaagaaaaatcatactatagaaatttgccaaagataaaattatttttttattttataacatatgtgctatttctcaggtttttaatattcatagttttttgaaataaatattcattttattcacctatttttgcattcacaactttaattaattaattaattaattwatttatttatttatttttttgcttgcttgctggcttgcttgcttatggtcttccaaatcttacaagccaaagattctggaagcaagaattacttagagctctggcatcaaggattatattattccctgtcttgcatcagtaagatacaaaggaatatcttcaatcttaccacttctagaaagcatgtgctttcgaaagattcattcttttatatggcaaattccattgtcatgctcaccaataaacaacagtgctcatatcctgattgtcctcagatatctctaagggctattttggtcagattttatcttctacctgtaaagattaaggcatagtcttcattcagcccagaagacagaaagcttgactaaaataaatgttaatgtgtttcaaataatatatatttctggggaaaaaagaaattattaagtgtttgatgattatgccacttttactc

SEQ ID NO: 686214 - DNA, 676 bp, Homo sapiens
ataatattataaaatggctaccatataaaatttttttaattctgccaaaaatgaagaaaaatcatactatagaaatttgccaaagataaaattatttttttattttataacatatgtgctatttctcaggtttttaatattcatagttttttgaaataaatattcattttattcacctatttttgcattcacaactttaattaattaattaattaatttattwatttatttatttttttgcttgcttgctggcttgcttgcttatggtcttccaaatcttacaagccaaagattctggaagcaagaattacttagagctctggcatcaaggattatattattccctgtcttgcatcagtaagatacaaaggaatatcttcaatcttaccacttctagaaagcatgtgctttcgaaagattcattcttttatatggcaaattccattgtcatgctcaccaataaacaacagtgctcatatcctgattgtcctcagatatctctaagggctattttggtcagattttatcttctacctgtaaagattaaggcatagtcttcattcagcccagaagacagaaagcttgactaaaataaatgttaatgtgtttcaaataatatatatttctggggaaaaaagaaattattaagtgtttgatgattatgccacttttactc

SEQ ID NO: 686215 - DNA, 688 bp, Homo sapiens
tttttttttgagacagagtctccctctgtcacccaggctggagtgcagtggtgcaatctcagctcactgcaacctctgcctcccaggttcaagtgattctcctgcctcagcctcctgagtagctgggattacaggcacgcgccaccacgcttggctaatttttgtatttttagtagagacggggtttcaccatattggtcaggctggtctcgaactcctaacctcatgatccgcccacctcaccctctcaaagtgctgggattacaggcattagccaccacgcccggcctttctccagttattcttaagtggcattagctgggtattggtgcatgagaactctttgcattcccatagtgcctagtcagtgctatgtacatagcaggtgcttagcaaatataagaaaagaaacttttgatatgatgtttgctcagtgctctggtgggaaagtatctctaagaactgatgattacctttccagggattttgctctttatagttcccatggacaaccttctgtgggtcctcagtaatcactgaatacagttaacactcagctcaatatgtaaagcccttcaccaccagtgcrggggcctccctagtctcacctctcttttagcctttgctgtctctgtccgtgctccaagccaccagactctttcctagcccagagcttttgcttggctat

SEQ ID NO: 686216 - DNA, 1769 bp, Homo sapiens
tttttaatttttagtagagacgaggtttcaccatgttggccaggctggtctggaactcctgatatcaagtggttcgcctgcctcggcctcccaaagtactgggattacttacttttaacaattgttctatcaccttctgtgaatgtttctctaaaataaaatctctttgtctcgtaggacgatggcattagctagaggctgaacgtcttcctcaggtttacccttgtcggaaggtgggcagagataaacctgtgaaggaaacgtcagcccagcgtatctacgcatggccctcagaacaccattagtgccttcctgcacctctccatccctctgtccatcttcaatccttgtaggacactcttttctcttcacctagctaaacactacaattatttccaggccttttatttttttaagacagagtttcactctgtcactcaggctggagtgcagcggcatgaccatggctcactgcggcctcaacctcctgagctcaagtaatcctcccacctcagcctcctaagtagctgggactacaggcatgcaccaccacaccagctaatttttttttattttttgtagagacaaggtctcgccatgttgcccaggctggtcttcattcctgggctcagcgatcctcccactgggattactggcatgaaccactgcgcctggcctccagaccaatttaaaatttttcctccacaaatggcttcctctgatcttaccagctttgagggatcacttccccctttggctttttataagtgtatactgttcatttcccatgaaatggcatggctacgttgtgttgtgattgtgttaccaacagacattgccatgcacctacttactcctttgctagggctgccatgacaaagaaccaccactggggtagcttcaacgatggaaatttactttctcacaattctggaggctggaagtctaaaatcaaggtattggcagggttggtttcttctcaggtctttctccttggcttgtagatggctgtcttatctctatgtcttcacacagtcatccctctgtgtgtttgcgtcctaattttcttttcatataaggacgccagtcattggatttgggcccaccctaatgaccttgtttttttttttttcttttcttaattacctctctaaagaccctatctccaaatatagtcacattcatagggattttgaggggacacaattcagcccctaatacctaccatatttgtgtgatcgtgttaggcgattctagagactagagaagcaactgctctcatttgtcttcctgttcctttactgaaaacacatccaggaggccagggccttggggaccagctgtagcaaggcctctgacactcactccctgcaattactcacattgtccctgaaaaccactgtgtttggcaagagctggtgcagatttaatggggagctgaaactgaacaacgagtcacacatttagtcattgaagaaacagaagcaaccctttggggattctcagtctactacctaacttattccacaacccacggacctaactttcaaagggcagagaccatcaaaaaccagtgctgctctcttgattrtaaaaaccaaagaatggttttgtgctcaggcattttatgtctgtaatgtgagtccatatcgagggagaggaaaaataaaaataaaaaaatccatcttagaaagcagattttgcttatttcacaagatgaatcaccagagctgccattttcctagtaatttcaaaaccagacgttggtt

SEQ ID NO: 686217 - DNA, 1263 bp, Homo sapiens
ccccctggacccctgttaatgtgtcacctcacacggcaaaaaggacttcgcagatgggatgaagttaaggatctgggatgggtgttatcctggcttgtccgggtgggcccgatgtgatcacggggtcctcctcataggaggaggcagggggtcagagcgggcagaggaggagatgggacagcggaaacagaggtcagagggattggaagacgctgtgctgtcagctttgagaatggtggaggggccaggtgcccaggaaggtgggtacacagggcaggacgagggtgctggggactcttggctgccgtgcttgggcctgggccctccctgaggctggggctgtcctgtgtccagggctggacatgcagaggccataggcctggggtgcctggctgttctgtgggaaccctcatgatctcttctctggaatgcagccccccgacctatgtcagcccccagcaccagcctgggtctgggtctgtcctctgtcccccgagagtggacctcacccggcaggctctctccacccagatggagccgctggcctgggggtctggctttagaagcagccttgtggcatgaatgccagaacccgcccagccacggttcctgggccgcaggtgacagtcccggggcttggccctggggggtcccctctgtatgcggggtttgtgtgcaccctggaatcccacaggggaggagaggggcacagtgcaggctgctcgatgctgagtctgggggtcgccagccctggctctgttctttatgccacgggatggggtcccctctgcaatgcctgcggtggggagcagcttagcrcatccccagattcttccatccagccaaatgtctgtatttctaaggtaagaaggattacataggcccttctattatgatttttaaaatatggaattctccaatgtgctttcgtggggagtttcatggtgaaacatgctatcaacagggttctgggaatacatctagattttaaatgcttggacagtgtgagatctcacacaggcacatctcatcttttttttttattggcagggggttcaaggagctaaatttccttccaatgaaaacactaccggcccctgccaccaccctgccctgccgtgggtgaggctggcttcatggaacctcatttcctggcagaatcccaagtgtggggtgaggaattccacaggactctcagcctgctggagttcccaggcgaggcgtgctgactcggggccaggcctgagccactgctcccagggg

SEQ ID NO: 686218 - DNA, 1263 bp, Homo sapiens
ccccctggacccctgttaatgtgtcacctcacacggcaaaaaggacttcgcagatgggatgaagttaaggatctgggatgggtgttatcctggcttgtccgggtgggcccgatgtgatcacggggtcctcctcataggaggaggcagggggtcagagcgggcagaggaggagatgggacagcggaaacagaggtcagagggattggaagacgctgtgctgtcagctttgagaatggtggaggggccaggtgcccaggaaggtgggtacacagggcaggacgagggtgctggggactcttggctgccgtgcttgggcctgggccctccctgaggctggggctgtcctgtgtccagggctggacatgcagaggccataggcctggggtgcctggctgttctgtgggaaccctcatgatctcttctctggaatgcagccccccgacctatgtcagcccccagcaccagcctgggtctgggtctgtcctctgtcccccgagagtggacctcacccggcaggctctctccacccagatggagccgctggcctgggggtctggctttagaagcagccttgtggcatgaatgccagaacccgcccagccacggttcctgggccgcaggtgacagtcccggggcttggccctggggggtcccctctgtatgcggggtttgtgtgcaccctggaatcccacaggggaggagaggggcacagtgcaggctgctcgatgctgagtctgggggtcgccagccctggctctgttctttatgccacgggatggggtcccctctgcaatgcctgcggtggggagcagcttagcgcatccccagattcttccatccagccaaatgtctgtatttctaaggtaaraaggattacataggcccttctattatgatttttaaaatatggaattctccaatgtgctttcgtggggagtttcatggtgaaacatgctatcaacagggttctgggaatacatctagattttaaatgcttggacagtgtgagatctcacacaggcacatctcatcttttttttttattggcagggggttcaaggagctaaatttccttccaatgaaaacactaccggcccctgccaccaccctgccctgccgtgggtgaggctggcttcatggaacctcatttcctggcagaatcccaagtgtggggtgaggaattccacaggactctcagcctgctggagttcccaggcgaggcgtgctgactcggggccaggcctgagccactgctcccagggg

SEQ ID NO: 686219 - DNA, 1706 bp, Homo sapiens
caaaatatttgatgcagaaaattgacattagttctgaaggttctgccctcctccccccacccggctcctggtagcattgagtggctcagccgctgcgcccatcgcctcaaaatagcaaatgggccgccagcctgtgcttggccaggcggacatgacgagccgcctgtggggctgaggctgcctggccctgctgggaccctgccctggctgcttgggcggcacacagctgcaccccaggcccgtcccccatttccagtgtccctggccctggtgggagcggccgtgctgggccgtcgtggagccttctgtgcgtttccatgcatgatgcacctggctagagcctgtctcccaacacctgggctgggggcacagcacagagcgccgagcttgcgggctggggattggggctgggtgaggccagcgtgtcctgccccctgggctgttgtcagggcctcacccatctgcagagcctctgaggggccctcctgggcaggggccaggccggcccagatggtggagccccctgcttgaggggcaaggtggggctctcacggccagccttgtgagcaggcctgtggcagggggaggaccaatactgggagcagcaggctcatggtacagagggggctgctgacctgcagggcccagcttgtgcccaggtgaagctcagcagccccttttagcctcagcgcagggctggctgggcccggccgatgctggcccctctgcaagcattttcatccactttccggcccatagcggggagagcgcttgctaggccctgtccaggccttagtgctgggatggtgtgtgcgtgtgtgtgtgggcacacacgtgtgtccctgagtgtgtgtgtgccctgggagccctgtacacgcgtgcatgtgcgtgtgcctgtgcttgtgtgtgaccgtcatacatgagtgcccgtgtgcatgcctgtgtgtcccacacgtgcctgcgttggccctcgggtacccaccgtggacacccaccctgggtaattcatgttgaacctcatgttgacctcaagcccctcctaatctctccccagccccatccctcccatgtggttccaggtctgtgtctgtccatgggtgtgagtccatctctgagtccagaagtcagcgcctgctggctttggcttcctggtagagcagcgaagcttgggacccagcccttggtgtgggggcagccggagctgtgggcttttgagagggggctggtgcgtgagcgcccgggaggaacccctgtcttcttccccgccggctgcaccggcagacccagaactcatgtatttgctcctggttcccagtctcggggaccctggccggcacgcgtcctcaaatgcggcttttttcagatgccggataattttcaaaacagaaagtagtttcaaggttgagaagataccattatggaaaacaaatagcggtcaagcttagattcgtggcttttcacttgcaatcaatgtccctggtggagggaaaggacaaagggaaggagtcacaggctcagggagggcgctcgccctcatggcttcatgttcacctgcaggaaaaagaaaaaccgtcaggcccttggccttcatggatggtagcctgactccctgagccctgggccaggctcccaggaagcagygttgctgtggaagctgacgtttgggtccctttctcgccacctagctggcctgtccagcgaaatcc

SEQ ID NO: 686220 - DNA, 1548 bp, Homo sapiens
atgcaatggagaaggattcagccacaaaaaggagtgggattctgatacctgctatgacacggatgagcaccaaagacattatgctaagtgaaataacccagacacaaaaggaaaaatattgtgtgattctacttctttgagtgacctagaataggcaaattcacagagacagaaagtagaatagaggtttggcaggagctgggggaaggggaaatgcggagtgattgctcaacaggtacagagtttctgtttgggatgatgaaaagttacatacagcattgtaaatgtccttattgccactgaattgtacacttaaaatggttaaagtggtaaattttatattatgtatatttcaccatagtaaaaaaaagttttaaatacacattccagggccccacccttagaaagcctcagaggcggccgggcgaggtggctcacgcctgtaatcccggcactttgggaggccgaggcaggtggatcacctgaggtcaggagttcaagaccagcctggccaacatggtgaaaccccttctctacagagatacaaaaattagcctggcatgatggtgggtgcctgtaatcccagctactctggaggctgaggcagaagaatcacctgaacctgggtggcagaggttgcagtgagccgagatagtgccattgygctccagcccgagtgacagagcaaaactccgtctcaagaaatcctcagaaggtgatacagtaaatatggatggggtgggaatctggaatctgtattattattattattatttttaatgccttcctatctttctcaggcatagtcaggtttggaaacttatgatttagtctctgccagttctttccaaggggctggtgcgtctgtaaggaagtgttcaccagtctacgtgaaatacatgtgtatttctcatgcatctgagtgtattaaatttgaagtcctgttttaaaatctgagattgtcatgattacattgttttggggttaaagtgtccaatcatctcccaccataaaatgatggtgacaataattcaggttgttttttaagtgtctgtgcttggcaaaatagaagtgagcagtcctatgttagtctctcaaaaggttttcaaaattttaatggtttgttaaattccaaagattgggaaccattcctccagacaccatccctttgaaaatactgaaatagaaactgcttctgctgtttattttatttgtgccagaaagaaaaaaaaaatggaaaggacctatacatttttctgtggttcataggacctggagcaacaaagggcagcattgaaactgacagcattgacatgtaatttgtcctgctgcctgttggaacgttctttttcagatgctggaggagcatgacagaggagaggtggaggtaggcgagagtaatataatttctccaggagaacatctgagaggggaagttgctttcctgccctggccctttcaccctcctgagtttgggggctgtggtggggcagggattgaccaacagccattcctaggggatggatgcctttgcattccagagggcag

SEQ ID NO: 686221 - DNA, 1199 bp, Homo sapiens
ttgttaatttgcttaggataatggcctctggctccatccatcgttgctgcaaaggataccacctcatgttttatagctgcatagtattccatggtgtaccacattttttaaaattcagtctacagtggatgggcatcaagaagtttctacgtaaagtgtcatmacattgttaagcgctaaaatgtgtctcccacaaatcatatgttgatgctgtaactgctaatgaaactgcatttggaagtcaggtcttcagagaggtaattaaagttgaatgaggtcaaaaggtgatctaacctaatagatttcgtgtccttttaagaagaaaaacatacaccagatctctccctccctacctcacccctctctttctttctctctatgcacgcacagatgaatggtcatgtgaggacacagccagaagacagccctctacaaataaggaaaataagcaatgatcattctttgcttgactaagctttacttgggctcctaagtcttcccatagacctatctgtgcagtttcttgaaaaatccacttttagcaagaatcctgctacgtcagtttactcaaaattccccttaatcagatgttattatattcctaaataattttccacttgctgacctccaccttgatcctcggcaataaattatcatttgatcatgttacatttggagttcagctcaatctgtctcccccactgcaaaaatcactttgcagtagtctctatccctatcacgatggtcctgaataatggctcccttaccatgctttagcacgtatcactgaatatttttttctttaacaaaagcctcaccagaatataatcctgaaagcccattgatcttggatttctagcctcctgaactgtgagaaaataaattactgtttcagccaaattattgtttcatcctcagtactgccacattgccaacctacacatttacccctaaacatttgatgcagtctgtattcctggtacttggatgttttctattctgtcttacaaattcagctatgaaattaattccgtgtctgtttttagtatatctgttatttatagtgtttatattatgaaggttttatgatggctatttttgtcatattagtagacttaacctggtggtattatttatttatttatttttcaacagaatctgttgtcatcttcatctcaatttttgtagagctcaaaggc

SEQ ID NO: 686222 - DNA, 1199 bp, Homo sapiens
ttgttaatttgcttaggataatggcctctggctccatccatcgttgctgcaaaggataccacctcatgttttatagctgcatagtattccatggtgtaccacattttttaaaattcagtctacagtggatgggcatcaagaagtttctacgtaaagtgtcatcacattgttaagcgctaaaatgtgtctcccacaaatcatatgttgatgctgtaactgctaatgaaactgcatttggaagtcaggtcttcagagaggtaattaaagttgaatgaggtcaaaaggtgatctaacctaatagatttcgtgtccttttaagaagaaaaacatacaccagatctctccctccctacctcacccctctctttctttctctctatgcacgcacagatgaatggtcatgtgaggacacagccagaagacagccctctacaaataaggaaaataagcaatgatcattctttgcttgactaagctttacttgggctcctaagtcttcccatagacctatctgtgcagtttcttgaaaaatccacttttagcaagaatcctgctacgtcagtttactcaaaattccccttaatcagatgttattatattcckaaataattttccacttgctgacctccaccttgatcctcggcaataaattatcatttgatcatgttacatttggagttcagctcaatctgtctcccccactgcaaaaatcactttgcagtagtctctatccctatcacgatggtcctgaataatggctcccttaccatgctttagcacgtatcactgaatatttttttctttaacaaaagcctcaccagaatataatcctgaaagcccattgatcttggatttctagcctcctgaactgtgagaaaataaattactgtttcagccaaattattgtttcatcctcagtactgccacattgccaacctacacatttacccctaaacatttgatgcagtctgtattcctggtacttggatgttttctattctgtcttacaaattcagctatgaaattaattccgtgtctgtttttagtatatctgttatttatagtgtttatattatgaaggttttatgatggctatttttgtcatattagtagacttaacctggtggtattatttatttatttatttttcaacagaatctgttgtcatcttcatctcaatttttgtagagctcaaaggc

SEQ ID NO: 686223 - DNA, 1010 bp, Homo sapiens
agtatcactcttctgcattaagggtatcccattttcccagtagcatttactgaagaaattgtcatgttctcttcaatgcctgttcttggaaccttggtcaaaatgagctggctgaaagtgcctggatttatttctgggttatctaacctggtccgtgttctatatgtctgtttttatgttagtatcatgctgtttgggttaatatcactttttagaatattttaaaagcataccatgtgatgcttccagctttgttcttttgttcagaattgctttggttattcgaggtctcttttggttccatacaaattttagaacttctttttttctttctttttttttaacttctgagaagaatgtcctgtgtattcttgatagggattacagtgattctatagaactcttttggaagtatggacactataacaatgttaattctttcaatccatgaacatggaatatacttccatattttttcagtcaatttttcagtctctttgctattgataacatggttattttataaatattttatgtatatgttttgttcagcaggtgtatgtcatacacacacacacatcatcatcatcatcttccactttgtgacttgtcttttaactctccttttgttggtgttttgataaatgttaagatcctactctatagtctaaattatcatttttaaatataaatccttgtcttctccaagtcaataatttgttcttaaacattttcttctaaaagttttccttctttcctattcatatttagatttgaaatccatctagaggtaacttttccttatactgccagtcttattgacaataaataccctcaatttttcgcttatttgaaaatgttttttgtttcatctttgtaaaaggatatttttactaagtatacaattctacattggcaattacattmttttagtgatttaataatgcatttcatgttttccagctgtcattgtttttgatgtaaaattagctcttcctcttgtgtttgat

SEQ ID NO: 686224 - DNA, 631 bp, Homo sapiens
tctcttgccttctcataatgtattttgatggttttatgtattgataaattttgattcctttctcttattttttgtgtaacttctatacctattttcattctgactaccaagggacttacctaattttttttttcataattacaacagtcaatcttaatataataacgacttaatttccctcgcatacaataactctctgcttttaccttttctcctacccacattgtatgctactgatgtcacaatttatatctattttattatgtatcaatwaacataatttaggtatagttgtttgtaatacttttgcaatttaacttttgtagtagcattaaaattgattttcccactatcattatagtaataaaatattatctttattaagaaaataataaaatattatcttaaaatgaagataatatttacctttccaggcaagtttcatcctttcttatattctggtgttgctatttagcatcctttaatttcattagaaatactccttttggcctttcttgtaaggtaggtctagtggtgataaactccctcagctattttttgtctcagaaagtcattatctcctctcaatttttgaatcaagatttttgaacaaggttgtctgtgtatagta

SEQ ID NO: 686225 - DNA, 593 bp, Homo sapiens
aaaggaagagaaagagatctcgttttatacataaaaaactgaaaaaatatttctaagttgcctaagcgttgcataactagtgcagtgaagacagctttacttgaactcaagcctggagtccgactccaagctgtagattttgttttcttttctttgtttcagctgggacctggtagtatggggatgtttcctttgtagcagagcttggagtttaaaattaaatataataagttaatacttgcattaaatataatttatataaattcaattcatacaaaaagtagtattcagttatataatcaatttcagttttctctaatgaggcacatgtaaataatatctgctaatcacaatatcagttgttttttgtttagtttgttttgttttttaaacatattcttccaatcttttattttcagtacttatcagtaagtgattatatggtttaaaataatacataagattaatactctcagtggatttttgaaccttagacctaagttccatattttccaaaaagtcaawccaatgaacagagatgccttaacttattcacctaaacaaaagcaacataaatgtcagaggagagtaat

SEQ ID NO: 686226 - DNA, 644 bp, Homo sapiens
gtccctgtagtcccaatgatgtcattctttcattattttaacaataactggtagtgcagggtggctcctggaatagagtgagttcccttctgggagtaaaatgaaagtccattttcttcccatagaaaggcaaggttggggctataattttgtcctgagatttaccaaaatctttaggaaaaaggatttgtagttaatgctgacattaggctgtatacatagtattggtaaatgtaaatatttagtaagaaaggtgctcagtatatagatacttaatgatcatttctttctcccccatgggtattcgatttacaagtgcaattttcctgcatatcagcacatacagataaattactgttttgtttaatgaactctataaaggctgtaatgtagatttgttcttctcaaataaaatcagttttctcagtgcagtgtagwgcacacacctgtagtcccagctactagagaggctcaggccaaaggattgcttaaacccagtagtttgagaccagaccatgcaacatagcaagatgcctgtctctagaaataaataaataaatatatatatttatatttaaatcagttgtctttatgaactctcaaattatattaatataatgagcttccgaaatggtggcctaatt

SEQ ID NO: 686227 - DNA, 644 bp, Homo sapiens
gtccctgtagtcccaatgatgtcattctttcattattttaacaataactggtagtgcagggtggctcctggaatagagtgagttcccttctgggagtaaaatgaaagtccattttcttcccatagaaaggcaaggttggggctataattttgtcctgagatttaccaaaatctttaggaaaaaggatttgtagttaatgctgacattaggctgtatacatagtattggtaaatgtaaatatttagtaagaaaggtgctcagtatatagatacttaatgatcatttctttctcccccatgggtattcgatttacaagtgcaattttcctgcatatcagcacatacagataaattactgttttgtttaatgaactctataaaggctgtaatgtagatttgttcttctcaaataaaatcagttttctcagtgcagtgtagagcacacacctgtagtcccagctactagagaggctcaggccaaaggattgcttaaacccagtagtttgagaccagaccatgcaacatagcaagatgcctgtctctagaaataaataaataaatatatatatttatatttaaatcagttgtctttatkaactctcaaattatattaatataatgagcttccgaaatggtggcctaatt

SEQ ID NO: 686228 - DNA, 1665 bp, Homo sapiens
atatatctttactgtgataaaatatagatctcataaaatttaccattttaaccatttgtaggtatacagttccacggcattaagtatattcacactgttgtacacaatagctgctatccatttacagaacatttttgtcttcccaaactaaactctgtatgcattgaacaataactccatacctccttctcttgcagttatatttgtaaagacataaagaattctaaatacaatttaagccctcttccaacacctttcctgatactaatcactttcttcaccctcaagataattccattcagatgttggtttgtatccatccctcaatgatttactagttttgccaagagtttacttgtgtctttcaagatttaaatacatagtttttactcaatattaactgtggagatttattaaaatgaacacctgtgactgtggtccattgattttaactattgtaacatgttcaattgtgtaattacatgtcagtgtaagttctttctctttctcgatgaatgtttaggttattttacatttttcactgttattatttaatttacttgatatttcaaaattgctatcaaagttggcataccaatttacattcatactagcagtgaataagaggtgatgtttattcacttctattgctaacgtttaacatgtgttttgcaaatttgagggtacaattttaattaattagactttattttgcttttttaacagtaaggttgggcatcttttcttggccatttgaatttcctacacatgaattcaaaacctttgcctacttttcacattggacataattttaagttatatttactaatttatatgaggtatttgtattcgctggctgctaatcttttatagtttatatgtgttaaaataattttattcaactgtggcttttcttttttcttttcctatgaaaccttttcttgtgaacatgtcactcatgttaattggattcaaattaccagtcttttccttgatttatatctcttgctcctgtgttatataccatgacctaaacagtgctttttttttcatgtcttacttttaatgttttgtctttttttcccactttttatgacaacatccaatgccatgggtatgtttttcttttccatcttttattcctttgtcataaaacccagtttcaaatggccttcaaaggcttactgggcagtttactataatgtttttcaactcttgatgtctgcaggtagkaaacagaaggtcaccaattacctgattatttttaataatttccttgatatattcctgttggcagaaaaagatattgaatttgctgatttgctttccacagctgtacaaagtctaaggtagtgaatgactcagggctgaaacgtaatctcttggcagctgagcaggagtggaggaaggatccctaaattgttttgattgttattcatgggaggaggttaaatatcaacattaacaggagtttgaaaggagttgattccaacccttgtggataactttgagaggttcaagacttcagtggaagaagtaattgcctatgtggtaaaaacagcaagcaaactagaattaaaagtggagcccgaatgtgactaaactgcttcattcccataatacaacttgaatggatgaggagttacttcttatggatgagcaaat

SEQ ID NO: 686229 - DNA, 1093 bp, Homo sapiens
tgaattttcgtgcttgtccctgaaactaaaaaacatcaaaaaacaattccctttgcttccatgaattatggttagtgcctggttttgaatcattgcctctacttgggactcttgcccctttgggttttgctggttctgaaattctgatgcctgtagccaaagtgggacatttgagtgggcttctggaaatccaacattctagaagaaagccaaccacaaaaacttttgaggaggaggagaaacttctctacccttggtacttttggttggttgtgggtggttttcttcagtccattgtactgatgttcactttttcctctcttcctgccaaaaaaagaaacctgctcctccaaagccagagcccaagcctaaaaaggcccctgcaaaggtaagtgctaacattggaactgatcattttcacagaatgaggactgtccttagtgccttaacttaattagcataatggtgcctccattaatggaggttataaactgtgtggatagcttacctcgtccgtgtcattcataacgttggtttcctgatcaagaattctgttgttagtttataggaaaatctgcatttaaatattaaataccccagggtttaaactgatttattcttctgttacttaggaaattctaagtactaaagattatagcaaattacagataatttagcctagttttgatcagttgttcttgtcaaatgggtgagggtttgtgttttatcttgagtaaacaatcctaccttgtgcagaactttgcagaccataccttggtaatacgaaatggggagaaacagttctattttttcccctttttcagaagggagagaaggtacccaaagggaaaaagggaaaagctgatgctggcaaggaggggaataaccctgcagaaaatggagatgccaaaacagaccaggtataactgctgtttcaccctttgttagatttgttcattcagttagttgctgatatcaaaaatttaattgcccttttcttgtatcactccaaatgtaccatttggtccagtgtgcttgtggctttcctgttwacttaaatcctggattcttgaaatctctactgtcagctgaa

SEQ ID NO: 686230 - DNA, 1024 bp, Homo sapiens
gcctcctctgtggtctcccctcagcctctttcctgtcccaccacttttgcaagatgacactttagttcattcaacaactatttattgcgccctcttctgtgtgtcaggtccagtcctaggtgctggggacacaatgacaagcaaaacaggcaggttccttcgctcatgaagcctacattctatgagggagtctgacattcagcacagaaccccaacaactgcagactgaggtcagagttctgcagaagaccaggcgtggcggctcacacctgtaaccccagcattttgggaggtygaggcgggcagatcaccttaggtcaggagttccagaccagcctgaccaacatggagaaaccccatctttactaaaaatacaaaattagctgggcgtggtggcacatgcctgcaatcccagctactggggaggctgaggcagaagaatcgcttgaacctgggaggctgaggttgccgtgagctgagatagtgccattgcactccagcctgggcaacaagaacgaaactctgtctcaaaaaaaaaaaaaaaaagagttctgcagaaaaagaacgggtatcagaatttgactgaggcctcctgaggtcaggacggacagtggagtggccaggttgaaagagtggggctagggaaagggaatgttaggcagagggaagtgcttgagtgaggaggccagactggggggtgtggtgggagacaggccaggaagtggaggggcccaatgacgcaggtaagactctcacctggtcattcccctgctcccacaccacctgtggctccctttggctacacactcatagccctcagaggacctgaaggtcatcctggactcgtctctcttcctcatctaccatgtccattccataagtattttatacaatgtctgtgatggccagggaccatgttaggctctgggtatgtaaacatcagggaataaaatggacatggtgcctgtcctcctggaggtcacagtctctctgaatcctaaatggctccttctagctttatagc

SEQ ID NO: 686231 - DNA, 1024 bp, Homo sapiens
gcctcctctgtggtctcccctcagcctctttcctgtcccaccacttttgcaagatgacactttagttcattcaacaactatttattgcgccctcttctgtgtgtcaggtccagtcctaggtgctggggacacaatgacaagcaaaacaggcaggttccttcgctcatgaagcctacattctatgagggagtctgacattcagcacagaaccccaacaactgcagactgaggtcagagttctgcagaagaccaggcgtggcggctcacacctgtaaccccagcattttgggaggttgaggcgggcrgatcaccttaggtcaggagttccagaccagcctgaccaacatggagaaaccccatctttactaaaaatacaaaattagctgggcgtggtggcacatgcctgcaatcccagctactggggaggctgaggcagaagaatcgcttgaacctgggaggctgaggttgccgtgagctgagatagtgccattgcactccagcctgggcaacaagaacgaaactctgtctcaaaaaaaaaaaaaaaaagagttctgcagaaaaagaacgggtatcagaatttgactgaggcctcctgaggtcaggacggacagtggagtggccaggttgaaagagtggggctagggaaagggaatgttaggcagagggaagtgcttgagtgaggaggccagactggggggtgtggtgggagacaggccaggaagtggaggggcccaatgacgcaggtaagactctcacctggtcattcccctgctcccacaccacctgtggctccctttggctacacactcatagccctcagaggacctgaaggtcatcctggactcgtctctcttcctcatctaccatgtccattccataagtattttatacaatgtctgtgatggccagggaccatgttaggctctgggtatgtaaacatcagggaataaaatggacatggtgcctgtcctcctggaggtcacagtctctctgaatcctaaatggctccttctagctttatagc

SEQ ID NO: 686232 - DNA, 621 bp, Homo sapiens
gatgaataaataagttaatatgtgtaaaacacttaacaaaaatgcttggatcatagtaagtccttaatattattaagcaattattgatattctatgtgatctagattgaaaagttttaatctagttcattcatcatttttttgctttgtcagctttttataatcatttcataatgtattcaccaaacatattttgagtatctyctttgtgccagtttatgacatagtagggcttttccacattcactccttataatttaaatagagtgtttcacatggaacttccctgttatagaaagataatttcctgtccaaagcagtaaattcaaattttaaatcatttatgagactgttctataatcactgaaaaaaaagatgacatatgtatatagacacataggtaattatagatagataaatagataaaattatattaaatttattaaagttataagacaagagatgatgattctagggccagtaatgagtgccgcctttgtttttcttctgttgtatttctttttctggtcatgttcatcatttccttttaatttgaggttcctagcatcatgaataaattggctgaaaactttaacacttttaatcaaagtttgcctgttat

SEQ ID NO: 686233 - DNA, 537 bp, Homo sapiens
aaataatgtaaaaacacaaccttaccttgtactagggagaaatagacctagaatgacttccaacaccaatcataactactacaatttttaaggaatccttctcagtataattcgtaggaatgtacctatgataaattcagccattagcctcaggtgtgtgccaaaagaaaatctggagatcttaaaaattaaagttactgcatggtaaagattaaggttcagcaaacaacagagggctggccgtggttgtccctgtaaataaagttttattggaaccagccatcctcattcatttatgtattgtttatggctgcttttgcactacaatgagttacataatttcaacaaattttgtatggcttataacgtctgtaatgtttgctattagaccttttaaggaaaatgtttgctgactactgctataagaatatgaccaattatgattktattgtttgttttgttcttattttttctttcagtagtatttgttttttaatgtcatattgggcatgtgaatatctttaaaggtccccagag

SEQ ID NO: 686234 - DNA, 2131 bp, Homo sapiens
ggaaaattcccttagcagtccactttccaggcaccagtcacctctggaactttaattagaactcaaaaatgtgagtggaggaattagaacagaggcctttctatcttatatttgaaaagtatttattttacttagaagcaactttttattaattaaaagcacatcagataaatcctaatatttgaaacacctccccatatttaactaattcctcattcttctagacaaggaaacattaaagtaatttttacacatcaacatatacttcagaagagaaaaaagaaaccttcattaactgaacaaataacaaaatatgactcaacatacacaaaaaccagtgtatcatatttttgcatatattaactacatgttgatgtaaataggaacaaaattattccaaagggagggtgataaatatgtgggttttagatttttcatgtttttaaacatattggaaatgtaatgaaatacaagttaattaaggtgatctctgtagcacagtggaaggtattaccctaacatgtctaattttggtatgtgagctctgatcttatcagtcatatgttacaaattcacaactgagttttctttttttwatgaatttttaatttttagtgaccaaacttcttagttcttccccctacctcagcatgtctgccaatatataaatgtttacatatactaaagaagttgaatatttaaatgaagttttaggtgaactattttaaaaaggaaaattttttcccttaaaattgtgattataatcattgtgtttataattcaagcttttctgttttaggtttctttcagtgagacatgtttgtgtagcactacactgaaaaaagatgattcttattggtatgaaagttattttggcataagacattttagatttctgatagattctggacttatggagcaatatatatgcttacattcaaaataaagtttatcactgtgccccttttagagcatgtgttagaaaacagtggcaaaatgtgatcccagagttagggttctatttccaggggaactcactaagccctcttttacaagagcataaatgtttacctaagcaagaaggtgaaatctgttatgcccaataaaggacattttgcagtgctggtttacggaaaacattcaacagacagtggatgttttacataaagtacagtgcgttgtttgaaactctttgctcatctatacactatgcttaaaataaacactatctgggaatatacccgtcttttttctacctcccttattccacaccctagattttgtcacctgccaaagtcaaataaatcttatctaaacagttgagataagcgccgagtcgtacccagtgtggtcaaatcaacaaacctctccaaaaacagaaatgaaatacaatatcgctagattaaacagtctacaatggtaatcatgtttgcatttaaagattttattccaaaaggatcacagtcttggtatccatttttttccctcctgcctagacaagacggcgacatactgactcaaacaaaatgcatttgttctctaacaatttaacttgtacagctcttataaacaaggcccataggtgtatgaagcctaccgacttaatcagtaacttatgtcgttaaccttgtataagcaagtatgcttgagatgtaccagtgttggattgtgtatgggatttagttttttcttgcaggaaagcctttctttatgtagcctgagtgcaaagtctatggcattctgggattttattgtctgtatcttacagtaaagctccatcatgctaaactgttcaaaaagagaagatagtacaaattaaagtgatttctaaattataggatattataaaaaatgcagttttcttccttcctaggacatatggtattttaactgtttgataacaaggtgtaaactctactagggcaggaaccgtgtctgtctggtttatgctgtatcctcagggcggacaagagtacctagctcagaattagaattctgaatatttgttcaatgaatcaatgatgttttccagaagatattctgtcttctctgtggatgaataaaaatattttgtaattattacattaatttctgatatttaaaagcatgtctctcgagagtacatttttgt

SEQ ID NO: 686235 - DNA, 2131 bp, Homo sapiens
ggaaaattcccttagcagtccactttccaggcaccagtcacctctggaactttaattagaactcaaaaatgtgagtggaggaattagaacagaggcctttctatcttatatttgaaaagtatttattttacttagaagcaactttttattaattaaaagcacatcagataaatcctaatatttgaaacacctccccatatttaactaattcctcattcttctagacaaggaaacattaaagtaatttttacacatcaacatatacttcagaagagaaaaaagaaaccttcattaactgaacaaataacaaaatatgactcaacatacacaaaaaccagtgtatcatatttttgcatatattaactacatgttgatgtaaataggaacaaaattattccaaagggagggtgataaatatgtgggttttagatttttcatgtttttaaacatattggaaatgtaatgaaatacaagttaattaaggtgatctctgtagcacagtggaaggtattaccctaacatgtctaattttggtatgtgagctctgatcttatcagtcatatgttacaaattcacaactgagttttcttttttttatgaatttttaatttttagtgaccaaacttcttagttcttccccctacctcagcatgtctgccaatatataaatgtttacatatactaaagaagttgaatatttaaatgaagttttaggtgaactattttaaaaaggaaaattttttcccttaaaattgtgattataatcattgtgtttataattcaagcttttctgttttaggtttctttcagtgagacatgtttgtgtagcactacactgaaaaaagatgattcttattggtatgaaagttattttggcataagacattttagatttctgatagattctggacttatggagcaatatatatgcttacattcaaaataaagtttatcactgtgccccttttagagcatgtgttagaaaacagtggcaaaatgtgatcccagagttagggttctatttccaggggaactcactaagccctcttttacaagagcataaatgtttacctaagcaagaaggtgaaatctgttatgcccaataaaggacattttgcagtgctggtttacggaaaacattcaacagacagtggatgttttacataaagtacagtgcgttgtttgaaactctttgctcatctatacactatgcttaaaataaacactatctgggaatatacccgtcttttttctacctcccttattccacaccctagattttgtcacctgccaaagtcaaataaatcttatctaaacagttgagataagcgccgagtcgtacccagtgtggtcaaatcaacaaacctctccaaaaacagaaatgaaatacaatatcgctagattaaacagtctacaatggtaatcatgtttgcatttaaagattttattccaaaaggatcacagtcttggtatccatttttttycctcctgcctagacaagacggcgacatactgactcaaacaaaatgcatttgttctctaacaatttaacttgtacagctcttataaacaaggcccataggtgtatgaagcctaccgacttaatcagtaacttatgtcgttaaccttgtataagcaagtatgcttgagatgtaccagtgttggattgtgtatgggatttagttttttcttgcaggaaagcctttctttatgtagcctgagtgcaaagtctatggcattctgggattttattgtctgtatcttacagtaaagctccatcatgctaaactgttcaaaaagagaagatagtacaaattaaagtgatttctaaattataggatattataaaaaatgcagttttcttccttcctaggacatatggtattttaactgtttgataacaaggtgtaaactctactagggcaggaaccgtgtctgtctggtttatgctgtatcctcagggcggacaagagtacctagctcagaattagaattctgaatatttgttcaatgaatcaatgatgttttccagaagatattctgtcttctctgtggatgaataaaaatattttgtaattattacattaatttctgatatttaaaagcatgtctctcgagagtacatttttgt

SEQ ID NO: 686236 - DNA, 646 bp, Homo sapiens
tctaatgtttgtttgcctcgtgtctttgtccaatttgacaatatgccaattgagtcaggaccatgtctaatttggtaattggagggctgtgcataccattattgctgcctagcaaatgttgcgatataatcagagtgataagatgggtcaggtttccacatccgttaaacagatataaggggatgttgtggatatgtcttcttgatactgtttagctttaatctactattggattaataacttactagcctggacatgcaatgaaaacattttttctaaattgtgtacaaatctggtaaaaagctgaatttgtaaagagtccagcactaatggattggaaaagtgtaaaatagttgggatggaaaaactatgcaagaagaaactcctgtgtagatatgaagccaaacatttcccaaagcaaagatggatgttatgtcttttattacaaggtttcctttctttgtttttcttactgctgtgtcctcaacaccttgaatagggcctgtaatatamtagatgccgattatgagttcaattgtgtccctgaaaaacatacgttgaacatattccagtaattgtgagtgtgaacttatttgaaaataaagtttttgcagttgtaaccaagttcatatgagatttattattg

SEQ ID NO: 686237 - DNA, 1440 bp, Homo sapiens
ggccagagcttctacctccaaaatttcctcccatcatgggtccaaaatttgaagactgattgttgtaattgccaaaatcattgtagcttccaccacctccaaaattgcttccattattaccaaatccattatagccatccccactgccaccatatccaccaccaccatggctgccaccaaagccaccaccaccactgaagtttcctccatgaccaaagttgtcattcccaccgaaaccacctccatgacacaaccaaagtttccagaaccactctgacctctggctagaagaagcactaagccatctcctgctttgacagggctttcctaacttcaccattgtggccattcacagtatggtatttctgaatgacagtcttatccactgaatcatggtcatcagtgtttacaaagtcaaagccccttttcctgccattgccttggtcagtcacgatttcaatcacttcaatttttctatgctgttcaaaataatctcttaggtgatgttcttcagcatcttctttaatgccaccagcaaatatcttttccacagttaaatgggcacctggtctttgagaatctcctcttgagacagctctctttggttccacaactcttccattcaccttgtgtggtcttgcattcatggctgcatccacctcctccatagtggcataggtgacaaacccaaagcccctggagcacttggtgtttgactcactcattaccacacagtctgtgagtgttccccattgctcagaatggctcctcaggctctcatcggttgtttcaaagctcatccctccaatgaagagtttcctcagctgttcgggctctttaggggaccctgacttagacatgatggcagggagaagagagactttaaygatgcctccttggcggcgtccacgagcagaaaggagcagctgacaaacgtatttcagcaatatttcttaatatttgaaaaagttatgtgttttcacagattactttttctctcctattaaaaatttcatttagaacttttttttccaaatgtttctttcaaactagtgctgattttcagtaaaacgatggctattatctctacttcaacaggcaattttttcacacatcacattctcagagtctatatgttgatgatttttaaaggaaatcttttagctatctcttaagaaaaacagtattaaaactgaggtgactggccaggcacagaggatcatgcctgtaatgccagtactttgggaggccaagtcaggaggtttgctttaggccaggagtttgagaccagcctggacaacatagtgagaccctgtctctataaaaaataagaaaaactagccagatgtggtagggtgctctgtaggcctagctactcaggagggaagatcacttgaacccaggagtttgaagttacatgagccatgatcatgtcactgg

SEQ ID NO: 686238 - DNA, 575 bp, Homo sapiens
accacctcccaaaaaaaccctaatttggccccatctgttggtgagcataaggagatatggttagattttgaagcaaagggaagaagaagcagaatagtgattgaatagggatttgacattcttagggattgttatcctgtccttccattaacaggactctttaggcaaggtgaaggaggaaaatgacattattacaattaccttkaaacaaataagccctagatgcagaacaatcttaactttatgtattaatattcatttgtaactattgaatgtgtgctgttggtgaaacatcacattagattttcgtaatggtggcatgaccgatggctctgaaaatttttttgttccaccttccttgtattgaagccatatagctgtaaagagagacttaggaagccagagaaaggaaactttggctcacccaaaaatccatctgaagcagttcaaggaaacataattccaaaaaaaaaaaaagagagagagagagagcttccccttattggaaggagccagaaagagcaacccactggggtgggggatgacttagagggctgtctccccactgtttgtga

SEQ ID NO: 686239 - DNA, 1689 bp, Homo sapiens
tgatgagaaaaagtttttctttcgtattggaaaaatagagtgtatgctttctttgaggaaatttgaactcaatgatttaaaayaattgtgatttcttttttcttcagcatttggaaatatgttttattcttgttaaacagttggtagtttattgcagaaatagattgtagaaatggattcgttgtcatttattgacagattttcacttttttaataggaactgtcctgggtggagtccacatagtcaagtctttgctgtataactttccttttgtatattttatgcaaaacagattatttaaatattttatttaaaaatgcggcattctgtactgaaaaaatatcttctgttattgcttcaaagatgctactcaaacatacattatcatagtgcagaagttgtgagatcttagtagttgttagatcttcagaattatagttttattacagaatattaaagactaaaagacaataaaaattggaaccacattatagaaatgctagcataataagcaataaaataatctattctcaatctattatgttagagtgatttgaagatgcaaattaattttctgacactgaaaattttagtttcttaacattattagaaacattctgtgacacacttgacagtgcttgtactattaaattagaatttataaatataaagttatttctgtgttttctcatccaatggaacatgttgaatccagagagacagttttcatttcataaaataagtatgtattacacagtttgtgtcagtcataatgctaaatgctgagaaaatagttcctatacagatggaacttaaaatttatgggccagtttcttaagaatgaatgaacatcttctgttttgttttttagcctaactctggtgaactggatcctttgtatgtagtagaagtacttctgcgctgtagcaaagagagcttgaaaaattcagctacagaagctgcaaaaccagctaaacctgatgagaaaggagagatgcaggtttgtacataactttctgtcttctgatttcagatattctgtaacttatttgtcatcaccaaagttctccaatgtgatggtaatgaacatactatcatgatttctaaattagaagttttcaaggtattttaaggtatattagtaaagctatctaacgtatcagtaggataattaatgagatttgtttttatttttcttttatcaaattacaacaagataaatcgtgacaaagtgaaagaaaaagtattcagtcattgaaattttacatgaagctggattttgccagggccataaagatttttcattatccttgcttgtgactgagtgattttacagtttgaatccattcatgctgtttatttcccattcccatggaaatagaggcagtcctgatttaggatttttagactttacagtagtgcaaaagtaatacattaatgagatatttaacatttattacaaaatagggtttgtgttagatgattttgcccaaatgtaagccagtgtaagtgttcttagcacatttaaggtaaactacaccaagttatgtttggtacattaggtgttcatgtattaaatacatttttgacctaacgatattttctacttacaactagtttatcagaacataacccaattttaaggaggaggctctgtaatgactgaagcattattttaacaatgaaaa

SEQ ID NO: 686240 - DNA, 472 bp, Homo sapiens
ttattatgcatttttctccttcatttttgtaaatattttatatatagtagagttcaatttataaatgttcataaacttacaactcaaaagaaatttgcctaatttacctaattcccatttcattgccttaggatgaatagaggccaataaagtaygacatgtggaccaagcctagccctgcacctcttatttataaataaagttttattggaacactgctacactcatttctttgtatattgcctattgttacttttgcatctcaatggcagaagtgagaagttatgacagaagttgtgtggcacaaaatatcctaaaatattcactatctgaccctccacaaaaatgtcccgtcacccctgctttacagggtcattgccaactcgagcttactaatcatgagggggtgagtgcttctactcaaaaatctatcttcttgaaaatcctgggagataccacgcctctcagaaat

SEQ ID NO: 686241 - DNA, 628 bp, Homo sapiens
tgtgtctattgttagaaccaaatgtgatttgaatgtgattttcaaaaaactgggctttgatttagctaacataaccagatgatgggctaggaaatcagtcttccacatgatgacaatcaacttcgagtttccaagaaaagaaaaaggaataaatttggagaacaggagagtttccatttttcagtaatcaatgaaacctcatttttaaaaaagtaaacaatatatgtatataacaatttgatttattttgatcagctttattgagttataatttatataaaatatagttcacccattttaaatgtgctattagataagttttgagaactatatgcagttcataacacgmactacaattacaatatagaaaacttctatcaccctaaaaagtttccttgtgcccctttacagtttatcttcttccccccccaaccctggctcccagaaaccactgatttgctttctgtcactattattttggattttctaaattttcatgtaaatgaaataatacagtatgtattcttctgtttctattatctttcacttaacagagtgcatttgaaattaatccatgttgttgaaattatctgtagtttgttccttttttttgctgactcgtattcca

SEQ ID NO: 686242 - DNA, 652 bp, Homo sapiens
atagtagggcttggcctcttttgaccagtgtggaactcctctatgaatagtctttgcattgcagctcttcattgaactgattgagactttgtcaaagctgtatggcagtctgaggctctgttcataaattctttcttcctgatacctcttttacataggtttcagacttgttttgcagtctgaaacgtttacctctcatagctccttctcttattatctttcacagacatcaccctcaataaatctcttgcagtttccaactccatcttgkcatctgcttcttggagggcctgaactgacacacttctgaattgctctccttgtatcactctttctctcttccaaatttcttgatgcagccagaatatttttatgtccccttgtggttccatggttagaatttttcaatggattccatctttcataagacagtgatcaaaatcattaacacagtgtatcaatccctatcaattctgactcagcctctcactctaacctcatcttgccccaggctccatactggagtttctttagtttcttgaatgttccctccttttcccctgcaggtctatctgcctgtacaatcttctcccctcttataactgtccattagtcattcagagtgcagtgtaaacattttttcatcagagaa

SEQ ID NO: 686243 - DNA, 628 bp, Homo sapiens
cttcttagcctacttaagcatttatcagtgaaaactttccttcacctggctttgttgcacttttgtcatatttcctttcatggctaaatgttatgaaagagtaggctaattccaatactctgattatactaatttaactattcctcattcttcaattcaatataatatgacttctattcccactgctctactgaaactgccttcactcaggtccactatgacctcccaattgtgaaacccagtggcatatttccaggcagcatcccatgtaacccatctatgatatttgacactattgtccatgtagaacttcttaagatcttctatttagtgtctatgatagtgtttattgttcatttcatctggacattactcttaagtttttttctgaatctccttttgtacatactttaaatcaagatgaacacttgattatgtaaatttcttccacaccatattctggcaaaatatagcttgaagtgtctactgtatatgttttcttctctrtaaactataatgtctgcatctctgatactatgaaaacgtcattttatatagttggacttgccctaatctaggtcatatccattttcgataaactttattcttccagcttcttttacagaaa

SEQ ID NO: 686244 - DNA, 1233 bp, Homo sapiens
cttttacattaggatattggataatcttggcctattctgagaccttagtacttaatagcatcaggcagtggaaattttagccctgattctacatgccatactttattgggaattcttaaatgattatttctcttgggaaastttaattgcttgtaccctatcaagatttagctagaacacttctgaaagattctctggatgagtaacttccattctattctattgtgaccttaaattgggtacctcccatcgagtcccaggaggctttatgagtcccagcagagtaaaataggagccgactacccagcactaactgccagaacatgtttcacttcaatattaagacttaaccatgtatccccctttaaaaaatagagtacacaagacatattaaattcatccattaaataattattttttcctccagtttctctaatagaattcttgtgagtcataaatggagcagtatttttttttttttcaccatttactacctgaaagttcattatggctttccattttcctgagtggaagttgtgtaagttaaccaccaacttttgccaattacctagattaagctgggatgaaatccgtttagacatgtaaatcatttgttaaggtgcccgtgccttgaattgagagtgagctaatgagtgtacagccggccgttgcatacatgcaggcttctattacagtgctccacgaaagagcatttggtgtcctacctgctgtgtcttaactgctttccttgggcaaagagtactactgccaagttatgaaaacagaggaggagagtatgagcgagaggcaggttagatttgacaatagccattctaactgaagtgagatggtatctccttgtgattttcatttgcattaccctcatgattagtgatgttgagcatttttttgacatacttatcagccagttgtatgtcttcttttgagaaatatctattcagatcctttgcccattttttaattggattatttgagttttgttgttgagctccttgtatattctggatattagtcccttgttggatgaatagttttcaaatattttctcccattctacgggtttactcttcattgtgttgtttgctatgcagaagctttttagtttgatatagttccatttgtctatttttgtttttgttacctgtgcttttgtagtcttacccataaagtctttgcctagatcagtgtccttgaaacatttcccctgttttc

SEQ ID NO: 686245 - DNA, 596 bp, Homo sapiens
ttttttagttttttttttgttttttttttgtttttttttttagrtggagtctctctctgttgcccagtctgaagtggtgcagtggtgcaatttcagctcactgcaacctccgcctcctgggttcaggcaattctcctgtctttgccttccgagtagctggaattacaggcacacgccaccatgcacggctaatttttgtatttttagtagagacgagatttcacgatgttggccaggctggtctcgaattcctgacctcagacaatccacccaccctggtctcccaaagtgctgggattacaggtgtgagccactgtgccggcccattgtagtttttacataattgtgtggatcaggaattttggaaggttgcttaggtgggcatcagctgcggctgctgaggctagagaatccacctccaggaatatttgtttatttgcagatctggaattttggtgctcctttacctcagtttatttccttgcagtatctcatcttctagggcctcttcctgttgcttaggtatttgacaacatggtgggctcacggtagtcatacttcttataagatggctggtttccaagagggagcttcat

SEQ ID NO: 686246 - DNA, 639 bp, Homo sapiens
aaaacactctaaaataatgaaaaaagggcatagtatagttattatataaaacatagtatagttattatataaaacagtaacatatttgcttattataattatcaagtattatgcactgtatataattatatgtgctatacttttataagactggcaataaagtaagcttgtttacatcaaaatagccacaaacatgtgaataatgcattggattatgatgttacaatggttatgacatcacaagatgataggaatttttcgtctccattataatcttataggactgtcagagtatatgtggttcatcattgaccaaaacatcattatatggttcatgactatattttattttccaactaatatgaatttaagaataaaatgaatatttgtatatacacaaaggaaactgagttttgataacataatatttagtgttttgataacattttcctgagccctcagtctgtttgtttttgcatatagcaatctttccccaaacaaatgttgcacaaagaacagctcaatctagctagctaatgagcccctctggtcttatttragaaagttttcaaactctcagtctttcgctatctaggaattaagggaaaaattgaatctgaaaactaccattgcaagatg

SEQ ID NO: 686247 - DNA, 1051 bp, Homo sapiens
tgacagaatggaatagaactcagaaaataacctttatttactccaccttttacagtgcttatctgtgataaatgtacaatgttaaattgacttgaacatgcctagtatagaaatgctatttttttccttattaactgtaatatcattcattactttatgctgaaacaaagatgggaacacagagattaaattcccartgatgataatgatcaggtaaacttagtacatttgagatgaccaaaatgaaaaaccttcacatggagaagtgatggattatcactaattgtgtttaacaaatgttaaaaaaaaaaacacttttccttttaagtgacttgacctgataatttctgacaaaagccctgttacagctgtccaaatttagcttaaagaattaacagaaagtatatagtgaagagatggcctggggctgggtgtggtggctcatgcccgtagtcccagtgctttgggaggcgaggcaggagagtcacttgaggccaggaatttgagaccagccaagacccagtctctacaaaccaatttaaaaagcttgtccaggtgtggtggtgcacacctgtagtgctggggaggctgaagttactggggaggctgaagcaggacgatggcttgagcccaggagttctaagctgccgtgagctacaatcatgccactgcactccagcctgggtgacagagtgagagcctatctcaagaaaaaaaaaaaaaaaaaagatggcctgtatgacagtactactaagttccccaatcttactcccagagttttgataaaatatgtaggttttggttctgtaaaaaatgtcatgtaattgaaacagataatctacaacaatggcagagcattaaatatctcagcaccttctgacacaaagcaacaactttcatacacaagtatcaatgttgagaagcacaaagaagcttcaatatgattaagtataatcaccaacgtatgtttgatgatttatgctgaataagaagttaatgtctaataatctaaggtagtacagttctttgcaaatcaattctgtaatttaaa

SEQ ID NO: 686248 - DNA, 1051 bp, Homo sapiens
tgacagaatggaatagaactcagaaaataacctttatttactccaccttttacagtgcttatctgtgataaatgtacaatgttaaattgacttgaacatgcctagtatagaaatgctatttttttccttattaactgtaatatcattcattactttatgctgaaacaaagatgggaacacagagattaaattcccagtgatgataatgatcaggtaaacttagtacatttgagatgaccaaaatgaaaaaccttcacatggagaagtgatggattatcactaattgtgtttaacaaatgttaaaaaaaaaaacacttttccttttaagtgacttgacctgataatttctgacaaaagccctgttacagctgtccaaatttagcttaaagaattaacagaaagtatatagtgaagagatggcctggggctgggtgtggtggctcatgcccgtagtcccagtgctttgggaggcgaggcaggagagtcacttgaggccaggaatttgagaccagccaagacccagtctctacaaaccaatttaaaaagcttgtccaggtgtggtggtgcacacctgtagtgctggggaggctgaagttactggggaggctgaagcaggacratggcttgagcccaggagttctaagctgccgtgagctacaatcatgccactgcactccagcctgggtgacagagtgagagcctatctcaagaaaaaaaaaaaaaaaaaagatggcctgtatgacagtactactaagttccccaatcttactcccagagttttgataaaatatgtaggttttggttctgtaaaaaatgtcatgtaattgaaacagataatctacaacaatggcagagcattaaatatctcagcaccttctgacacaaagcaacaactttcatacacaagtatcaatgttgagaagcacaaagaagcttcaatatgattaagtataatcaccaacgtatgtttgatgatttatgctgaataagaagttaatgtctaataatctaaggtagtacagttctttgcaaatcaattctgtaatttaaa

SEQ ID NO: 686249 - DNA, 1051 bp, Homo sapiens
tgacagaatggaatagaactcagaaaataacctttatttactccaccttttacagtgcttatctgtgataaatgtacaatgttaaattgacttgaacatgcctagtatagaaatgctatttttttccttattaactgtaatatcattcattactttatgctgaaacaaagatgggaacacagagattaaattcccagtgatgataatgatcaggtaaacttagtacatttgagatgaccaaaatgaaaaaccttcacatggagaagtgatggattatcactaattgtgtttaacaaatgttaaaaaaaaaaacacttttccttttaagtgacttgacctgataatttctgacaaaagccctgttacagctgtccaaatttagcttaaagaattaacagaaagtatatagtgaagagatggcctggggctgggtgtggtggctcatgcccgtagtcccagtgctttgggaggcgaggcaggagagtcacttgaggccaggaatttgagaccagccaagacccagtctctacaaaccaatttaaaaagcttgtccaggtgtggtggtgcacacctgtagtgctggggaggctgaagttactggggaggctgaagcaggacgatggcttgagcccaggagttytaagctgccgtgagctacaatcatgccactgcactccagcctgggtgacagagtgagagcctatctcaagaaaaaaaaaaaaaaaaaagatggcctgtatgacagtactactaagttccccaatcttactcccagagttttgataaaatatgtaggttttggttctgtaaaaaatgtcatgtaattgaaacagataatctacaacaatggcagagcattaaatatctcagcaccttctgacacaaagcaacaactttcatacacaagtatcaatgttgagaagcacaaagaagcttcaatatgattaagtataatcaccaacgtatgtttgatgatttatgctgaataagaagttaatgtctaataatctaaggtagtacagttctttgcaaatcaattctgtaatttaaa

SEQ ID NO: 686250 - DNA, 1051 bp, Homo sapiens
tgacagaatggaatagaactcagaaaataacctttatttactccaccttttacagtgcttatctgtgataaatgtacaatgttaaattgacttgaacatgcctagtatagaaatgctatttttttccttattaactgtaatatcattcattactttatgctgaaacaaagatgggaacacagagattaaattcccagtgatgataatgatcaggtaaacttagtacatttgagatgaccaaaatgaaaaaccttcacatggagaagtgatggattatcactaattgtgtttaacaaatgttaaaaaaaaaaacacttttccttttaagtgacttgacctgataatttctgacaaaagccctgttacagctgtccaaatttagcttaaagaattaacagaaagtatatagtgaagagatggcctggggctgggtgtggtggctcatgcccgtagtcccagtgctttgggaggcgaggcaggagagtcacttgaggccaggaatttgagaccagccaagacccagtctctacaaaccaatttaaaaagcttgtccaggtgtggtggtgcacacctgtagtgctggggaggctgaagttactggggaggctgaagcaggacgatggcttgagcccaggagttctaagctgccgtgagctacaatcatgccactgcactccagcctgggtgacagagtgagagcctatctcaagaaaaaaaaaaaaaaaaaagatggcctgtatgacagtactactaagttccccaatcttactcccagagttttgataaaatatgtaggttttggttctgtaaaaaatgtcatgtaattgaaacagataatctacaacaawggcagagcattaaatatctcagcaccttctgacacaaagcaacaactttcatacacaagtatcaatgttgagaagcacaaagaagcttcaatatgattaagtataatcaccaacgtatgtttgatgatttatgctgaataagaagttaatgtctaataatctaaggtagtacagttctttgcaaatcaattctgtaatttaaa

SEQ ID NO: 686251 - DNA, 1081 bp, Homo sapiens
tggtagtcaatgtttttaaaagctatagataaaaaataaaaattactagtaaaatatatacggagtttttaatgagaagtattaatatgcagtgatgcttgttcttgctcaactaatttatatatttagttcaattctaatcaaaacaacttggaacttgaaaaatagtctgaaattcatttggaaaaataaatggctgagtataaataagatgttttgaaaaccataaataatttaggtgacttccaagagcatatattaagatattctcaagggttacaattttaaaaccagtatgattcatatggaacaatatacagactaatcaataaaataacagcccttgccagacttcaagaacttgaaatattttgcatatgataaaatcagtgtaaaattagaaaaaatgaatattaaatgcaaaaagctgaattaattggataattatttatttgataaagcacaacgttagatatatattttatgtcatatattcatatattaaaataacttccagatgtgttaagggaaaattgtagaaatsagcaaatagatgcaataaaataaaagtaaatggggataatctataaccttaatgttaggaatagattttgctaagtatggaattccaagtaaataacataaaaatgtaaacaaggtatcaaatctcatagaaaaaagatatataacatacatcccaacaaattacatatgtgtgcatgtatgtgtgtatgcacgtatctatgtatttttgtgcatatatattttcgaaaacacaaaaaggctcctaaacaaaagtacatgttacaaggaaaaacttaaataataaagtaatagttatgaccagtaaacctttaaaaatgtttttggcctcgttagaaactattgccaggcatattagaataacaataaaatacggccgggcgcggtggctcacgcctgtaatcctagcactttgggaggcaaaggcgggcagatcacgaggtcaggagatccaaaccatcctggctaacacggtgacaccccgtctctactaaaaatacaaaaaattagccgggcgtggtggcgggcacctgtagtc

SEQ ID NO: 686252 - DNA, 650 bp, Homo sapiens
aaactttttatataatttttgtgcatataattttggcttttagaactatgctaataatttataagccccccccccaaataaatacatagaataaacaagatattaggggaaaacctgaaatgggatttaaacagaaataactagaaataattattataaaaatatattacataaccatttgaattgtactcaactttgtttacatagttttatggattaatgagtccactgcatacatgtaaacaaagcacataacatgtatatcatacattatatatttatatattcacatacatgatagatagataggtctgagctctggctttattttctgtgaggccctagaagttaaaaactcctataacartgaatatatctaggtcccagatcttgatttctaaatagcattttcaacaagaaaacccggcctccaggtctccttaaaaaaagcctggagctgagaaagtgcataatcaacctagaaggtattcctgtattagaaagaaatgcttggaaaactatgggggcctaccacaaaggacacaagacccagctaaaagggactttcactggccccttgaaaataaaaatctgagattatttcagcaatagatacagaatcatactaatagaaaactatagggaaaaaa

SEQ ID NO: 686253 - DNA, 644 bp, Homo sapiens
gtctttcattagctgctttctaaagagttcattgttttgcttagcttaaactccagttaatatataatttttatacctatggaaatctattttaaaattgtattttactaaattagcctagagtgaattaaaaaaaaattgggcaggaaattatgatcattcaatggtgttatctacctgaaaatggagttgttttcttccaaaaaaaagacataaaaattatcttggatattttggagagggcagcccattatagaatgatagagaaaacagaaatttaacaaataagttaatacgtrtgtactcatataattataaatttatataagatatggaaaaatgaaaaggacatattagaatcaaagaaatagattaatatcaatggaacataaataacagttatgaaggatttctatgaggaaatgagctttagagttagacttgaatggcaaaaatgagttacctactatagaattagaagactggagcagaaaattaactactgtttttaaaaacttatttggaaaaatattcaatttgtacaaacagtgtaaagaaacatatcatacctaaagtgaagaaataaaaaaattaaaaagcatgcaaaaatcagaaactttagagatccataatcaatatacaaa

SEQ ID NO: 686254 - DNA, 658 bp, Homo sapiens
agtcccagctgctcaggaggctgaggcaggggaatcgcttgaacctggcaggcagagattgcagtgagccaagatcgcaccactgcactctagcctggtgacagagtgagactccgtctcaaaaaaaaaaaawaataataataataataattttaaaaatcatgaaatatgagtatatgggcaatatatgtcgtgatttataaaaattaatggtatcactgtattgaggatttggtttgttttgcttaaaaacatattgtacttcttcactgctttcatttttttttaaaacaaaacattggccttacttttttaaaatatttatttatacaactttcttccacagggctttaagcagctatttatttttgtagcacacgaaatagcacactgtctagaaaacagcagatttagaataactattgtaagataaatgaataaataagtaaatgaagccattaacacggacagagaattagagaaggacattctaaatgtgagtcaccaaatgtacaaacaggttggagttagagatgaagacagagcatttgagagacaataatcatcaccaaaattcagtaataatagcaatggttactgtaatgttgtttgtggaggtcttttctcttcgatagtacctgaacgttaatgtcattca

SEQ ID NO: 686255 - DNA, 658 bp, Homo sapiens
agtcccagctgctcaggaggctgaggcaggggaatcgcttgaacctggcaggcagagattgcagtgagccaagatcgcaccactgcactctagcctggtgacagagtgagactccgtctcaaaaaaaaaaaaaaataataataataataattttaaaaatcatgaaatatgagtatatgggcaatatatgtcgtgatttataaaaattaatggtatcactgtattgaggatttggtttgttttgcttaaaaacatattgtacttcttcactgctttcatttttttttwaaacaaaacattggccttacttttttaaaatatttatttatacaactttcttccacagggctttaagcagctatttatttttgtagcacacgaaatagcacactgtctagaaaacagcagatttagaataactattgtaagataaatgaataaataagtaaatgaagccattaacacggacagagaattagagaaggacattctaaatgtgagtcaccaaatgtacaaacaggttggagttagagatgaagacagagcatttgagagacaataatcatcaccaaaattcagtaataatagcaatggttactgtaatgttgtttgtggaggtcttttctcttcgatagtacctgaacgttaatgtcattca

SEQ ID NO: 686256 - DNA, 964 bp, Homo sapiens
agggtgcacccggcacctcagcccttactctctttctgtggaggagggagacctctcatgtggctcaggctttgagggattctaaagccagactccatctcagcaaggaccagagacactgagtaagcaggtgcctccaaaggtcttactaagccacaggtaggaaggaaaaagaaagaaatcaaaacaaaaccaggtaagagatcagaagaagacaggagaaggtggccaggtgcagtggctcatgcctgtaatcccagcactttgggaggccaaggcaggtggattgcttgaggtcaggagttcgagaccagcctggccaacatggcaaaacyctgtctctactaaacatacaaaacttagctgggcatggcggtgtgcgcctggaatcccagctactcatgaggctgaggcaggggaattgcttgaacctgggaagtttagtgggggttgcagtacactccagcctgggcgacagagactctgtctaaaaaaaaaaaaaaatagaagacagaaggcgagagtgagaagacgaagttgtgactggtaaacctaaaatggccatagacaattatttagttgactttggtgccaatggtcatctacttgtggaaatccctgtggctgtggacttgtaaccaggtagaaaggcttcttgtccatgttgctgcttccagacagcacagtatctaactcagcctgccacagcctcctcatcttgcctgcccttttgttgaaacacccttgttcctcatctgtgccatcaacaagtgttgattaggcacctactgtgtgcagagtgccagcaataataaaacacactcacttccctctaaagcagaggggtccaatatttggcttccctgattacactggaagaagaagaattatcttgggccacacctaaaatacactaacgctaatgatagctgacaagctaaaaacaaaaaaaaatcctcccaaa

SEQ ID NO: 686257 - DNA, 964 bp, Homo sapiens
agggtgcacccggcacctcagcccttactctctttctgtggaggagggagacctctcatgtggctcaggctttgagggattctaaagccagactccatctcagcaaggaccagagacactgagtaagcaggtgcctccaaaggtcttactaagccacaggtaggaaggaaaaagaaagaaatcaaaacaaaaccaggtaagagatcagaagaagacaggagaaggtggccaggtgcagtggctcatgcctgtaatcccagcactttgggaggccaaggcaggtggattgcttgaggtcaggagttcgagaccagcctggccaacatggcaaaactctgtctctactaaacatacaaaacttagctgggcatggcrgtgtgcgcctggaatcccagctactcatgaggctgaggcaggggaattgcttgaacctgggaagtttagtgggggttgcagtacactccagcctgggcgacagagactctgtctaaaaaaaaaaaaaaatagaagacagaaggcgagagtgagaagacgaagttgtgactggtaaacctaaaatggccatagacaattatttagttgactttggtgccaatggtcatctacttgtggaaatccctgtggctgtggacttgtaaccaggtagaaaggcttcttgtccatgttgctgcttccagacagcacagtatctaactcagcctgccacagcctcctcatcttgcctgcccttttgttgaaacacccttgttcctcatctgtgccatcaacaagtgttgattaggcacctactgtgtgcagagtgccagcaataataaaacacactcacttccctctaaagcagaggggtccaatatttggcttccctgattacactggaagaagaagaattatcttgggccacacctaaaatacactaacgctaatgatagctgacaagctaaaaacaaaaaaaaatcctcccaaa

SEQ ID NO: 686258 - DNA, 964 bp, Homo sapiens
agggtgcacccggcacctcagcccttactctctttctgtggaggagggagacctctcatgtggctcaggctttgagggattctaaagccagactccatctcagcaaggaccagagacactgagtaagcaggtgcctccaaaggtcttactaagccacaggtaggaaggaaaaagaaagaaatcaaaacaaaaccaggtaagagatcagaagaagacaggagaaggtggccaggtgcagtggctcatgcctgtaatcccagcactttgggaggccaaggcaggtggattgcttgaggtcaggagttcgagaccagcctggccaacatggcaaaactctgtctctactaaacatacaaaacttagctgggcatggcggtgtgcgcctggaatcccagctactcatgaggctgaggcaggggaattgcttgaacctgggaagtttagtgggggttgcagtacactccagcctgggcgacagagactctgtctaaaaaaaaaaaaaaatagaagacagaaggygagagtgagaagacgaagttgtgactggtaaacctaaaatggccatagacaattatttagttgactttggtgccaatggtcatctacttgtggaaatccctgtggctgtggacttgtaaccaggtagaaaggcttcttgtccatgttgctgcttccagacagcacagtatctaactcagcctgccacagcctcctcatcttgcctgcccttttgttgaaacacccttgttcctcatctgtgccatcaacaagtgttgattaggcacctactgtgtgcagagtgccagcaataataaaacacactcacttccctctaaagcagaggggtccaatatttggcttccctgattacactggaagaagaagaattatcttgggccacacctaaaatacactaacgctaatgatagctgacaagctaaaaacaaaaaaaaatcctcccaaa

SEQ ID NO: 686259 - DNA, 964 bp, Homo sapiens
agggtgcacccggcacctcagcccttactctctttctgtggaggagggagacctctcatgtggctcaggctttgagggattctaaagccagactccatctcagcaaggaccagagacactgagtaagcaggtgcctccaaaggtcttactaagccacaggtaggaaggaaaaagaaagaaatcaaaacaaaaccaggtaagagatcagaagaagacaggagaaggtggccaggtgcagtggctcatgcctgtaatcccagcactttgggaggccaaggcaggtggattgcttgaggtcaggagttcgagaccagcctggccaacatggcaaaactctgtctctactaaacatacaaaacttagctgggcatggcggtgtgcgcctggaatcccagctactcatgaggctgaggcaggggaattgcttgaacctgggaagtttagtgggggttgcagtacactccagcctgggcgacagagactctgtctaaaaaaaaaaaaaaatagaagacagaaggcgagagtgagaagacgaagttgtgaytggtaaacctaaaatggccatagacaattatttagttgactttggtgccaatggtcatctacttgtggaaatccctgtggctgtggacttgtaaccaggtagaaaggcttcttgtccatgttgctgcttccagacagcacagtatctaactcagcctgccacagcctcctcatcttgcctgcccttttgttgaaacacccttgttcctcatctgtgccatcaacaagtgttgattaggcacctactgtgtgcagagtgccagcaataataaaacacactcacttccctctaaagcagaggggtccaatatttggcttccctgattacactggaagaagaagaattatcttgggccacacctaaaatacactaacgctaatgatagctgacaagctaaaaacaaaaaaaaatcctcccaaa

SEQ ID NO: 686260 - DNA, 623 bp, Homo sapiens
ttttttttwaaatcttcagtcatggcatgtcttgcccatagagggaagatttgattttcaaaactagcaccaatatctcaagagggtggtgaagctgggtaataaaatttgaggtcacaaacaagggggactagggagcagtaaagttgaaatcctcctgtagctcataacccagcaataacagcaacatagtggtaagaattctattctcagggccgtggtcacgcctggaatctcagcactttgggaggccaaggggggtggatcacctgaggtcaggagtttaagaccagcctggccaacatagtgaaaccccgtctctattaaaaatacaaaaattagacaggcatggtggtgggcacctgtaatcccagctacttgggaggctgagacaggagaatcgctggaacccaggaggcagaggttgcagcaagttgagatcacaccactccactccaccctggacaacagagcaagactcgatctaaaaaaaaaaaagatttatattctctttctcaatgtgtaacgtatattttctcaacatgtaatctacattttgagatatattatcgctatatctgtttatatatatatatatacctatgtgtgtcaacacccacaca

SEQ ID NO: 686261 - DNA, 592 bp, Homo sapiens
actgcaacctccgcctcctgggttcaaacaattctgccacctcagcttcctgagtagctgggattacgggcacgcgccagcacaaccaggtcatttttgtacttttagtagagacggggtttcaccatgttggctaggctggtcttgaagtcccgacctcagataatccgcctgcctcggcctcccaaactgctgggattacaggcgtgagccacggctgcgcccggcaaattttggcattattattatcatagattctaaacagaagaccgagatgacgttccccagacttctgatccacaaagctgtgattaacgggtttcactttaagctggaaagtttktgtcaatttattaaagcagcaagagaaaactaatacagacacagaggtgagaggccaaagcaaagggaggaaaggaatgctgaatcccatggtcatttcagttttaagaaccatgaggatgattctgtctgtgacaagctggaccaaggaaactctctagaagtctattgtgccacaagcaacaggatggcattttgtggtatctatcttatttggagccattcaaacaactgctttgaaaaagtagga

SEQ ID NO: 686262 - DNA, 592 bp, Homo sapiens
actgcaacctccgcctcctgggttcaaacaattctgccacctcagcttcctgagtagctgggattacgggcacgcgccagcacaaccaggtcatttttgtacttttagtagagacggggtttcaccatgttggctaggctggtcttgaagtcccgacctcagataatccgcctgcctcggcctcccaaactgctgggattacaggcgtgagccacggctgcgcccggcaaattttggcattattattatcatagattctaaacagaagaccgagatgacgttccccagacttctgatccacaaagctgtgattaacgggtttcactttaagctggaaagtttgtgtcaatttattaaagcagcaagagaaaactaatacagacacagaggtgagaggccaaagcaaagggaggaaaggaatgctgaatcccatggtcatttcagttttaagaaccatgaggatgattctgtctgtgacaagctggaccaaggaaactctctagaagtctattgtgccacaagcaacaggatggcattttgtggtatctatcytatttggagccattcaaacaactgctttgaaaaagtagga

SEQ ID NO: 686263 - DNA, 1526 bp, Homo sapiens
aaaatacaaaaaaaaattatccgggcatggtgatgcatgcctgtaatcccagctgctcgggaggctgaggcaggagaatcacttgaacctgggaggtggaggttgtggtcagccgagattgcgccattgcactccagtctgggtgactgagccagactctgtctcaaaaaaaaaaaaaatcattgttaaagaaaatagtcacttattcatttccgccaagagatgyatatatcccttgaatctgcattaaaacattcagcttctcaaatcactttatttttcactgtgaacacaacagcattgcaaagtcccacaagtcctggttgttcctgtcctggccctccatgctgcacgcctccccaaccctgaccacataagcacaggctgcagcttcctctttccaccctgccagcctcttcccatgtgggctccttacttctgctcccaaggaaatgcgtatcactcaggctatccatgttaaccgtctcattgctggattcagttctgagtctcatctgctactgtcaagttccctaattgtctaaaaagctcatttctatgttctaagtctgcatagtattcagagagggcagtctgcagtttctaatctgcaaggacaactgcttctcatcccccaagctggtgggaggcacaaccttggatgcacacttcagctctgcttgtgatccccttgaatgaaggagctgagcctatagggggaaagcattcgttcacatggcagcaactcaacaccaaggactcgcatttatgctcagaaaaatgccacgaggtagtgcaaaagctgtcttgtgatttaataggtacagcagaagaaacagtgggctggagaaagaacgtcacatatggcccatgctgacctccctctccccacacggtgcttactgaaatgtcccacagtgaaatgtgaagtgagtttactgaatatttatttgcaactgaagtgtccttgggtatagtaaatggaaattttctctagctttagaattgctaataaaagcattttaggattcaggagctaaggcagtttcaggaagctgccagcaggtgataatcaggtgccatccctacagctgatgtgacatttttctctcaccagattaatttattgataactacatctaagagcataagttccatgaggtagtgagtcctgtgtgtcatctccattgctctggccccagtgccaggcacaggcccaggcacattgtgagtgctggaaaaacaggatttgaatgaatgagtgaatgaataaatgactatggaaaatttgagggttttcctgtacatcagtttttgttttgttttgttttgttttgttttgtttttgtttttgagatggagtctggctctgtctcccagatggagtgcaatggcatgatctcggctcactgcaacctccacttcccaggttcaggtgatcctcatgcctcagcctctcgagtagctgttattacaggtgcccgccaccacgcttagctaatttttatatttttagtagagacaga

SEQ ID NO: 686264 - DNA, 1526 bp, Homo sapiens
aaaatacaaaaaaaaattatccgggcatggtgatgcatgcctgtaatcccagctgctcgggaggctgaggcaggagaatcacttgaacctgggaggtggaggttgtggtcagccgagattgcgccattgcactccagtctgggtgactgagccagactctgtctcaaaaaaaaaaaaaatcattgttaaagaaaatagtcacttattcatttccgccaagagatgcatatatcccttgaatctgcattaaaacattcagcttctcaaatcactttatttttcactgtgaacacaacagcattgcaaagtcccacaagtcctggttgttcctgtcctggccctccatgctgcacgcctccccaaccctgaccacataagcacaggctgcagcttcctctttccaccctgccagcctcttcccatgtgggctccttacttctgctcccaaggaaatgcgtatcactcaggctatccatgttaaccgtctcattgctggattcagttctgagtctcatctgctactgtcaagttccctaattgtctaaaaagctcatttctatgttctaagtctgcatagtattcagagagggcagtctgcagtttctaatctgcaaggacaactgcttctcatcccccaagctggtgggaggcacaaccttggatgcacacttcagctctgcttgtgatccccttgaatgaaggagctgagcctatagggggaaagcattcgttcacatggcagcaactcaacaccaaggactcgcatttatgctcagaaaaatgccacgaggtagtgcaaaagctgtcttgtgatttaataggtacagcagaagaaacagtgggctggagaaagaaygtcacatatggcccatgctgacctccctctccccacacggtgcttactgaaatgtcccacagtgaaatgtgaagtgagtttactgaatatttatttgcaactgaagtgtccttgggtatagtaaatggaaattttctctagctttagaattgctaataaaagcattttaggattcaggagctaaggcagtttcaggaagctgccagcaggtgataatcaggtgccatccctacagctgatgtgacatttttctctcaccagattaatttattgataactacatctaagagcataagttccatgaggtagtgagtcctgtgtgtcatctccattgctctggccccagtgccaggcacaggcccaggcacattgtgagtgctggaaaaacaggatttgaatgaatgagtgaatgaataaatgactatggaaaatttgagggttttcctgtacatcagtttttgttttgttttgttttgttttgttttgtttttgtttttgagatggagtctggctctgtctcccagatggagtgcaatggcatgatctcggctcactgcaacctccacttcccaggttcaggtgatcctcatgcctcagcctctcgagtagctgttattacaggtgcccgccaccacgcttagctaatttttatatttttagtagagacaga

SEQ ID NO: 686265 - DNA, 606 bp, Homo sapiens
tgcatggaactttccacatggctacactgaaataatgtaaaccagagggatgtggtatggaacacaattcttctcaccacaaaagcctttattttcccagaacatatcagaattatagctcttcttagaacacatagaagaaaaagttactctaaccaacctgaccttcttattttatagatgagggacagacgtttagagggagcatgacttacccaaggtacaacacaatattccaagaggggtgcactgtgttttaaattcctcttctgtaaaatggcacttattacaatatttacctccacagtgagttagtacaccgtgtgcttagaacagtatctggcaygtagtaagggttcaataaaatgtacttgttatttgcctaaaaatgagagcgattgcacacacgtgaactgctaccacaatgccaagttcacaccatgttcatagaaagacatagcccttcagttcaagtaggttacattcttaaaatgaacaggggcatggttcatttattcaacaaatatatttgaacacttgcaccgtgctggatgatgagggtataataatgagtaaaatagaagtgatcccttcctttatggagca

SEQ ID NO: 686266 - DNA, 2144 bp, Homo sapiens
ctttacctgaagtcacagagcaggccaattctagagcagaaaacagacaagtctgatgtccaaaggctaccaggccatcacagaaactcaatgtgttcatctatgaaggaaaatacaagtgaaatgtcaaaggtctctttcagaagaatcaagggtgatttctcctaaagaagtggccaatatgaaaaatttcatgcaaccatcctaatgaaagccttcttttaagaataatgtacatcctcaactgcttttctgaatctcactgttggcagttttgcaacatatcctttgaaaaattygtttacattggatatcaaaatacatgataacatgtgagatcgtaatgtgacccaaagggaaatgtgttctttagattaattcaggtcaacaaacatgcagtgagctcctacattgttcttgaaagtgtgctaatataatattataatacaaagataactaaagcttaggccatctaaaggagtcaggcatgttcaatatctaaccatcttccctgctgtcatttatgaagtctgtgtgcccaagcacctgacatgcattatcttttgtaatctccagaacaacccttcaggtaggtattattattatccccatgtgtcagatgaaaaaacagacatagagaggtgaagtaatttgtccagtttcactcaggtaggaaggcagagagctgggaatgggacccaggcagtttgaccccagagccttcctccatctcccatctatacaactctgcttccttctaattcctgcaagccttaaagatggtatatgagtcatattcaccaagtgcccatattctaaccatcctttcttctgggccaacacactacattaggatagttatgcctattagcccatttagtctgctagcaattatgtgaagctggtattattaccctcatttttcaggtgaaaaaaataagattcagaccagttaaatagcaagactgaatgattaaacattggtgaggtgatcagagcaagggaaattcaagcaggacctttcccaactccccccaaaaaatgattagagttactatttatggtgcacttattatttgccagactttgtgctaaataaattatgtaagttatcctcacttctctttttgagaaaactgagtcatagagcatttcactgacttgtccaaaggtcatacagctaagcggtgacaggccaagaatccaatcctatttctgatcctaaaaattctgctcttagcccctgtgagtgcacagcattttcatataagaagagatgagaacatgcccctccagtggagagtagatgaacaaactgtgctatatccatataatggaatactacatggcaattgaaaggaactaattaatgatacatacaacatagatgaatctcaaatgcattatgctaagtgaaagaagccagatttaaatggttcatactataaggacagaaatcagatcaatggttaccaggggtagcgaggggaactgtgggaatgatggatctattccataccttgattatggtggttgcgtgactgtatgcatttatcaaaactttcagacctgcacactaaggaggatgtactttactgtttgtaacttatagcttaattttttaaatagaaaaaaagaaagaagagatgagagtggaagatcttttaggaagctcagctgacactgaatcttcacagagcactagctttcttcctagaaagtgtgttggatggaaacgtgttgatttcctctgcaaatatttactgagcacctactatgtgccaggtactgtattaggcatagagaatactgtagtgaacaggacagcgggattcctcaacctcttgcagcttatattctggtcgaagtttaaaaaataataacacaagataatttcatccggtggtaataaaataagaaaataaaacagggtcataagagacagtgaatatatggtaggtcagaggatatgactttagtgattagtcgtgtgcaggacactggaatcaccacattaaaactatcaatgaacaggaatggattcaagggtttttttaatcaaaattaatacacccagtgaactctcattgatcacgcatatattatctgcaggaatgttttggcctcagggaggtttcttcatg

SEQ ID NO: 686267 - DNA, 2144 bp, Homo sapiens
ctttacctgaagtcacagagcaggccaattctagagcagaaaacagacaagtctgatgtccaaaggctaccaggccatcacagaaactcaatgtgttcatctatgaaggaaaatacaagtgaaatgtcaaaggtctctttcagaagaatcaagggtgatttctcctaaagaagtggccaatatgaaaaatttcatgcaaccatcctaatgaaagccttcttttaagaataatgtacatcctcaactgcttttctgaatctcactgttggcagttttgcaacatatcctttgaaaaatttgtttacattggatatcaaaatacatgataacatgtgagatcgtaatgtgacccaaagggaaatgtgttctttagattaattcaggtcaacaaacatgcagtgagctcctacattgttcttgaaagtgtgctaatataatattataatacaaagataactaaagcttaggccatctaaaggagtcaggcatgttcaatatctaaccatcttccctgctgtcatttatgaagtctgtgtgcccaagcacctgacatgcattatcttttgtaatctccagaacaacccttcaggtaggtattattattatccccatgtgtcagatgaaaaaacagacatagagaggtgaagtaatttgtccagtttcactcaggtaggaaggcagagagctgggaatgggacccaggcagtttgaccccagagccttcctccatctcccatctatacaactctgcttccttctaattcctgcaagccttaaagatggtatatgagtcatattcaccaagtgcccatattctaaccatcctttcttctgggccaacacactacattaggatagttatgcctattagcccatttagtctgctagcaattatgtgaagctggtattattaccctcatttttcaggtgaaaaaaataagattcagaccagttaaatagcaagactgaatgattaaacattggtgaggtgatcagagcaagggaaattcaagcaggacctttcccaactccccccaaaaaatgattagagttactatttatggtgcacttattatttgccagactttgtgctaaataaattatgtaagttatcctcacttctctttttgagaaaactgagtcatagagcatttcactgacttgtccaaaggtcatacagctaagcggtgacaggccaagaatccaatcctatttctgatcctaaaaattctgctcttagcccctgtgagtgcacagcattttcatataagaagagatgagaacatgcccctccagtggagagtagatgaacaaactgtgctatatccatataatggaatactacatggcaattgaaaggaactaattaatgatacatacaacatagatgaatctcaaatgcattatgctaagtgaaagaagccagatttaaatggttcatactataaggacagaaatcagatcaatggttaccaggggtagcgaggggaactgtgggaatgatggatctattccataccttgattatggtggttgcgtgactgtatgcatttatcaaaactttcagacctgcacactaaggaggatgtactttactgtttgtaacttatagcttaattttttaaatagaaaaaaagaaagaagagatgagagtggaagatcttttaggaagctcagctgacactgaatcttcacagagcactagctttcttcctagaaagtgtgttggatggaaacgtgttgatttcctctgcaaatatttactgagcacctactatgtgccaggtactgtattaggcatagagaatactgtagtgaacaggacagcgggattcctcaacctcttgcagcttatattctggtcgaagtttaaaaaataataacacaagataatttcatccggtggtaataaaataagaaaataaaacagggtcataagagacagtgaatatatggtaggtcagaggatatgactttagtgattagtcgtgtgcaggacactggaatcaccacattaaaactatcaatgaacaggaatggattcaagggtttttttaatcaaaattaatacacccagtgaactctcattgatcaygcatatattatctgcaggaatgttttggcctcagggaggtttcttcatg

SEQ ID NO: 686268 - DNA, 1519 bp, Homo sapiens
tgtgcagcaatagagagctaatatagatttctcccttaaaattaaaaagcagacaaaagacctacatttctgctgagggttgatgggtggactgtcacttatttgggtttatttcagtcattcttcatctaacatggcgtggtattaagaacagcacactgccgacaatgctgatagattcatttggctaagccacacctctgatatcacccttccccaatttaaaaactttcattggttcccactgactgaatgaaagaagctcaacttttttgccctctataaactgttaaaatgatcatcctaaaatatcagttagcctgttactcttgtgcttataaaagtctgttcaattctggctgccaactaggttaaatctgtgttccacaacatcaagtcctgccatgacctggcccctcatacctttctgtcttacatttttctttttcttttcttttcttttttttttttttttgagacaaggtcttgctctgtcgctcaggctacagtgtagtggcatgatcatggctcactgcaacctcaaactcctgggctcaagcgatactctcatctcagcctcctgagtggctgaggccacaggtatatgccactatatctggctaagttttaaaatattttgtagagatggggtcttgttatgttgcccaggggtcttgaattcctaggctcaaatcctcctgccttggcctccaaaagtgctgagattacaggcatgatccactgtgcctggcctctgcttcatgcttagtgtctcagcaacacaggacagcttgtcatatgctccccaacacacatattgtgccatctcctgccctccccacttcccatctttacgacatctttccctttgcctcaactgctattctattcttttcattctccatattcccttctctggaaaattcattcttaaagttcagctctgatcatctgagtaataattagaaaacatactcatctgcttggatctgcatagactgtctccagaagaatccagaacaactcggtgacattggttatctctggggagggagtattgagtaggcctgagggatasactttaagagagggaaactttactgtaaaccattttgtgcctgttaaattttgtagcatatgaatatatttctctgttcaattaaatattaaatgaagcatttataatgaaggaaaaagttaatttctaaatttacctttgctgggaagccttccctgactttctcttaccgagttgattgtgtgaagtcctgttcatgtatctgtcaccccctccagtctctactgtcctagaattcagggattgctccttattcctcccttatccttgtccctagtggtctagcacagtgcctgctacttcataagccctcaaaatagctgaggaataaaacaactacacttgcaaatgtatttcccaccacctctcagactcctctatggtcactggccatttctgcctctggggctagctcctactgtcccctctccttggatttcc

SEQ ID NO: 686269 - DNA, 1984 bp, Homo sapiens
tcggctgggtgcagtggctcacatctgtaatcccagcactttgggaggccraggcgggtggatcacaatgtcaggagatcgagaccatcctagctaacacggtgaaaccccgtctctactaaaaaaatacaaaaaattagctgggcatggtggtgggcgcctatagtgccagctactcgggaggctgaggcaggagaatggcgtgaacccgggaggcggagcttgcagtgagcccacatcgagccactgcactacagcctgggcgacagatcgagactccacctcaaaaaataaataaataaataaataaaataaaataaaataaaatgatttagtaaacatctcccaaggtttctctgaccttacccatacgtgtacaaatttccataaacagggatcatgtgtttgtctatttgtgtttcactcagcatgttttcctgtctattagtattgatccacatggtttttaataagttcatagtattgcagacataaatgtgccataatgtaccaaatcattctcttatttgatagccactttggatttttgctcatacaaataatgtgacatgaatgtttctgaacataaacctcttgcctattccaatattctttgaatctgtgtatcttcccagtccctagcatgttttggagaatgttctgaactaaatattcttaatatgaatgtgaggtggttcttctttacacaaagtacacatctaggcagaggatctttattaattctacttctgacactcctattggagaaaaaagaggaagaagatttgactgtgtgatcacatctgtaatgtctttagtcagggccttgcacatagtatgtgctcaataaataatagctgtgactattattgttgttgatgttatttcttttgcttggtccaagtgtccttcctgaaaaagacctgaacacggcatagggtgacctgaacaacagaaaatgtgaagaaaactacatttgtagtcactaaaagtttctgactctggctgtaattgtcagttgtagaaacaactaatcacccagagaatgcagttcactcaagcatcctctttagacatacagtgcaatggctgtgaaacggagacacagaccacatgttccatggaagccatgataatgatcagatatatttactcatttgtgatgaagaaagggagcacaatttttctggcttttgacacattattatctcggttccaactttcttatcccaaggaaatagtaagacatgttggacttttatcaatggcattccctgtcagatcctgtgggctaccactccatgttggatcactcccagagccttccacaaaagcctctaaaactgtctgctttaaacccttcaattataaagcagttaaaaaaacaaaaccctcagacataactgcttctgcctaaatctaccatgctgtttgtaagactgtatgtttatgatatgattttgaacatcatcttcaggaaaaaattcttactggtttatgctcagatttatgggtctattctttgccccaaggtgagatgaaagcaaaatcaataaggttagttttggattgcttgaagtaagtaacacaagccaattttcagtaacctcagatcagtgaagtaggagaaaattagataaagagagaaaaatcaagagggcacgcttgtgtctctaggcacatcatttgtgtcgatgacagaattcatttaaaaattataagcaatcgtgttttagtagcattagagaaaacagcataggttgtattaaatttgatactagaagtactagaaataacaacaaaaatgttttgccctggcacctccctgacccccaatcagtaaccagcctcattagtcatggcacctctcacatgaggcccctatcaccgctttcataaatatagtaagattctctgaatcaaaatcctgtgttgtctcaaaaaataattataaataataattatgattatcatttattgagca

SEQ ID NO: 686270 - DNA, 1984 bp, Homo sapiens
tcggctgggtgcagtggctcacatctgtaatcccagcactttgggaggccgaggcgggtggatcacaatgtcaggagatcgagaccatcctagctaacacggtgaaaccccgtctctactaaaaaaatacaaaaaattagctgggcatggtggtgggcgcctatagtgccagctactcgggaggctgaggcaggagaatggcgtgaacccgggaggcggagcttgcagtgagcccacatcgagccactgcactacagcctgggcgacagatcgagactccacctcaaaaaataaataaataaataaataaaataaaataaaataaaatgatttagtaaacatctcccaagktttctctgaccttacccatacgtgtacaaatttccataaacagggatcatgtgtttgtctatttgtgtttcactcagcatgttttcctgtctattagtattgatccacatggtttttaataagttcatagtattgcagacataaatgtgccataatgtaccaaatcattctcttatttgatagccactttggatttttgctcatacaaataatgtgacatgaatgtttctgaacataaacctcttgcctattccaatattctttgaatctgtgtatcttcccagtccctagcatgttttggagaatgttctgaactaaatattcttaatatgaatgtgaggtggttcttctttacacaaagtacacatctaggcagaggatctttattaattctacttctgacactcctattggagaaaaaagaggaagaagatttgactgtgtgatcacatctgtaatgtctttagtcagggccttgcacatagtatgtgctcaataaataatagctgtgactattattgttgttgatgttatttcttttgcttggtccaagtgtccttcctgaaaaagacctgaacacggcatagggtgacctgaacaacagaaaatgtgaagaaaactacatttgtagtcactaaaagtttctgactctggctgtaattgtcagttgtagaaacaactaatcacccagagaatgcagttcactcaagcatcctctttagacatacagtgcaatggctgtgaaacggagacacagaccacatgttccatggaagccatgataatgatcagatatatttactcatttgtgatgaagaaagggagcacaatttttctggcttttgacacattattatctcggttccaactttcttatcccaaggaaatagtaagacatgttggacttttatcaatggcattccctgtcagatcctgtgggctaccactccatgttggatcactcccagagccttccacaaaagcctctaaaactgtctgctttaaacccttcaattataaagcagttaaaaaaacaaaaccctcagacataactgcttctgcctaaatctaccatgctgtttgtaagactgtatgtttatgatatgattttgaacatcatcttcaggaaaaaattcttactggtttatgctcagatttatgggtctattctttgccccaaggtgagatgaaagcaaaatcaataaggttagttttggattgcttgaagtaagtaacacaagccaattttcagtaacctcagatcagtgaagtaggagaaaattagataaagagagaaaaatcaagagggcacgcttgtgtctctaggcacatcatttgtgtcgatgacagaattcatttaaaaattataagcaatcgtgttttagtagcattagagaaaacagcataggttgtattaaatttgatactagaagtactagaaataacaacaaaaatgttttgccctggcacctccctgacccccaatcagtaaccagcctcattagtcatggcacctctcacatgaggcccctatcaccgctttcataaatatagtaagattctctgaatcaaaatcctgtgttgtctcaaaaaataattataaataataattatgattatcatttattgagca

SEQ ID NO: 686271 - DNA, 1984 bp, Homo sapiens
tcggctgggtgcagtggctcacatctgtaatcccagcactttgggaggccgaggcgggtggatcacaatgtcaggagatcgagaccatcctagctaacacggtgaaaccccgtctctactaaaaaaatacaaaaaattagctgggcatggtggtgggcgcctatagtgccagctactcgggaggctgaggcaggagaatggcgtgaacccgggaggcggagcttgcagtgagcccacatcgagccactgcactacagcctgggcgacagatcgagactccacctcaaaaaataaataaataaataaataaaataaaataaaataaaatgatttagtaaacatctcccaaggtttctctgaccttacccataygtgtacaaatttccataaacagggatcatgtgtttgtctatttgtgtttcactcagcatgttttcctgtctattagtattgatccacatggtttttaataagttcatagtattgcagacataaatgtgccataatgtaccaaatcattctcttatttgatagccactttggatttttgctcatacaaataatgtgacatgaatgtttctgaacataaacctcttgcctattccaatattctttgaatctgtgtatcttcccagtccctagcatgttttggagaatgttctgaactaaatattcttaatatgaatgtgaggtggttcttctttacacaaagtacacatctaggcagaggatctttattaattctacttctgacactcctattggagaaaaaagaggaagaagatttgactgtgtgatcacatctgtaatgtctttagtcagggccttgcacatagtatgtgctcaataaataatagctgtgactattattgttgttgatgttatttcttttgcttggtccaagtgtccttcctgaaaaagacctgaacacggcatagggtgacctgaacaacagaaaatgtgaagaaaactacatttgtagtcactaaaagtttctgactctggctgtaattgtcagttgtagaaacaactaatcacccagagaatgcagttcactcaagcatcctctttagacatacagtgcaatggctgtgaaacggagacacagaccacatgttccatggaagccatgataatgatcagatatatttactcatttgtgatgaagaaagggagcacaatttttctggcttttgacacattattatctcggttccaactttcttatcccaaggaaatagtaagacatgttggacttttatcaatggcattccctgtcagatcctgtgggctaccactccatgttggatcactcccagagccttccacaaaagcctctaaaactgtctgctttaaacccttcaattataaagcagttaaaaaaacaaaaccctcagacataactgcttctgcctaaatctaccatgctgtttgtaagactgtatgtttatgatatgattttgaacatcatcttcaggaaaaaattcttactggtttatgctcagatttatgggtctattctttgccccaaggtgagatgaaagcaaaatcaataaggttagttttggattgcttgaagtaagtaacacaagccaattttcagtaacctcagatcagtgaagtaggagaaaattagataaagagagaaaaatcaagagggcacgcttgtgtctctaggcacatcatttgtgtcgatgacagaattcatttaaaaattataagcaatcgtgttttagtagcattagagaaaacagcataggttgtattaaatttgatactagaagtactagaaataacaacaaaaatgttttgccctggcacctccctgacccccaatcagtaaccagcctcattagtcatggcacctctcacatgaggcccctatcaccgctttcataaatatagtaagattctctgaatcaaaatcctgtgttgtctcaaaaaataattataaataataattatgattatcatttattgagca

SEQ ID NO: 686272 - DNA, 871 bp, Homo sapiens
tttcaaaaaaggttttcaaaaaaaaaaaaaaggtttcccacttttggagaggccttgtctgaaggtcctgctccctggcactgagaaatctcccatccagagagttctatttggctgttggctccatgccagggaatggcagctaaagctactggatccatccagaataataataagggacaagacccttgagactacaccagccaacatttctcaaagcatatttcatggaacacctactccagggtaccttgaaagatgttagggataaaaaaatgttcgcgggcagtgaagtctgggaaagcctgagctgaagaaagctggatggacaggttagtttgcaacaggactactgagagccttgactgtgttggtgtgtatcgtgaatgtctgagagaagaacaagcatatagtgtttccccaaattatttgacattgtaacttaatttagattctcccaaaagcagagacaaaagcttggtatcaagtgtagtttatttgggagttgattccagtgatcagaaatgagggggtggaaagtatgaaaagaaaaarcaaaaggcaataaaagtgcataatgggctggtttccacggtgatcaagtagaaatcagtattgctggaaaatctaagaaggaccatataaaaaatacgtaaaaattgtgccactaaaaggcgaagcaaccagggcttacattctctgttggttataggttgcccctaagaagttaagtgccctgcacttcctgggttacagctacatgctatggtttgagtgtcccctcccaaactcgtgttggaatttaattgctattttaaagttttaagaggtgattaggtcatgagggctataccctcattaatggattaat

SEQ ID NO: 686273 - DNA, 458 bp, Homo sapiens
tgtttgaggaattgttgctctttatactctttctggtaattgagctattaaatacttctctgtacttctaggtactagagtgttattgaacatactaacattttatacttactgtttgtgatatgtgggcatagagatatttcttggtaaaaataatactttgtactaaaaaaattcttgartttctgtgtttgtgatatattcataaaagattagaaattcttctaagagttaaagttagattaaaaattatattttaacatgggatgcttatataccacgtttattaagtgtttgtaaccccatttgtatttttttctttttttttgagacagagtgttgctctgtcgcccaagctcgagtgagtgcagtggcacaatctcagctcactgcagcctccaccttccaggttcaagtgattcccctgcctcagcctcccgattagctgggattacagg

SEQ ID NO: 686274 - DNA, 671 bp, Homo sapiens
ctgtgagcactccaattttagacaagttttccataaaaagttcaaattgcaggaagtggctgtcatccaaaaacacttcctgtgtaaggactcctttccctgttcttcaaggtgcctttaaaagaagtgagtctagttccaggacttgccttaattatagatactctctttatctgtttataaggtatagtttagttatttttctagtctcttggcaaataacttctaacatggatttgagttcatgtttaacataaaaggattttaccaaaaaaagtataagaaaagcaattaaatttagagcttctgaaaagtgtatctttgacagctggtatatttttgtattgtttatacttgtataaaatgtgtaaccttaaagagaagggtttatttcaaaaggatattatccgatttgtaagttctctgatgcttatctgactcctaagtttaaaacttgaaaaaccatgtcttgaagatttttcttacagagtagctgcttgtcttcctattgatgatgtattgagaattcagctccttaaaattggcagtgctatccagcgacttcgctgtgaattagacattatgaataaagtgagtaaagtgaatatgtttttgatgcccatgttttattcaggctggagaactaggatgctctgttggrgccaatggag

SEQ ID NO: 686275 - DNA, 1091 bp, Homo sapiens
gctcggactacaggcgcacaccgccatgcctggctaattttttgtatttttagtagaaatggggtttcaccatgttagccagcatggtctcatctcctgacctcgtgatccacccgcctcggcctcccaaagtgcggggattacaggtgtgagccaccacacccggcccatccaagtttcrattatgtctttatgctttgattctttaaatcatataacaggtatttcttttcaccaaaatcattttgttgtgaaccatcaccgatttccatgactacctaaaaccgtaagctgtatgaaggcgaacactttcactcgttcattaccacgtttaatgcacctaacacagggattgacctgtggtaagcattcaaacatctgtgtaattaataaatcaatggaggaaatatcaatcaaaaagaaaaatggacatttaaaaagatgacttaaaattgtaggaaagatgacataaagtatatgtgcgttctgggaatgaaaatacaatatgaagtagctaagtaattttcactcataagtcatagggtgctaggtctccactggagacagacatttgggatgtcaccattttgtacactgacctgctgtgggtttcgtatgaccactgttatgctctagtcatgatattaaaactatcattttttatttttaaaaattcttacctgaagtatcttaaaattctaagataatcctcttgtattctctgtttagcatgtccaacaaatctaactttcttattttttaaatcttcataaccattaaagtagtcaaataaagtgccatcaaaacctattcattagaaaaggagggagaaaaatcactattggcaaataagaatttgaaaacacaagaaaatcagctaaacactatcacaaacagtaaaaattcagcagagtgaacagttattaaaacacatacgtattcatacatatcaactatcaaatggaagacaataaaagactgtcttttagtctgtttagctgcatttacaattgcaactaaaaagataatccaagaataaactaaacaagaaatatgcaaaacttgtatgaggtggagtggagccaacaaga

SEQ ID NO: 686276 - DNA, 1091 bp, Homo sapiens
gctcggactacaggcgcacaccgccatgcctggctaattttttgtatttttagtagaaatggggtttcaccatgttagccagcatggtctcatctcctgacctcgtgatccacccgcctcggcctcccaaagtgcggggattacaggtgtgagccaccacacccggcccatccaagtttcgattatgtctttatgctttgattctttaaatcatataacaggtatttcttttcaccaaaatcattttgttgtgaaccatcaccgatttccatgactacctaaaaccgtaagctgtatgaaggcgarcactttcactcgttcattaccacgtttaatgcacctaacacagggattgacctgtggtaagcattcaaacatctgtgtaattaataaatcaatggaggaaatatcaatcaaaaagaaaaatggacatttaaaaagatgacttaaaattgtaggaaagatgacataaagtatatgtgcgttctgggaatgaaaatacaatatgaagtagctaagtaattttcactcataagtcatagggtgctaggtctccactggagacagacatttgggatgtcaccattttgtacactgacctgctgtgggtttcgtatgaccactgttatgctctagtcatgatattaaaactatcattttttatttttaaaaattcttacctgaagtatcttaaaattctaagataatcctcttgtattctctgtttagcatgtccaacaaatctaactttcttattttttaaatcttcataaccattaaagtagtcaaataaagtgccatcaaaacctattcattagaaaaggagggagaaaaatcactattggcaaataagaatttgaaaacacaagaaaatcagctaaacactatcacaaacagtaaaaattcagcagagtgaacagttattaaaacacatacgtattcatacatatcaactatcaaatggaagacaataaaagactgtcttttagtctgtttagctgcatttacaattgcaactaaaaagataatccaagaataaactaaacaagaaatatgcaaaacttgtatgaggtggagtggagccaacaaga

SEQ ID NO: 686277 - DNA, 1091 bp, Homo sapiens
gctcggactacaggcgcacaccgccatgcctggctaattttttgtatttttagtagaaatggggtttcaccatgttagccagcatggtctcatctcctgacctcgtgatccacccgcctcggcctcccaaagtgcggggattacaggtgtgagccaccacacccggcccatccaagtttcgattatgtctttatgctttgattctttaaatcatataacaggtatttcttttcaccaaaatcattttgttgtgaaccatcaccgatttccatgactacctaaaaccgtaagctgtatgaaggcgaacactttcactcgttcattaccacgtttaatgcacctaacacagggattgmcctgtggtaagcattcaaacatctgtgtaattaataaatcaatggaggaaatatcaatcaaaaagaaaaatggacatttaaaaagatgacttaaaattgtaggaaagatgacataaagtatatgtgcgttctgggaatgaaaatacaatatgaagtagctaagtaattttcactcataagtcatagggtgctaggtctccactggagacagacatttgggatgtcaccattttgtacactgacctgctgtgggtttcgtatgaccactgttatgctctagtcatgatattaaaactatcattttttatttttaaaaattcttacctgaagtatcttaaaattctaagataatcctcttgtattctctgtttagcatgtccaacaaatctaactttcttattttttaaatcttcataaccattaaagtagtcaaataaagtgccatcaaaacctattcattagaaaaggagggagaaaaatcactattggcaaataagaatttgaaaacacaagaaaatcagctaaacactatcacaaacagtaaaaattcagcagagtgaacagttattaaaacacatacgtattcatacatatcaactatcaaatggaagacaataaaagactgtcttttagtctgtttagctgcatttacaattgcaactaaaaagataatccaagaataaactaaacaagaaatatgcaaaacttgtatgaggtggagtggagccaacaaga

SEQ ID NO: 686278 - DNA, 655 bp, Homo sapiens
agaggccaggagcagtggctcatgcctgtaatcccagcgctttgggtggccgaggcaggtggatcacctgaggtcaggagttggagaccagcctggccaacatggtgaaacccygtctctactgaaaatacaaaaattagctgggcatggtggcccgtccctgtaatcccagcgactctggaggttgaggcaggagaatcgcttgaacccaggaagcggaggttgcagtgaaccaagatcacgccactgcaccccaggctgggcgatgagtgagactctgtctcaaaaaaaaaaaaaaaaagatataggaagattgtctgcagggttgttccagcacaggtccagtacataggtcaaagcagtaggattctggccccttcatattccttgatctcatgttattgtgcatcatgaggaaacaagaagcagaaaaggacacttaggaagggtagtacagcatacctggctttgcctgtgtcatgtagataaaaattctccgcataaaacagttgccaggcacagggaatatagcagctcccacagcagcctccatgctgatgattcctacagagacccaatcagggtagctttgtattagacgcatggcaattcaccaaggcctcacccatgaacagggtcttaaagacacaagcat

SEQ ID NO: 686279 - DNA, 655 bp, Homo sapiens
agaggccaggagcagtggctcatgcctgtaatcccagcgctttgggtggccgaggcaggtggatcacctgaggtcaggagttggagaccagcctggccaacatggtgaaaccccgtctctactgaaaatacaaaaattagctgggcatggtggcccgtccctgtaatcccagcractctggaggttgaggcaggagaatcgcttgaacccaggaagcggaggttgcagtgaaccaagatcacgccactgcaccccaggctgggcgatgagtgagactctgtctcaaaaaaaaaaaaaaaaagatataggaagattgtctgcagggttgttccagcacaggtccagtacataggtcaaagcagtaggattctggccccttcatattccttgatctcatgttattgtgcatcatgaggaaacaagaagcagaaaaggacacttaggaagggtagtacagcatacctggctttgcctgtgtcatgtagataaaaattctccgcataaaacagttgccaggcacagggaatatagcagctcccacagcagcctccatgctgatgattcctacagagacccaatcagggtagctttgtattagacgcatggcaattcaccaaggcctcacccatgaacagggtcttaaagacacaagcat

SEQ ID NO: 686280 - DNA, 655 bp, Homo sapiens
agaggccaggagcagtggctcatgcctgtaatcccagcgctttgggtggccgaggcaggtggatcacctgaggtcaggagttggagaccagcctggccaacatggtgaaaccccgtctctactgaaaatacaaaaattagctgggcatggtggcccgtccctgtaatcccagcgactctggaggtwgaggcaggagaatcgcttgaacccaggaagcggaggttgcagtgaaccaagatcacgccactgcaccccaggctgggcgatgagtgagactctgtctcaaaaaaaaaaaaaaaaagatataggaagattgtctgcagggttgttccagcacaggtccagtacataggtcaaagcagtaggattctggccccttcatattccttgatctcatgttattgtgcatcatgaggaaacaagaagcagaaaaggacacttaggaagggtagtacagcatacctggctttgcctgtgtcatgtagataaaaattctccgcataaaacagttgccaggcacagggaatatagcagctcccacagcagcctccatgctgatgattcctacagagacccaatcagggtagctttgtattagacgcatggcaattcaccaaggcctcacccatgaacagggtcttaaagacacaagcat

SEQ ID NO: 686281 - DNA, 655 bp, Homo sapiens
agaggccaggagcagtggctcatgcctgtaatcccagcgctttgggtggccgaggcaggtggatcacctgaggtcaggagttggagaccagcctggccaacatggtgaaaccccgtctctactgaaaatacaaaaattagctgggcatggtggcccgtccctgtaatcccagcgactctggaggttgaggcaggagaatcgcttgaacccaggaagcrgaggttgcagtgaaccaagatcacgccactgcaccccaggctgggcgatgagtgagactctgtctcaaaaaaaaaaaaaaaaagatataggaagattgtctgcagggttgttccagcacaggtccagtacataggtcaaagcagtaggattctggccccttcatattccttgatctcatgttattgtgcatcatgaggaaacaagaagcagaaaaggacacttaggaagggtagtacagcatacctggctttgcctgtgtcatgtagataaaaattctccgcataaaacagttgccaggcacagggaatatagcagctcccacagcagcctccatgctgatgattcctacagagacccaatcagggtagctttgtattagacgcatggcaattcaccaaggcctcacccatgaacagggtcttaaagacacaagcat

SEQ ID NO: 686282 - DNA, 655 bp, Homo sapiens
agaggccaggagcagtggctcatgcctgtaatcccagcgctttgggtggccgaggcaggtggatcacctgaggtcaggagttggagaccagcctggccaacatggtgaaaccccgtctctactgaaaatacaaaaattagctgggcatggtggcccgtccctgtaatcccagcgactctggaggttgaggcaggagaatcgcttgaacccaggaagcggaggttgcagtgaaccaagatcacgccactgcaccccaggctgggcgatgagtgagactctgtctcaaaaaaaaaaaaaaaaagatatagraagattgtctgcagggttgttccagcacaggtccagtacataggtcaaagcagtaggattctggccccttcatattccttgatctcatgttattgtgcatcatgaggaaacaagaagcagaaaaggacacttaggaagggtagtacagcatacctggctttgcctgtgtcatgtagataaaaattctccgcataaaacagttgccaggcacagggaatatagcagctcccacagcagcctccatgctgatgattcctacagagacccaatcagggtagctttgtattagacgcatggcaattcaccaaggcctcacccatgaacagggtcttaaagacacaagcat

SEQ ID NO: 686283 - DNA, 638 bp, Homo sapiens
agggatcttgggggccatctcagaattctgcctaccacatgttagtaattgatctcttctggaatcagtcctttcctgctcagtcaatgttatttgtggtaggatttagggtaatcagacctagccttggccaattggtgtaaccattgtctgggccacagtggtcagatcagaaatgggcacctgcctcaagcaagcccaatcagacctaacctggggacttttgctgaagtaactaggaaagatctctctctctctctctctctctctctctctctctctctttcttgttattgcggaagtgttaggctgtaaacttagagctgatggtggacaccatgtgctwtgattcaaatgaccccccaaaactcatgttgaaactgaatcccaaaagtgggagcattgagaggtgggacctttaagaagcgattgtatccctcttgagggcagagcctttactgaccacctaatgttttattaaagcttgttctgcaccacccctatccctaccatcaccatctggagctctcgatcctttcctccagatttctttgctccataatatttatcactatctgatacaggggtgtgtggatgtgaacatgtatatgtgtgcatgtgtgtgtttatggtccgcc

SEQ ID NO: 686284 - DNA, 622 bp, Homo sapiens
ttttgtggtttttcggctgccacagacttcttggctcctgcaggccatctggacatatatgtgcaggtcacaggggttacaatggctgagcttcggctcagaggcctgacagtttactccataaattctagttgctttgatctcccagctcgttcggtctttgtctcgcctattcagcaagggtgctatgtttaggttcctattctgtttgacctagaaaatgaggtcaggcaaagtgacttatgcctgtaatccaagaactttgggaggccgaggagggtggatcacctgaggtcaggagtttgagaccagcctggccaacatagcgaaacccaatctcaactaaaaatacaaaaatattagccgrtgtggtggtgtgcacctgtggtaccaactacttgggaggctgaggtaggagaatcccttgaacccaggaggcagaggttgcagtgagccaagattgcaccactgcactccagcctgggtgacagagtgagactccgcctcacaaaaaaaataaataaataaataaaagaaattgaacagtacactggaaaaattgttgggttcactttaatagtttttccttcttttaccactcctggttgcatatcatctattg

SEQ ID NO: 686285 - DNA, 611 bp, Homo sapiens
tgcagtgagccgagatcacaccattgcactccagcctgggtgacaagagcgagacaaaaataaataaataaataaataaataaataaataaataaataagaaaagtggaagatcttttaggtcagctggtaggatatgtagaattgtacaggatatatgaggcatcaatccaactttctggcattatttcccattccttttcaccttcccaccttttccccaaattctaaccattccattttacagtgttcctcaatgattacacttattgattacattataaataatcttccctagccaaaaatgactttgtcccttctttatacttttccgtaccttccagatttycagtattaatcatttactcctctctgtgaagcctttcacatctactttgttgtgagtcctgtatgtgtgagatacacgaagataaggcacagtccctccatgttttcaacgagttcaggacctagaaccaagggtcccaatggactcagtgcctctcttgcagcactcacttgtcagttgtaaatcagatacctatttgtacacgtctaacactgccttcccaaagttatgagcaccatcaccttgacatatttcatgcatcc

SEQ ID NO: 686286 - DNA, 651 bp, Homo sapiens
atgcccagctaatttttgtatttttagtagagacagggtttcaccatgttgaccaggttggtcttgaacttctgacctcaggtgatccacccacctcggcctcccaaagtgctgggattacaggcatgaaccaccgtgcctggccgagtttgagttctaattaggataaacggcatttctgggactcagattctctatgaaacgtggataacagtgtatggtagaatacaaaaataacacaacttctcctatccctgtatatacaccccgtagcaatgtgactttactgcctttaatctgggcttaaatatataacctgtgttgtcctatgaaacattagcaaggtgatataagcagaggtttaaaaagcgcttggacagtggggcctgccctctagagattgccatgtggagaagcctgtggacacaaagcccgccagctggtaagcagcaccaactgtcagacataagagtcaggccatcttagaccctccagccccagtcaagccaccagatgactgcagctacataagtgaccccacatgagaccagacagaccagaagaactttacagctgagctgagctcaaactacygacccacagattcataagtaaattaaatggctactgttttaagccactaagctatag

SEQ ID NO: 686287 - DNA, 1437 bp, Homo sapiens
taaaaatgagggaaactgtttcaagtaacactcagactggcagctgttctctttccaccaagaagcccaggttgtctaacacatggctctgagatgaaggcatttcaggaacacaggtgtaagggctaaattggaggagagtgatgctcccaggatttgcaggattttattcctaataataaatagaacaagaaaatttacagaatgagtgagaatttcctgcaatgaccgcattagcccttagaatccaagagtccatttttcttgccagcattaatcatgatgagactgacagcacaggatgcaggagcaagacaggagtcttgcagagacagaagaggcatgcagagacagacagacagagagagctgtgatagggagggtggatgggtaacactggagtactcagtaatccgtcattgatatatacaactgatgtgaatgtatatatgttcagattgatgctttaggaaactgctgcttatttattttcaggctgtgcttccaagccttcttgactttttagtaagcatttctgcaccataagggcccttcctaaggttgctgaagagaagcaactgatggaaggtagggtgaagggatgtgattaactatggaattaaaatctaaatacaaatcagaatacaaacattgggtatggaatcttctcacagcaacagaccgaatcaagctggtgtttgtttgcatgaacagttttattcagaacccagagtataacagtccaacagccaaaagtctccctgaccatccatcctctccctctccctccctcttccctgtttccttcccttcttccccagatgtgcttctcattcatgaaattcttataaacacaggtgctgggctagttggggtgggcaccaaatgtgaattccccatagatcctgggctcccaaggttcccatctgcagacagccaactctgtgcagatgctctcccagagcagggagcagtgggctctgggcccaaaagagacataattaccctgcctatgaaggagaggggaggattccaaggcagcttcagagaggagaaattatacgttcagtccaaagccgtttgattcaaaaggtaaatcagttacctgaggtaacctaatgcaaagcgctcctggaaagatacctcccacttctcagatgtcaggtgatcctatttcagatttatcaaagcagcagggattagcagagccatacacccttcagttctgctccctcctcctctccgctgctttgtttgtctaaatagttgttttagtgagtgagaagaaagaatgggaggtaattagtgtttcttgtaatgttctgtgtttagttttgtaatccttctgtcaggtttattttcatgttaagcaaaggaattcccactrgaatattataatctcttcttagtgttagtagaaagccatagtatttaaat

SEQ ID NO: 686288 - DNA, 594 bp, Homo sapiens
tttttccccccagcatgggggatgaagcaggggaaactctacctccttccttggcatgggaactcccattccctgcccctcctgccscaagtgaaatttaaagtcatgtctgaagcttctcaaagagggaaccattcatgaggaaatggcaacaaaacaatctcctgaagaatttccctgcattgcagatgagttcctgagccaatggaatgacatggtgagtaccaggaaaaatataggaataagggccaagggaatacaggaagggagctggaacctggttttagaggatgatggcagggaaaagaatgggactatagtctgggcacagtggctcatgcctgtgatcccagcactttgggaggccaaggcacatggataacttgagtccttgagtcgagactagcctggtcaacatatgaaaccccatctctactaaaaatacaaaaaatagctggtggcgggcaactgtaatcctaacttcttgggaggccgaggcagaagaatcgtttgaacctgggaggtggaggttccagtgagctgagatcatgtcactgcgagactctgtctaaaaaaaaaaaaaaaaattatcgg

SEQ ID NO: 686289 - DNA, 668 bp, Homo sapiens
tcaaaattttgttagttcattcattcatccatgcactcatttgagtttttgttcttcatctgttctacatctagactctccatgaccacaggcacctgctctgttcactcacctgcatatctctgcatctagaacagctcagggtaggtgtggagtgaatggtgattgcatgagygaatggctgccaagtctacccatggcttgcccatcctctggatacatcatctacttctctggaactgcaagctttctcatgaaatacgaacggctaccctagatgtattaagttgctcaacccatgtcttctatgcctcacaaactgggctgggtccaggggtctagcaaagaacaagacagatgtagcctctgtcttaatggatagtgcagtttgtgaaagacagacattgaacagaaaatcacacaatcattcagtgaaagttgagatgggatcattggaaggcttatgtgagagagcagcagcatctctctgtctgctgagacacaagcaaatgcttccaaagctctgtccacatctagcatgcatttctggtgctgctcatcaaccaccaatgagaggctgggttgtgccatggtgtctagaagcaccatgtcctttggtgttcctgaggctttcagcctctctcttccctgaaagctggcatggggag

SEQ ID NO: 686290 - DNA, 959 bp, Homo sapiens
tttgaggattcatcagggttcctgcactaggcaaaatctatcagcacaactggtcagttccacagaaggcagggttatgggccaagaccttgccatttcttaactttctaggccccttactgggattccattcatctgggctctattttcactgttctggggctcacctaggctggaagcatcaagaagtacacgtggttgagatctgggtgatgccccaatgtgttttgctggttaattagttactgctgtaagtcatcagaggttttcaagatgcaaatcaagcaattatggggctatttggaaatgacaagcagaccaagagtaaatctcagccccagcagaatgaggcccggcttactaaggacccggaactcaacccactccagtctgcatcctgaacacacaaaactcttttcttcgtcatcaaaactgcctgacttcttggggacctaagagaggggcagggccactggatctgtagcatggggaggtgtctcagttcttcaccatcaatttcaaaagcacccagatcaattaagatgcctttagtcatagcaatgagcacaaaatctcaacttatattgtcttgaaaaatgtggaaatttactattccacaaaactaggtatccagagcagtggggaggagtgaggtagaacgcctccattcacagcacagtaatctcatcaaggacacgggttctttccatctccccagtctaccaccctcaagatctgcttcatcacaagccttggcccccttgggtcacacaatggctgcagctgttcagctaccatgttcagacacaatatccagaggaaaaaggtggcactgtctgtctctgtgctttccrtgtaggaatgagaaaatctttcccagaggccacagcagattttcacctatgtctttttggctagttctgggttggacacttcctcctgaaccagtcattagcaag

SEQ ID NO: 686291 - DNA, 625 bp, Homo sapiens
gaaaatggcccccatctacttgtggaagcagagcaagccaaggtgttttcacacagaggtggcaatgttacactgccatgtaaattttatcgagaccctacagcatttggctcaggaatccataaaatccgaattaagtggaccaagctaacttcggattacctcaaggaagtggatgtttttgtttccatgggataccacaaaaaaacctatggaggctaccagggtagagtgtttctgaagggaggcagtgatagtgatgcttctctggtcatcacagacctcactctggaagattatgggagatataagtgtgaggtgattgaaggattagaagatgatactgttgtggtagcactggacttacaaggtatgtatctataagtcatgttcaacgtataaatggtcattaatagttgctttttytttcatgaagagtaatgtctagtggttaacacagtaataaagtgaaaaaccaaagtccttgcctggcatcttattcttttgtattctacagtctgcctatgattccagctttcatgtttgaaatgcatacacaatgcttatgtgcaaaattgaagctatttgtaactaggagaaacgtgcagtggaactgaattaacag

SEQ ID NO: 686292 - DNA, 1678 bp, Homo sapiens
tgcagaaaactttcttaagtaaataggcctctgcctaatggaatgttgtactccaatttcatagtcagtcactctgcttcattcctgtgtatctaaaattataaaatgatagacaaatatttgcagagtaaaaaatatacttgaaacttctgtattatggtttgatgactgtggatcttcttgcagctattaggtttagtgttatttgagtattttttatcatttggatattattattggtgtgcagagaatttagaagctccttccctcaactggagtatcttatattaaaaaaaaccctaaatgtgtccattgccttactgagttttcacttttaatttgagcttttaatacatgctatttcattaaaaatatattttactatattccctagtttctatatagctcagcagaaacagagggtataaataaaagttttgaagtaaaataattcggtgtattaggagtatatacctgatcctttgatagactaaagctttgtttctgtttagtgttttgatgagaggactgttttgggtaaggtttttgttgttttcattccaaaatgaaagttaattttacctcaaaccatgaattgggtagccacgattaatggatcaataaaataaacaataatctcttaatgttttaagtcaatttagcttatattcctgtatcaaaatattcataaaaaattatgggcttatttgctttattcattctttgtcatgcattggagacaaagttaataattaaacttgaaacatgtgtgtgtgtattcttttatatattggtaaaatcattcactatagaagtctttatatcttccttttcagtacaacacatgtcctttcaagggaagtttaatatccatgaatcatagatgctagagaaagttacaatggggcagtaattttagaatcttaattgccttgccagataaatttttttttttatttttctcagacatcatttgattctgtcctcctaagaagtgttttccagtacataggcaaaaagaactgtaatcatttctggttttatttgcactaaagaactagcttttgggaaaaatcatccacttaacctgtcaagatagtaaaaaacttttgcttatgctgtctctgaatttgtctctacaaaattatattttaaactgaattaagctattatatttttaatacataagatcactacctacctcattctagtcatttttttataattaggagtacagttagggataaacaagaactagaaaagattctcaattatcttttactctgttattttcttatagtatttttcatrtgagaaataatacactgtggaaactgtaatagattttgaggtaatgataactacatttttcctcttaagaaatatagctttggcctggcatgatggctcatgcctgtaatcccagcactttgggaggacgaagtgggtggatcacgaggtcaggggttccagaccagcctgaccaatatggtgaaaccctatctctactaaaaataaaaaaattagctgtgtttggtggtgtatgcctgcagtcccagctacttgggaggctgaggcaggagaatcgcttgaacctgggaggtgaaggttgcagtgagccaagatctcaccactgcactccagcctgtgcaacagagcaagactctatctcaaaaaa

SEQ ID NO: 686293 - DNA, 1678 bp, Homo sapiens
tgcagaaaactttcttaagtaaataggcctctgcctaatggaatgttgtactccaatttcatagtcagtcactctgcttcattcctgtgtatctaaaattataaaatgatagacaaatatttgcagagtaaaaaatatacttgaaacttctgtattatggtttgatgactgtggatcttcttgcagctattaggtttagtgttatttgagtattttttatcatttggatattattattggtgtgcagagaatttagaagctccttccctcaactggagtatcttatattaaaaaaaaccctaaatgtgtccattgccttactgagttttcacttttaatttgagcttttaatacatgctatttcattaaaaatatattttactatattccctagtttctatatagctcagcagaaacagagggtataaataaaagttttgaagtaaaataattcggtgtattaggagtatatacctgatcctttgatagactaaagctttgtttctgtttagtgttttgatgagaggactgttttgggtaaggtttttgttgttttcattccaaaatgaaagttaattttacctcaaaccatgaattgggtagccacgattaatggatcaataaaataaacaataatctcttaatgttttaagtcaatttagcttatattcctgtatcaaaatattcataaaaaattatgggcttatttgctttattcattctttgtcatgcattggagacaaagttaataattaaacttgaaacatgtgtgtgtgtattcttttatatattggtaaaatcattcactatagaagtctttatatcttccttttcagtacaacacatgtcctttcaagggaagtttaatatccatgaatcatagatgctagagaaagttacaatggggcagtaattttagaatcttaattgccttgccagataaatttttttttttatttttctcagacatcatttgattctgtcctcctaagaagtgttttccagtacataggcaaaaagaactgtaatcatttctggttttatttgcactaaagaactagcttttgggaaaaatcatccacttaacctgtcaagatagtaaaaaacttttgcttatgctgtctctgaatttgtctctacaaaattatattttaaactgaattaagctattatatttttaatacataagatcactacctacctcattctagtcatttttttataattaggagtacagttagggataaacaagaactagaaaagattctcaattatcttttactctgttattttcttatagtatttttcatatgagaaataatacactgtggaaactgtaatagattttgaggtaatgataactacatttttcctcttaagaaatatagctttggcctggcatgatggctcatgcctgtaatcccagcactttgggaggacgaagtgggtggatcacgaggtcaggggttccagaccagcctgaccaatatggtgaaaccctatctctactaaaaataaaaaaattagctgkgtttggtggtgtatgcctgcagtcccagctacttgggaggctgaggcaggagaatcgcttgaacctgggaggtgaaggttgcagtgagccaagatctcaccactgcactccagcctgtgcaacagagcaagactctatctcaaaaaa

SEQ ID NO: 686294 - DNA, 633 bp, Homo sapiens
ggtggaaaaaggctcctttccttagagtgaaggcaaacaatgtagttccactgctgtgctgtggccatcacaatccctgagggtgtccttcctgccagtgtggttctcaaatcatctgcatctgaaactcctgggaatgcctattaaatatatgaaatcctgggctcttcccccaccccggcgaatcagaatttcttggcttcaaacctgagaatctgcattttaatcagattctctagttgatgtttaggttatgggtagcctaaactacccacattctgcactattcagtctcctggctactcaaaatgtggttgccaaagcagcagcagcacatccactggaagcttgttagaaaagcagaatctcagcctcatcctggacttcctaaaccagaatcttcattttaataaaacccacactgactcattatgtacatkaaaaggtgagaattactgctctggatcttatttctcaagccctggttattatttgtacattacttatataatattttttaacctgccatagatatattatgtttacttaatttaaaagaagtagatttactttaaccttaaattcagcctcactataaatgaaaatagccatgggattaggagttgatgtgct

SEQ ID NO: 686295 - DNA, 667 bp, Homo sapiens
tgggtgacagagcaagactccatctcaaaaaatacaaaaaaagaagaaaagaaaaaaagaagtaaagtatcactttactttttgccccagtaatccgctggtgctttggtcctgggtgtttcttagtaaagtcaggcaacaccaattctatacacctgactgcatctatgagtttacataaggcccctgaatggaaatagactacaatcccatcttgtctctttgaggttcratgatgctgagatatatcaggtggacctatatggcacagaaccaggtcagacagtaggaaaggatgatggggcctccagagagtcaagcaccaggagtctggcctggtgtgttggaataagtcccagggcttatagaaggtgtaagtaatatggtctggacgagttagctccaggctagttggcagagatctacactggccccagaagtggccatgaagagagtgggcatcacagaaacacctctggagatgagtcaaagctttggcacgagcagcagaggcacacaggaccagcaggtggggctgttgatatagttaggacaggacacatggcctagagcagcatcaccaggcaaggtcaggcggataatgtcaggtgaaaacagtgctggaaattcttggaaatattcccaaagaattctttgaaagatggat

SEQ ID NO: 686296 - DNA, 657 bp, Homo sapiens
cagtgataccctgtggtctgcctttgtattatgatgtaagccccatcttcccctttttttctcctctgcattcgttttatacatcatgctctttacaagactcccatgttggtgtcctaccctcttgttttgctttcttcttgggaagggtcactgatacccctcttctytttccagccctttgctcacactgtcctctccacctaggtgcccactttctctactgtctgttgaaaccatactccagcaaaagcaacctgcccttctctgaaccctttttgtctttttcttgtcactttttccctttttcttattgactactcattcctcttacactgtccacctgactattccttgaaagtaatagatgtgttcaatatccttcgccaagccctgtggtgtgtacccagcaggcagaaggtatactttagataaacgcaaaatgccatatccaacctttgtagctgagcccagttacctccttgctatttgatccaaatttgccttgcacaatgagaatactaaaatttgccatgagcctacaaaatggatccagccaggttggcagactggattttttgataacaaacaatgacagatgcttgttgtgtcctaacccctatgtcacctactaggaattcagcaagacattggctc

SEQ ID NO: 686297 - DNA, 1374 bp, Homo sapiens
ccacttccagccttgtaggcgtctccggctgtggcagatacctggctgcccaccacttgcctagcctaggcggagagtgtgatgcaagactaggcctccctggcctgaccggcgccactggtggtctcatgccaaactcagaagcacgagcacacacccactcagtccctgggcaaatctctcccactccctcccgccagggcgtcttcatgaatgtcagagagatggatactgcttgcaattctggggatagcaacagccgtttattgagtaccaactgcatgtgccaagccaatgctgagagctttacaggcaccatttcactatgatatgggaccaggctgggtacggtggctcacgcctgtaatcctagcactttgggaggtggagatgggtggatcacttgagcccaggagttcgagaccagcctgggcaacgtagagagacacctgtctctacaaaaaataaaaataaaaaattaaccaggtgtggtggtgcatgtctgtagtcccagctactccagaggctgaggtggaaggatcacttgagtctgggagttcaaggctgcagtgagccatgattgcactccagtctgccaacagactgagaacctagctcaaaaataataaaaatagtaggtcggccacagtggctcacacctgtaatcccagcactttgagaggctgaggtgggtggatcacctgagggcaggagtttgagaccagcctgggcaacatggtgaaactccatctctactaaaaatacaaaaattaggctgggcatggtggctcacgcctataatcccaacactttgggaggccaaggcaggtggatcacttgaggtcaggagttcgagaccagcctggccaacgtggtgaaaccccgtctctactaaaaatacaaaattagccgggtatggtggcagatgcctgtaatcccagctactcgggaggctgaagcaggagaatctcttgaatctggaaggcggaggttgcagtgagctgagatcatgccatctgtcacaagaaaaaaaagaaattagatcttaaataaacacagggtcaactctagccttttttctttctttctctcttttttcttttttgaaaaagagtgtagctctatcaaccagggtggarcgcagtggctcagctagtttttgttgttgttctttaataatgcataatagccaggtatgatggcacatgcctatattcccagctatttgggaggctgagggagaaagattgcttgagcccagaagttcaagtccagcctgggcaacatagcaaaactctgtctcttaaaaaaaacaaaccaacaacaacaaaaaactgcattatggatcttgattattgaattttttttttttga

SEQ ID NO: 686298 - DNA, 1114 bp, Homo sapiens
aaaataggcaaatgtacagaggcagacagtagctgagtggttgtcaggggctggggggaggcgggagtgagaagtgactgctgatgtatgcggggtttccttttggggtgatgcaaatgttctggaaccagatagaggtggtggttgcacaacactgaatgtgctaaatgtcactgaatcgtttgctttaaaatgatgaatttccggcccgggcgcggtggctcactcctgcaatcccagcacttgggaggccgagccaggtggatcatttgaggtcaggagttcgagaccagcctggacaacacagtgaaacccagtctctactaaaaatacaaaaattagctgggcgtgatggcatgcacctgtaatcccagctactcaggaggctgaggcaggagaatcgcttgaacccgggaggcagaggttgcagtgagccgagatcacaccactgcactcccacctgggtgagagagtgagactatgtctcaaaaaaaaaaaaaaagatgaattttaggttacgtgagatgcatctacagaaaaaagaaatattcttagagtccaggggcactgaggagggagaaggagagggtctctcctggggatgagcatctgtggaaactgaggcccaagtggccaggkttgtgcaatgcggttcagcttcctgggaggaggtccctccttcaagaagcctggctccgaggggcagctgagctggccagggtcaggcgcccagcaggctatgaggtcagtgagttagggacaaagactcagtgtcctgggcctggcacagtggggacgggggccctgtgaccccatacaggacagccttctctggccccggggcccaggccagggtcagctgggggatggatgtgtgaggcctgggggaggggcagagacagagaaagggacagagatagagagatacataaagatggaggaggccaggcagggtggattatgcctgtaatccagcactttgtgaggccaaggcaggaggattgctgtaggctaggagttcaagagcagcctgggcaacatggtgagactccatctctacaaaaaataatttgctgggcatggtggcaggtgcctgtagtcccagctacctggg

SEQ ID NO: 686299 - DNA, 652 bp, Homo sapiens
gggaggctgaggcaggagaatggcatgaacccaggaggcggagctcgcagtaagctgagattgcgccgctgcactccagcctgggcgacagagtgagactctgtctcaaaaaaaaaaaaaaagaaagaaaaagaaaaaaaagaagaaagaaattgcttgattccctatgttgtttctttgccctgagaactatttaataaagtagctctaaatccttggctgctcattgaagtcaccagggggctttttaaaaatcccaagagccacatccaacatcagttacttagtagagtctgggttgcagtctgggtttacatttaaattcctcmaatgactgcttggttgggcatggtggctcacacttataatccctgcactttgggaggccaaggagggaagactgattgaggccaagatttggaaaccagcctgggaaacatagtgagaccccactctatgtaaaaattaaaaaataaagcgaggcgtggtgactcacacctcgtaatcccagcactttgggaggctgagccaggaggatcgcttgaggccaggagtttgcaaccagcctgggcaacaaagtgagaccccgtctctacaaaaataaaaaaattagcccagtgtggtggcatgtgtctatggtcccagctaccca

SEQ ID NO: 686300 - DNA, 613 bp, Homo sapiens
aaaccatgtatgcatttatcctttcagccagccatcccacttctaaagatctagcccaaggatgaaccgagaaagaaaagaaaagaaaagaaaaaaaaaaacatgaaaagaggctattcactgcagcactattagaaatagcaaaatctcaaatgcctaccagtagaaagttggttaaatagagtagagtgcacaacacaactgagtaccatgcagctgtgaagaaaaaaaaataagagatatcttcatacactatatggagtaacctccaggctatagtaaaaagattcttcaaaaggaaaataatgtgctagtacactatcatttactaaaacataaaattacaaaaattcaaaaggggtgaagaatatrtatatatatatatatatatatatatatatacacacacacacacacacacaaacacacatacacacagatacatatgaaggtgtgtgtatatatatacacacatgtatataatgtatgtacgatttccttatattaaaaaaaggaaagataaaaatggttactgtatctgccaactgtaactgcaataatggcatgtgactttattagtctcttttcatgctgctgataaagacatacccaa

SEQ ID NO: 686301 - DNA, 613 bp, Homo sapiens
aaaccatgtatgcatttatcctttcagccagccatcccacttctaaagatctagcccaaggatgaaccgagaaagaaaagaaaagaaaagaaaaaaaaaaacatgaaaagaggctattcactgcagcactattagaaatagcaaaatctcaaatgcctaccagtagaaagttggttaaatagagtagagtgcacaacacaactgagtaccatgcagctgtgaagaaaaaaaaataagagatatcttcatacactatatggagtaacctccaggctatagtaaaaagattcttcaaaaggaaaataatgtgctagtacactatcatttactaaaacataaaattacaaaaattcaaaaggggtgaagaatatatatatatatatatatatatatatatatayacacacacacacacacacacaaacacacatacacacagatacatatgaaggtgtgtgtatatatatacacacatgtatataatgtatgtacgatttccttatattaaaaaaaggaaagataaaaatggttactgtatctgccaactgtaactgcaataatggcatgtgactttattagtctcttttcatgctgctgataaagacatacccaa

SEQ ID NO: 686302 - DNA, 606 bp, Homo sapiens
ttattatctctaacaggtttttttggtggaatctttagggattttcacatatgtcatctgggaacagagataattatacatctttacaagtttggatggcttttatttctttttcttgtccaattgctctggctagaacttccagtactacattgaatagaattagtaaaagtgggcatcattgtctttttcctcatattagaggaaaagctttcagtcttttctgggtttgtgttgttgtttggtgtrttttgtttgtttgtttgtttttgttttttgagatagggtctctgtgcagtggcataatcttgtctcactgcagccttgaactcctgagctcaagagatcctcccacctcatcttcctgagtagctgggaatataggcacacaccactatacccagatagttttggctttattttttgtagaaatggggttcgccatgttacccaggctggttttgaactcctgagctcatgcaatctgcctgcctcagtctcccaaagtgctgggattacagttttctgttttcttttatcatcattactgtgtaggtaatgtgtctttcttaagactacttttatgataattatcttatctttaaa

SEQ ID NO: 686303 - DNA, 3371 bp, Homo sapiens
ttttttcggggtgcttaaagtgattagactgcaagaactctaaaatcacattgaaaagtgtgaaagaaaccttagaaagggatcaagttgttttgagatacatgctttataaaactatggagatgtataaatttacaaaacactacagaggtagagaagcaagaggataattaatactaaggaaaatagcagaaattgaggagaaccaggcagtgaaacatattacaaaaaagaattagatctggatactaaattatctgtaattaaagtaaaagactatatcaggaaaaatatatgtttctataagaactataaaggaagccaaaggtgagaagagtgaawctctttacgtaattagaacatgtgatttaatgatcaatgtttcacttgatccaactcctataattcctgctttataccgaaagtaaagttaaacaaatatataatatttgtaaagctaccaaattaatatcgtatactgtttaataacaagtcttgccattgaatgccattttagatgttcccattgaactaaatgaaggaatgatttaatgaataaataaaaactattacattattaatccattaaaatatatgtgaggatgttaggtaggacacaaacaatgtaagcacagcaaatacatattttataaaaagtagattttcaactgataataatataaagcaagcttttagatgtcacattttaaaaattataacttttgtttactttaagttctatgaaaatgtaataaaaatgacagccaaaaatttgggtatgttttgctttttttcttttaagctatctttccacacctgtgaccagactgctatgcttgtcagaaacaataaaatagaagtctcctaactactgggaacacatctatccacaagaccatagggaatcccgcccaggaaccagctgctctgtttaaatctagttggcactacaaaccatacacaaggagctcttctgaaagttgtgcttacatcatttattttcaaacacatttattttgttagattatgaaaatgcaatacaatattttaattcaaagttttccatcaaagttatggaagctgtgaatttccaagtacacactccaagcattaagagaggctacaatctcagttgtatatgcaatctctttctaaatattttcccttacacttaaaaataaagactttcatcaaagtgtaaattaaaaagaaaattctaagcccctcaagtaactgatgaacaccacttttggtctttccaaagtaaatttggcattccaaagtaaatttgaaaatctacttcaggccatgatagaaacgggttgaatatgtttcattatatcgtcctccctttggaattcaggcacaactgaccaccattaacattacaacagatcttaagactgatgaaacagactcttgtagcaataagatatccaactccaacctgactctagtgtagcatcacatgacagataacaggccctaaaataaatggaaatattttaccccaaaatatatttctttgacatatttttgtaaagaccctgcaacgctgtttctgtggggaaaatctacattctgtggagaatcaccttcactttcaagatcttttttctgatccaagaaagaattaactaagagtgtggcacccttttaagtccgataagaaacatctacaaccatttctctcagaagcctgctacctggaggctttatctgcacaataaggaccttgatctttccaactccttatcttaacccagacatttccttctattgactccaggtctttagataataactctttcaactaattgtcaatcagaaaatctttaaatccacctatgaccaggaagcctccccacactttgaattgtcctgcttttctagatggaaccaatgaaactcttacatgtattgattgatgtctccctaaaacatataaaaccaaactgtagtctgaccaccttgagtacatgttttcaggatctggagctgtgttaagggctattggtcactcatatttggctcagaataaatcttctcaaatattttacagattttgactctcttcatcaacaaaagatgtggaactcaaggtcctatatctttcatacaggatgtttgatcctgacccaagtatcagttgagagaaaaataaattcatttttttgtgtgtgtattcccaatatcatttgaaattcaaatgctcttcattctaggtagaatttgaatctgttcaaattgacatgattgattgattgaggttagcatttgaatagaaaatggaaaaacagcaaaattggtagattgttttccctgataaagtggggaggtgtgggaagtcccaggaaggtttctggcatatcactttaaaattatcatttcatttaatttgactgcaaaagggaggaaaacaaattcagaagtgattgttcttttatgcattttcatttttactttaaataattacaaaattggattttgcatatttttgcagttataacccaagaaaaaatagaatagaaagctaaatgaaaattacttttgtatttgatttagaattcacatcctattgagtaatgaaccacagagaattttctctatataaaaactttttaaaattattttataaaattgttttttacatatttatgttgataatatgttaatttttttattgttaaattatgaatttaaaatatgtaatagaagcatcacattcttttcaaattacagtagtaatatagaaacaaaatagatgactcagaaaaataaacaactaaaattatggcactatttaagactgtgcaattaataattttgaaattcactggcttaaaattttttcaaaacctaatagttgaagtaattaaattgacaatgaggaaaacttgaagtatattaggattttcaaatgaaattttgaggaagggctaatttaagaaaagttattctttaaaattcaattcctcttgaatgaaagaagtctttgattaacccatgaatacagaagtttgagaatatttttgtgtttcctttgctttgtattataaaacacaggtagatctgtgttttctggaatgctatgcataccattttcagccaaagaaagttctctcatatatcattctggaacacagatgctgggggaagattagcagatgattggagaaggaggcagatgagagattttgaagacgtggtaggacatgtgaaagattgtattgtttatccaaagtaacagttttctaatgtaagcttttgatgattgcttggtcataactatatttttaaaagtaaaggccgtctacaagtatataagtaatgtaaatggaaagatgccagttatctttctcatatacgtg

SEQ ID NO: 686304 - DNA, 2353 bp, Homo sapiens
tgctagtgtaaaaatgatcatataaacgtccacgtatattaaagattagaaaaatattgtaatcactaaaggaagctaagttatgatcccatttccagcaagctattagagaagttcagtaattagatcaacttcattaagtattagaaaaagctaaatttttgggtaaatcttttgaaacattatgaattgagaaacattttatatcacaaatctaaaagtctctttcttatgaatctttcaggatattagtagataactcagaaatattataacattataaaatcaaaatgtcctttggacctaaatgttaagagttcctctttatgctttcataacccagccccttcccaccacagtttcttaatacctgtttatttgcattgttcaacaaagactacaatagtataattatagcaaaggcaaaatgttgctgttgtggtcttaatcttaaactggaaaaaaaagtaatctggaaagcaatctttcttacaattggcacaaaaacgattacaaggctctcagcaggttcagaattaataaagcttaaaataagcaagcaaaaaaaatcctagattccttatctctcatctaaccaacattattggaatattaaagtcaataactggcccaattatgctatagaaaatattatctttgttaacttttatttaccttacacagtaatgtaattaaaaattataagtactatcaaataacatcaacatatatgagacttcaacttctttaaaatagaattaagcactgaatcaaattctgtacttacaccagaatctacctagtacatgacctcattgtaatcacaccaaattacctgccaatatttatctactcatatcctgctcttaaagtattcccaaaatgatattaataaagtaaaagaaaattgtcataaatagcatttcttctaggagttatattttgactgtttagcccagaaccctttgggttttgtctatcttaaacaccagcaaactaaatgccttcagtaacaatatacatatacatattttttaaaaactgaatattaagcatttttaatagcatttttaagagtggacaatctttttttaacctcattgtatttaaaaataatagaaacaggcatcaaaatggacacagcaagaagcatgttaattgtttctgaatggagaattaggtgctctggcttgtccttgaacattaagaacagatgtatcrtaatttgttattatctacattcatcttgtttcagtaatttcatattttgctttctagtttcaaattgggattccttgactagaataagatcttgttcattctgaagggagttttgcctcagtatgcattttctaacttgccttaaataataaattcaatagttaagctagctaggcaagaggagtcaacagttgttaaacaccctcttcaatgtttatagccaaagatactggttagggtggtgggaatccattctgaagatacaaattctgaaatcaagtagttttgcagagaagtggccagcaagaaatgttaaggtaggaacttaaatcattgataatgtgaacttaggtactttggccctttccaaggatcagagttgcttgtcgggtcatgtgaggggacctacgagaccacacttttatattagtgctgagaactaagcagtagagaagaaaattagggaaaggaagaatcacatgacccttccaggaggaaataacaagagtggtgagatcttttatggctatccacaaaataatagtattattcaagtaaaggatgaagtatcttaattcaacttctttcataaaaacactttatgaaaaaatgaatagttccttttactattctctattaaaatctacaagaatattgctccaaataaaaaatacgttacaatttgtttactggtgcttgtgaaatattttctagtcacgagcaacagaacaaataatatttgttgatttcaaaacacatcacagaagcataagcctttgaaaataaagatgcataatcaaggtataaaatattcttaatgccttgctaattatgtttagaagcacagaagcttaataaattcaaaatagcatgagaaatagaagtgcaattccatcagtcaaaataaagaatgggttcaaagtgtttaaacttcaaaagcactataagatgcagtagtcttatagacatcattaaatcacagatattggagagctcattagattagatttctttaaaggactttaaattcaggcatgattattactatgagcaaagtgaagagagttaatatattagccctaagaggttaataacttatcagccaaatctcttataaagtggatttgttagg

SEQ ID NO: 686305 - DNA, 1482 bp, Homo sapiens
ggacctcaccccagagcctcagtctgtacatacgtgtgactattcagggaccgggagttgagaaccagaaacccaccaatcctagtgttgccctgggtgggaggcagagaaggcagcagcacgtgaggtcaaggacattaccaagtctgaccttggcatttgttgcctgctctcatccccaacagtccataaataagttatccagcacatctcaggggtggaggcgggggagcaagccaactagccatagcctctggaagaaggggcaggccagcctggcactggggcagagctacagcagaatgcagtctgactcgtgcttcggcctctgccgacgctccccggctgggcgtccagatgtggctcctctcccctgtatcggatttaacaattggtcactgaacttccttggaagagcacaagaagagattctagaagaaggggtgtcaggattgggacagagagtagggagaggaagacaggaaggggctccaggggagagggacaggcaggggaaggaccctgagagaagaaaccttgaagagaccagtgcaggaataacaggtgttctggacccggcaaagcatgaggtggaaaccgggagtgtgggcgcccaggcagcagcccacctgcagtgacaggacccgcgtccgcatccgcactggctgcgctgcctgctgctgttgatactcctcttgctgaagctgctgggccagctccaagtcggtaagccccagcgggcctcgtggctgttgctgctgcagggacagagcaatcaggtagtcctggggagaacaagagttgtgcagtgggctgaggcccagagccgtggctattcaggcaaggtttccaaatcagttttcccacatccctcaaattctctagctctttctccccacagagcagcacacacagccaaatgcattatctgtggtgccagagaatacacaccaagtgaggagacggtctgaggtaacccagagagagaggcatgggttcacatggcctctagcagttaaaatgtatgcagtaaaaagctctctgaggcacatgtgctctctgcacttttcctaagtgccctacacacctggtctacctgcagctgcttttctggggagccactcccaccttctgctccaggccccttgcccagggaatgactcaggtgaaagtcagagtcacaaaagcagctgtctccatccacattgtgcaggctctcccatacgacttgctcctcctgtagaaagccctggtcagtgaccagtaggtataagtgactctacaaagaaaagaacagagctcattggggggacagttgatacggaggcagttcactgccagaaatctcggtatgagcatgtggacwttttttttcttggagatggagtctcgctctgtcatccaggctggagtgcagtggcacaatctctgctcaccgcaagctctgcctcccaggttcacaccattctcctgcctcagcct

SEQ ID NO: 686306 - DNA, 1911 bp, Homo sapiens
ctggggactgttgtggggtggggggagcggggagggatagcattgggaggtatacctaatgctagatgacgagttagtgggtgcagcgcaccagcatgtcacatgtatacatatgtaactaacctgcacattgtgcacatgtaccctaaaacttaaagtataagaataaaaaaataaaaaataaataacataaataaaataaaaaataaaaaaaaagaaacttgctcttcttctctttcctttctcagcaaaacagcacctccaatggagcccattgctcaattcagaaattttagctttcttcttttccaaaaacccctagcctattacaaagttgtggagtatcatgcctataaattcaattatacaataatctgaagcaataacctgttttttctcataaaactatgatgtgaatattttcatagattattaaatattcgtcttcagtataacatttaatggcaggataatatcccatctttgagaagtagccaatctatgtaactaattctccattttggtgcactgcaagtttttaatttcactgatgcttcatgtatcatgataattttggaatgcactgcacgctttgtgtgcatcatttaatttaatcctcacaacatttttacatgggaatcatcactgccatgcccaattataaaaaatgttcaggaagtcgccccatagcagatcctcagcaggtttgggtttcaatagctccaggaatcacgcttcagctcacacagcattgctgcactaaatgaaatttctctatattcaactattaagattcaaacaggaaaaacaatagaaaacattttatcatattttttccaagtgtccaaatcaaggtagaattttaataataacaagctctgatattcagtctctctatacccttaataaagacaattgttgccactacacattcagaaaaagaacttcaattctgacacaattatgttactaaccattaataatttaaaatgacatctgcccttgtaccacattcaaagagttttctaagaatrtttttgtatccacaaaattttatacagaattatgactgcatttgagaaacattttgagcattctccaatacttagaagtacaaaaacattcctgtaatcccagcactttgggaagctacggcgggcagatcacctgaggtcaggagttcgagtccagcctggccaacatggtgaaaccccgtctctattttaaaaattacaaaaattagccaggtatggtggcacatacttgtagtcccagctactcgagaggctgagacaggagaatctcttgaacccaggaggtggaggctacattcagccaagatcatgccactgcactccagcctaggtgacagagcaagactctgtctcaaaaaaaaaaaaaaaaagagagggaaaatgtctgtttttttgtatcattcttatcactgaagtaagtcatctaaacatctttactaaatggtcctttagtttcagtgactgtttattctccaaaatattgaaatttttcttctccaaactgtagtctctaatattgtttttccattaatatgtatctgccttactgccaattaaaaaagcagtatacattatatactttatatctttaaggcataaggtattttaaataaaatagaaaaataattgtttctattgtcccatgttgttctcctcctatttttgtcttttgagtctctttaccagttcagaggcaaatgccatttgtcctatagttaggcttgaaaagttgtagtcttttgaaggacatagagattcagaagattaaaatattttatcctatattactgtagtgatcatatacttcaacttgcagaacagaaaacttcactaaaaatatgagaagatacaaatattctaagcttaatgagggcca

SEQ ID NO: 686307 - DNA, 1911 bp, Homo sapiens
ctggggactgttgtggggtggggggagcggggagggatagcattgggaggtatacctaatgctagatgacgagttagtgggtgcagcgcaccagcatgtcacatgtatacatatgtaactaacctgcacattgtgcacatgtaccctaaaacttaaagtataagaataaaaaaataaaaaataaataacataaataaaataaaaaataaaaaaaaagaaacttgctcttcttctctttcctttctcagcaaaacagcacctccaatggagcccattgctcaattcagaaattttagctttcttcttttccaaaaacccctagcctattacaaagttgtggagtatcatgcctataaattcaattatacaataatctgaagcaataacctgttttttctcataaaactatgatgtgaatattttcatagattattaaatattcgtcttcagtataacatttaatggcaggataatatcccatctttgagaagtagccaatctatgtaactaattctccattttggtgcactgcaagtttttaatttcactgatgcttcatgtatcatgataattttggaatgcactgcacgctttgtgtgcatcatttaatttaatcctcacaacatttttacatgggaatcatcactgccatgcccaattataaaaaatgttcaggaagtcgccccatagcagatcctcagcaggtttgggtttcaatagctccaggaatcacgcttcagctcacacagcattgctgcactaaatgaaatttctctatattcaactattaagattcaaacaggaaaaacaatagaaaacattttatcatattttttccaagtgtccaaatcaaggtagaattttaataataacaagctctgatattcagtctctctatacccttaataaagacaattgttgccactacacattcagaaaaagaacttcaattctgacacaattatgttactaaccattaataatttaaaatgacatctgcccttgtaccacattcaaagagttttctaagaatatttttgtatccacaaaattttatacagaattatgactgcatttgagaaacattttgagcattctccaatacttagaagtacaaaaacattcctgtaatcccagcactttgggaagctacggcrggcagatcacctgaggtcaggagttcgagtccagcctggccaacatggtgaaaccccgtctctattttaaaaattacaaaaattagccaggtatggtggcacatacttgtagtcccagctactcgagaggctgagacaggagaatctcttgaacccaggaggtggaggctacattcagccaagatcatgccactgcactccagcctaggtgacagagcaagactctgtctcaaaaaaaaaaaaaaaaagagagggaaaatgtctgtttttttgtatcattcttatcactgaagtaagtcatctaaacatctttactaaatggtcctttagtttcagtgactgtttattctccaaaatattgaaatttttcttctccaaactgtagtctctaatattgtttttccattaatatgtatctgccttactgccaattaaaaaagcagtatacattatatactttatatctttaaggcataaggtattttaaataaaatagaaaaataattgtttctattgtcccatgttgttctcctcctatttttgtcttttgagtctctttaccagttcagaggcaaatgccatttgtcctatagttaggcttgaaaagttgtagtcttttgaaggacatagagattcagaagattaaaatattttatcctatattactgtagtgatcatatacttcaacttgcagaacagaaaacttcactaaaaatatgagaagatacaaatattctaagcttaatgagggcca

SEQ ID NO: 686308 - DNA, 1911 bp, Homo sapiens
ctggggactgttgtggggtggggggagcggggagggatagcattgggaggtatacctaatgctagatgacgagttagtgggtgcagcgcaccagcatgtcacatgtatacatatgtaactaacctgcacattgtgcacatgtaccctaaaacttaaagtataagaataaaaaaataaaaaataaataacataaataaaataaaaaataaaaaaaaagaaacttgctcttcttctctttcctttctcagcaaaacagcacctccaatggagcccattgctcaattcagaaattttagctttcttcttttccaaaaacccctagcctattacaaagttgtggagtatcatgcctataaattcaattatacaataatctgaagcaataacctgttttttctcataaaactatgatgtgaatattttcatagattattaaatattcgtcttcagtataacatttaatggcaggataatatcccatctttgagaagtagccaatctatgtaactaattctccattttggtgcactgcaagtttttaatttcactgatgcttcatgtatcatgataattttggaatgcactgcacgctttgtgtgcatcatttaatttaatcctcacaacatttttacatgggaatcatcactgccatgcccaattataaaaaatgttcaggaagtcgccccatagcagatcctcagcaggtttgggtttcaatagctccaggaatcacgcttcagctcacacagcattgctgcactaaatgaaatttctctatattcaactattaagattcaaacaggaaaaacaatagaaaacattttatcatattttttccaagtgtccaaatcaaggtagaattttaataataacaagctctgatattcagtctctctatacccttaataaagacaattgttgccactacacattcagaaaaagaacttcaattctgacacaattatgttactaaccattaataatttaaaatgacatctgcccttgtaccacattcaaagagttttctaagaatatttttgtatccacaaaattttatacagaattatgactgcatttgagaaacattttgagcattctccaatacttagaagtacaaaaacattcctgtaatcccagcactttgggaagctacggcgggcagatcacctgaggtcaggagttcgagtccagcctggccaacatggtgaaaccccgtctctattttaaaaattacaaaaattagccaggtatggtggcacatacytgtagtcccagctactcgagaggctgagacaggagaatctcttgaacccaggaggtggaggctacattcagccaagatcatgccactgcactccagcctaggtgacagagcaagactctgtctcaaaaaaaaaaaaaaaaagagagggaaaatgtctgtttttttgtatcattcttatcactgaagtaagtcatctaaacatctttactaaatggtcctttagtttcagtgactgtttattctccaaaatattgaaatttttcttctccaaactgtagtctctaatattgtttttccattaatatgtatctgccttactgccaattaaaaaagcagtatacattatatactttatatctttaaggcataaggtattttaaataaaatagaaaaataattgtttctattgtcccatgttgttctcctcctatttttgtcttttgagtctctttaccagttcagaggcaaatgccatttgtcctatagttaggcttgaaaagttgtagtcttttgaaggacatagagattcagaagattaaaatattttatcctatattactgtagtgatcatatacttcaacttgcagaacagaaaacttcactaaaaatatgagaagatacaaatattctaagcttaatgagggcca

SEQ ID NO: 686309 - DNA, 605 bp, Homo sapiens
cagatgttagttgtagaagctagacttagatagaaaacctaagttacaatggacatgtccttgctttataggaggatatgcatcttgaagggtttcaagaccagcaaagaattttccatggggggtctggctgatggataatactttgacataagattgtaaagcaacagctattcaaggatggctagtgttgcattagtctgtcttcaggcttaacctcctctttggtgtaatgagtttaggagtccmgagatgttttatttttccattatattatcttagttccatctccctcattaaaactcctcttattaactttggagccctggttccttttttgcgtttttaaagctctctagtacttgttgtcccaaagaccaccaggatggctaaataatagaaaggacagttttattggcaatagtgatttgcaagcctgaaagagacagtctccagtgtgcattgaagttgctttctcttggaagaggagaaggacaggttgggttttatgtttcacaaggctggcatcatacatatttggcaggtttgggggcaaagctatacatgtttgtgaggggatcctacatgcagactaggtaagctcg

SEQ ID NO: 686310 - DNA, 656 bp, Homo sapiens
ttttttcctagatagagtctcactctgctgcctaggctagagtacagtggtgcgatcttagctcacttcagtctccaactcctaggctcaattgatcctcctaccttagccgcccaagtagctgggaccacaggtgtacaccaccatgcccagctgatttatttttctttttttttgagatggagtgtcgctctgtcacacaggctggagtgcagtggcctgatcttggctcactgcaagctccgcctccaaggttcatgccattctcctgcctcagcctcctgagtagctgggactacaggcgcctccaccacgcccggctaattktttgtatttttagtagagacggggtttcaccgtgttagccaggatggtctcaatctcctgaccttgtgatccacctgccttggcctcccaaactgctgggattacaggtgtgagccaccgtgcccggcccctatttttcttttttgtagagatgggtcttattatgttgtccagtctggtcttgaactcctggctcaagcaatctgcctgtctcgacctcccagagtgttagaactacaggggactgcttaatgaaacaatggaggcagaaggtgactttgagatgatgtacagaactgagcaaccccaatctcaccaggtcttatcaa

SEQ ID NO: 686311 - DNA, 656 bp, Homo sapiens
ttttttcctagatagagtctcactctgctgcctaggctagagtacagtggtgcgatcttagctcacttcagtctccaactcctaggctcaattgatcctcctaccttagccgcccaagtagctgggaccacaggtgtacaccaccatgcccagctgatttatttttctttttttttgagatggagtgtcgctctgtcacacaggctggagtgcagtggcctgatcttggctcactgcaagctccgcctccaaggttcatgccattctcctgcctcagcctcctgagtagctgggactacaggcgcctccaccacgcccggctaattttttgtatttttagtagagacggggtttcaccgtgttagccaggatggtctcaatctcctgaccttgtgatccrcctgccttggcctcccaaactgctgggattacaggtgtgagccaccgtgcccggcccctatttttcttttttgtagagatgggtcttattatgttgtccagtctggtcttgaactcctggctcaagcaatctgcctgtctcgacctcccagagtgttagaactacaggggactgcttaatgaaacaatggaggcagaaggtgactttgagatgatgtacagaactgagcaaccccaatctcaccaggtcttatcaa

SEQ ID NO: 686312 - DNA, 656 bp, Homo sapiens
ttttttcctagatagagtctcactctgctgcctaggctagagtacagtggtgcgatcttagctcacttcagtctccaactcctaggctcaattgatcctcctaccttagccgcccaagtagctgggaccacaggtgtacaccaccatgcccagctgatttatttttctttttttttgagatggagtgtcgctctgtcacacaggctggagtgcagtggcctgatcttggctcactgcaagctccgcctccaaggttcatgccattctcctgcctcagcctcctgagtagctgggactacaggcgcctccaccacgcccggctaattttttgtatttttagtagagacggggtttcaccgtgttagccaggatggtctcaatctcctgaccttgtgatccacctgccttggcctcccaaacygctgggattacaggtgtgagccaccgtgcccggcccctatttttcttttttgtagagatgggtcttattatgttgtccagtctggtcttgaactcctggctcaagcaatctgcctgtctcgacctcccagagtgttagaactacaggggactgcttaatgaaacaatggaggcagaaggtgactttgagatgatgtacagaactgagcaaccccaatctcaccaggtcttatcaa

SEQ ID NO: 686313 - DNA, 1971 bp, Homo sapiens
ttataaatatttaatctttcccttttcctaatgttcacatttaggactatttctcgctaagttttgttggctctatttgtgctataatttaaaaatattttctaattttattaagtgtttgctttagaatttttgtaattgattatttagaattaaaaaaatattcacataagagtttttttcatttttttttttttgttactgattttttaccttaattgctttgtggtcagaaagctgaatttgcaccattttagccctttgaaatttgtttattttatggcttagacatatggttaatttcaataagtattctgaatatgtttaaccataggtatattctgtaattattgactgtagttttctatatgtgtctattaggccaaacttattgattaagtcattcaaatattctgtattctaattgattttttgttgctgctgcttattccttcagttaccaagagaagtatttttaaaaatctccctcagcgattatggatttatcttgtagttctatcagtttttgtttagtttatttatttatttatttgagatggattctcgctctgtctcccaggctggaatgcagtggcatgatcttggctcactgcaacctccgcctcccgggttcaagcaattctcctgcctcagcctctggagtagatgggactacaggcatgcaccatcatgccagctaattttttgtattttttttgtagagatggggtttcatcatgttggccaggctggtcttgaacttctgacctcaagtgatctgcctgcctcggcttcccaaagtgctgggattacaggcgtgagccactgcgcctggccttcttttgtatatttaaatatgttattttgttggtatattaagccttttaaataaattttatattgaagtatatactttttttttctgttagcactgagtagtttatctttttctgtccttttactttcagctcttctgtgttcctaatgtattgatggagctcttgtgaattgcttgtaattgawgctttttggggttgtacaaatctttgcttttaactagagtattttcaatacagttaacgtaatgactgacttttaaaatttaaaatctaccatcccattttatgctttctctttgtcctattctttctttctattacttatattttctttggactgattagaatatttctatcattttcatttttcccctatgtcttgatgttatacattctctttctgttgttttggtagtttccttcaaaattactacttgaatcctttattttaaaaattcaacattaatctctaccttcattgtcaccatggacaagctaaggaccttacaggacttctacttcatatgttcccaacttacatgctactgtgtcatgtattttcattctctttttaaaataaaaaaccccagaccttgaagatatcattgtcacagttctttttgtttttgttttttttttttgagacggagtctagctctgtcacctaggctggagtgcagtggcgtgatctcagctcactgcaagctccgcctcccgggttcacgccattctcctgcctcagcctcctgagtagctgggactacaggcgcctgccaccacgcctggctaattttttgtatttttagtagagacggggtttcactgtgttagccaggatggtctcgatctcctgacctcatgatccgcctgcctcggcctcccaaagtgctgggattacaggcatgagccaccgtgcctggcccattgtcacagttttatactatcagtattcatttagagttcctcacatattaccattttctttgtttacctccaactcacaactcagcattttcatccaccatggtttttccatctgcttacagtaaaaatctttagaatttcctgttttgaaggtctactgctatcaaactgtctctgttattgctgaaaatgtttttatttgtgctca

SEQ ID NO: 686314 - DNA, 666 bp, Homo sapiens
atgttctcctaaacaaaccactatgagagcttttaatcctaaagattaacactataaaatgggcatagtcccatggaaagtatttctgattggacagtgctactcaggtgtatttgactcagatctagaccactcccatgaaggtcagagggtcaatagtggtagaagtaggacctgcacatgacctccctctcacggaatttccaggttgatcttcctagcgggaagtattgatctataaagttatgatttgctgtatgcttataccgtgccacttacagtgcaaagtgctttttgtgcattatctcatgcagaaaatacattacaattcctggaaaaagtccaggtacttcaaattaccaccggagctctagaatcaataaattgaaaggaakgagaagaaaatcaagttttgtggaaaaatcatcaaaacaatggggatatcataggccacatatggtatcatcaaatagctctgacctttttatttgcaaaattagatgaccagcccatgtgccacagtttgctgatgtctgatatagattattcattaataattgcaaatctgaatattttcataagtaattttaatgaatggaaaattttatgacatatttgttttatatgtaatgtatatttatattaatttatacataaactgtattt

SEQ ID NO: 686315 - DNA, 666 bp, Homo sapiens
atgttctcctaaacaaaccactatgagagcttttaatcctaaagattaacactataaaatgggcatagtcccatggaaagtatttctgattggacagtgctactcaggtgtatttgactcagatctagaccactcccatgaaggtcagagggtcaatagtggtagaagtaggacctgcacatgacctccctctcacggaatttccaggttgatcttcctagcgggaagtattgatctataaagttatgatttgctgtatgcttataccgtgccacttacagtgcaaagtgctttttgtgcattatctcatgcagaaaatacattacaattcctggaaaaagtccaggtacttcaaattaccaccggagctctagaatcaataaattgaaaggaatgagaagaaaatcaagttttgtggaaaaatsatcaaaacaatggggatatcataggccacatatggtatcatcaaatagctctgacctttttatttgcaaaattagatgaccagcccatgtgccacagtttgctgatgtctgatatagattattcattaataattgcaaatctgaatattttcataagtaattttaatgaatggaaaattttatgacatatttgttttatatgtaatgtatatttatattaatttatacataaactgtattt

SEQ ID NO: 686316 - DNA, 1325 bp, Homo sapiens
tttctctttcccttttgagtcaggatccctggagagccttataagagcacagtgtctactggttaaagggtaaccattttcagggaatttgcattaatctgattacattttatcttccttcagggtgagggagtgggacggactgtgaggtttcctttgagtttcaggtttagacacaccccagaactcaaagtaaaaatgatataggcttaataataacttcccaagaagccttttcaagttcaaagtggattgtaaacattaattaatcaattcctcctcccaacactgtgtgaggtatgaattactcccattttatagacgagaatgtttaggtagcgagcataaataactcgtttcaagcctaaattggacttctagtcagtaaggcacaagcaatttggattgctgtgcaaagtgaaggctcatcagacttttctcattcacaaaaattaatgaaaacccgtcctaggaacccaaggctcgttgtctccctggagtgatccgagtggcctctcccaggttggcccaactcttatmtttttgcatcctcagttttctggccagaaagaattgccttcctccaacacaaccacaaggagttcagatcaaaggctcaccaatggtccatttaaatgcccagggcagtctaatgcatctctccataagactccctgaatggaggcttgggttttaccggcccagccctgccatcgaagtcatttgcaatccaggctgctcactgcacctgctgctgtggaagatgtaataggagcaggaagcaccatagaaggggaaatgctgtttggcacaagtaagtaaacagataggttaacaggccaacacatcttgcagcctttcactatatgaacctgttggctaatgttagtaatccacacttcttctacaaaagtcaagctggtggtcactttgcaggaaactctacaaggtttttctcaagacagtcctagcaatgaagcttccaacaaacttaacatggttctacatttccccaggaattgctgtaaactgataagcactgatattctttccattgactaaaacatcatgatcagtcaactgaggcctgggaggaatgatctttgtggctcatatgcaccaaggaggtttgcctcaactcgaagggtggagacactcagatttcagccttccctcatcagaaacacatttcctcatttggatatgtgttttccaaagcacttgggggttttcagcaaatctttatacatctcatggaagtaagaagaaaaaatactcatacttcacagaatacatgtgacatgtgtctgttaggtggggagagg

SEQ ID NO: 686317 - DNA, 588 bp, Homo sapiens
gtttctgtgtttctctgtttgtttgattgatggtggatgatgcagggaaaacagtgtgcggggagactctcaggtgtgggggcaggaagtagtaagttcgagagtaccacaaagttctccaggctgaacygagagctggctgggggttttggttacattgtgcttgaaagccctaggaagcccccagtcgaaatatggcaaattcaaatgcaaggaaagctgaagaagtcatacccacaaactctgggaaattacagccgcccgttattagtcattcttacgggcaatagagagtgttgttttaaaaaattcaaatctggtgctatgaacaaagacctgttctttcctggaccagataatcactgccaggatcgattcgagaaattaataggaggccttgtcctgtgctgccggcaactttgtttcttgtcaagtgcagccctgcacacaggtgtccctaagttcctggggaaccatcagcacccagaataccacaacacgtccttatttacacacaaatactgagttcctgaggcaagagggaagggcgtgaccatgaatggaagtagccaccaatgaggatggtta

SEQ ID NO: 686318 - DNA, 1523 bp, Homo sapiens
aaatttgtttcacttattttctgtctaaaaacccaccctcactttaacaatcgcttacaaaatgattagcgtatgccaaatgaaaaagcctagatattcttccctgtatgyaacttcctggaaagcaggggcctcctcatgttgtcctttgccgcatcccaatgcagtcacattgcctcagcaatcaattctgagctttcaatagttattaacggaatagactgcaagccactgactggtaatcgaaggccagcattagaaagaggataccgacaaacctacaaatagagggatctgtttccgtcactcgcgccctaacgcaaagggtgggacaacccgcgcgcatgcgtcgttgtcctctgctctccagggtaaaccccgcccctttctttaggccagttttaccacagcacatgcgcagtacaggatctgtctgttcgtttgtcggcgctaccaataaagttttagtgagcacagactcccttttctttggcaagatggcggagtacgacttgactactcgcatcgcgcactttttggatcggcatctagtctttccgcttcttgaatttctctctgtaaaggaggtgagggggtctttgggcgcaaggaaggcgtgggggcggatgaggtgctgagcaaggccgaaaggtggtgtctgtagtcctaggcctgacacgtgcgaggcggtcgcgagtttggttcctggacggacactaaggatcttctggtagtttagcgtcgtctcagttaagaagcaccgcactattcggcagtgaggaggagggaggttacggagagagaaaagaagtctctttcacttactgaggtgtcagtgcgggagggattttcgcatcatttcttctcggaagttggcgattcgctggtttcgctagagaacgttagagcttcacaggctggcttgtaaaagcaacctggagtgctgttagagcttttgatttttcttttgggaactgtgggaagcctgggcttggctgtgggtttttgcatgtcgagtcttttggagtgattctcttacacttaaaataagtatctagcgctttaatttccatgaagttgtgagttctttgcgttttcttgtcttggttaagtaggactttctagaacagcatatttcgtcagatggggacggcgctcccccgcccccccccccagaaaaaatccctccaatctttaaatgtgttttccagtggatatattgtactgacttcatgtggtttgaattggtcgttaatattcaattatctactcaagatatcatgaataaatgtgtaattctggaacttcattttaaagcatatgtcagtcctaaaagttttattggacttgaaagttttggctaaaagaaaattgacattagttataccgtgagtttattgggaaattgatgcattttaataatgcaaagtaatttgcagtgatgaaggaattcgaattttttcagaaaaataagtgagttctgtttctggaagcagactacaatataagtctacttagggaac

SEQ ID NO: 686319 - DNA, 1523 bp, Homo sapiens
aaatttgtttcacttattttctgtctaaaaacccaccctcactttaacaatcgcttacaaaatgattagcgtatgccaaatgaaaaagcctagatattcttccctgtatgtaacttcctggaaagcaggggcctcctcatgttgtcctttgccgcatcccaatgcagtcacattgcctcagcaatcaattctgagctttcaatagttattaacggaatagactgcaagccactgactggtaatcgaaggccagcattagaaagaggataccgacaaacctacaaatagagggatctgtttccgtcactcgcgccctaacgcaaagggtgggacaacccgcgcgcatgcgtcgttgtcctctgctctccagggtaaaccccgcccctttctttaggccagttttaccacagcacatgcgcagtacaggatctgtctgttcgtttgtcggcgctaccaataaagttttagtgagcacagactcccttttctttggcaagatggcggagtacgacttgactactcgcatcgcgcactttttggatcggcatctagtctttccgcttcttgaatttctctctgtaaaggaggtgagggggtctttgggcgcaaggaaggcgtgggggcggatgaggtgctgagcaaggccgaaaggtggtgtctgtagtcctaggcctgacacgtgcgaggcggtcgcgagtttggttcctggacggacactaaggatcttctggtagtttagcgtcgtctcagttaagaagcaccgcactattcggcagtgaggaggagggaggttacggagagagaaaagaagtctctttcacttactgaggtgtcagtgcgggagggattttcgcatcatttcttctcggaagttggcgattcgctggtttcgctagagaacgttagagcttcacaggctggcttgtaaaagcaacctggagtgctgttagagcttttgatttttcttttgggaactgtgggaagcctgggcttggctgtgggtttttgcatgtcgagtcttttggagtgattctcttacacttaaaataagtatctagcgctttaatttccatgaagttgtgagttctttgcgttttcttgtcttggttaagtaggactttctagaacagcatatttcgtcagatggggacggcgctcccccgcccccccccccagaaaaaatccctccaatctttaaatgtgttttccagtggatatattgtactgacttcatgtggtttgaattggtygttaatattcaattatctactcaagatatcatgaataaatgtgtaattctggaacttcattttaaagcatatgtcagtcctaaaagttttattggacttgaaagttttggctaaaagaaaattgacattagttataccgtgagtttattgggaaattgatgcattttaataatgcaaagtaatttgcagtgatgaaggaattcgaattttttcagaaaaataagtgagttctgtttctggaagcagactacaatataagtctacttagggaac

SEQ ID NO: 686320 - DNA, 1820 bp, Homo sapiens
tacatttgttctagaaaatggctggaaggtgttaaattgcttagctctgttacaaataagagttgcttagtaattatcatgcaaacattcatttcataaaagggtatttgttgatgtcttatcatgaaataggaaagatgaagagcttgcagacctttcaggctgagaaacacatttcacctccaccaaaactatatttattcttctcaagatgtttttttagccattccctgtgccagcctcatggctagttttcatgggataaggaggagtttggcctttggtggcataaatgatgaacagagctggttgctattaggggactcaataactgttctgcaggaaaaaacttttccttgagaagatgccgcgctaacatacttagctgactcacagaaatcgggatgtctttggctaaaatataaaaaagacccagaatatttatgatttcactttatttggacataaaaataaaatatcatttgattgtacgcataagatatatttggaacttccttagtgtattagtccattttcacactgctgataaagacatatccaagactgggtaatttataaaggaaaagaggtttaatggactcacagttccacgtggctggcagggcttcacaatcatcgtagaaagtgaaaggcatgtctcacatggcggcaggcaagagagaatgagagccaagtgaaaggggaaaccccttataagaccatcagatctcatgagacttactaccatgagaacagtatgggagaaaccatcctgatggttcagttatctcccactgggcccttcccacagcacatgagaatcctggcagctacaattcaagatgacatttgggtggggacacagacaaacgatatcactgaagcaccttatttaagtcattagttaataacttaatgtgtcactctacttggtaatcatttttcaaatatttggaagtaaatcttgatgcttcctcagcttgcttatagatagcattttgaaaaaaatcctagtaacttcatttgaaactacaggctgctgagttcattcatttttgtaagccccgtatctagcacaatggtcaacacatagtaaatgctcaataaataatataaaatggatggggatgtgttaagaatattgtgaaaaaacattatcttcaactttatagattttgtagtgattttgtcattcatatcccttctgtatacccaggtgatgaatattcagaaaacataggcatatartcttaggtagtatgcataattttggcatggaatcactgcttgtaatgcttacaattatttacaatatttgatgatggtggaaaatactttcatcagaattgacacagcctcattatatcatttattcttaaagtaacagacattgaaagagactgaagtaaataaacgagtgataatttaactgaagtgacacatccgttttaaacacggaatgccagcctgctgggatgaggagcatttctaaaaactgtttagcttagtgcagtttagcttcctgtaatatttatttactgtggatatagaacatttcctgtatgtatttgctacaaaattcttttggtaatcgtgtgtttattaatttttctcatttgcatttctttttagtgcattcatttcccttgctggaatttcagcacactgggtagatatgtgggccattgcaccaagtgctgagcctgcagattacttcccgtcaagtggcttccccctatattggcatccttatggtaatgaaacattgcacggccacttagccatcacaccacagccttgctgcacagctcagtttttgc

SEQ ID NO: 686321 - DNA, 660 bp, Homo sapiens
catgttgtgtatgtgcatatgtgagtgtgcacgtgtatgcatgtgtgtatgcgtgtgtatatgcgtatatgcatgtagtgtgtatagtgtgtatgtgtgtgcatgtgtgcatgtattagtgtgtctagtgtgtgtgtgcgtgtgtatgcatgtgcatatgtgtgtgcatgtattagtgtgtatagtgtgtatgtgtgtatatgtgtgcatatgtgtatgcatgtattagtgtgtatagtgtgtatgtgtgtgcatgtgtgtatgcatatattartgtgtatagtgtgtgtatgcatgtgtgtgcacattagtatgtgtatgtgcgtaaatgtatgtgtgggtctgtgtgtataagtgtgtgcgcgtgcatatgcatgtgtttgtgcgtgtgcacatgtatgagtgtgcagtgtgtgtgtgcgtgtgtgtgtatgggggaagggggcaggagtggttgtctttcccacctcacagggcggctgtgaggtgacgctgtgtgaatgtgttctaggaagtccacagctctctaggaccgtgtttatttaatgcccccaggagaagaggccagccttctgcaaagatgcccagccctcacactcctgcctctgggccagtgctagctgttctggaagggtgataggctttaggccccttcccttc

SEQ ID NO: 686322 - DNA, 598 bp, Homo sapiens
accacacctggctaatttttctggtagttttagtagaggcagggtttcacctatgttggccaggctgctttcgaactcttgacctcaagtgatctgcccacctttgccccccaaagggctaggattacaggcatgagccaccgcacccagcctccagtgaagttttctgatgcttgggattgcatttaacctgacatttcttaataattcagtttcacaagtgaaacaaatttccatttttttaagttgtgtttttcctaattttttaagctgcactcatttcaagtatgttggttttaagtgtcttggactgaaatataaactctttgaagttgatattttctaaaaataggatcattaagagttagtgtctcaaattaatttgccatctggtataactttatacatatatttacataaagatataccatcatgcatgagatgctttgataaagatatatatggacrtgtgtaaaattatagcaaacccttacttcccactaatctagtatactttttaaacttttgtttcactcagcatacatatacaatcaggacaagttatctttttctgtttttaacttttagaagtaaataa

SEQ ID NO: 686323 - DNA, 842 bp, Homo sapiens
agttagttggagatatgtgggaagagccacttggaccctgaagtctcagaatgtgctgaatgctctggatgtgtataactggtatattccttcttattagaaagtaacttcctgctctgcttgcttgaaatcatcagggacctcaacagagccttacaagacaaatcttatcttccacaggacctgttccaagggaattatacactagtatggccagttttaatatgttgctggaatgacttttagaagcttggaaatagtgatggcccacattaagtagaaatgcccaaatttccatgacatgttgtgagaaaaatgcaggtcaaaggctcaaaaatgggaatattgaaattgsatgtattatattggatgtattacataattccaatgcatttcagcccaactcagaggtggccttgaatgagtgtggtgtggtatggtgtggtgtggtgtggtgtggtgtgggaagatctttccaattaaaagaaatttgggtagtacacagggtcacctactttttgtggagagagaactgatctaaggtaaggataaatatggactcctgggtagtgatgagtggcttagctggttggtaaggggcctggaaggaagtagactggatgttcaggaaaaaatatgtggatagacatgtcaaaatgggtataaaaggcatgctatttcccaccaataagcattcaatacagaagagtacctgaaaaaccaaatgggcaggatgatttgtccaacaaatatcagttaatctctgtcctcagacaccccagcccttacaaaatcagcttatgaactgagtagcctttttggtgaagatggaggctatgcat

SEQ ID NO: 686324 - DNA, 842 bp, Homo sapiens
agttagttggagatatgtgggaagagccacttggaccctgaagtctcagaatgtgctgaatgctctggatgtgtataactggtatattccttcttattagaaagtaacttcctgctctgcttgcttgaaatcatcagggacctcaacagagccttacaagacaaatcttatcttccacaggacctgttccaagggaattatacactagtatggccagttttaatatgttgctggaatgacttttagaagcttggaaatagtgatggcccacattaagtagaaatgcccaaatttccatgacatgttgtgagaaaaatgcaggtcaaaggctcaaaaatgggaatattgaaattgcatgtattatattggatgtattayataattccaatgcatttcagcccaactcagaggtggccttgaatgagtgtggtgtggtatggtgtggtgtggtgtggtgtggtgtgggaagatctttccaattaaaagaaatttgggtagtacacagggtcacctactttttgtggagagagaactgatctaaggtaaggataaatatggactcctgggtagtgatgagtggcttagctggttggtaaggggcctggaaggaagtagactggatgttcaggaaaaaatatgtggatagacatgtcaaaatgggtataaaaggcatgctatttcccaccaataagcattcaatacagaagagtacctgaaaaaccaaatgggcaggatgatttgtccaacaaatatcagttaatctctgtcctcagacaccccagcccttacaaaatcagcttatgaactgagtagcctttttggtgaagatggaggctatgcat

SEQ ID NO: 686325 - DNA, 628 bp, Homo sapiens
aaaaattgtgttttttcccctccagatccactattatcattatttttgcattgcttccagtccaacgtccttcctttaatttttcttccagaacattccatcccctccagcctcttcctccattaaactgagaattgaatgactgaatgttcgtgaatttttagattcaccggtgctttcttccaatccctccaaacctctcatttttataaagaaacaaggaaaacatgaagcaccttacatcacaataccagtatcaacaacatatctttatcagctctcattccatattttaactaccttctaaatacagacccaaaccaaaaaattaatactttaagaaaggaaggatcagtgttctcttttcatttatcagtaagattagcagactgcaattagaatttctctcttcccccacggtctttcctccagtaaagacaaaatgctttcctcattcccatgattcaacaacaacagtaatttccttatcttcttgaacatactasctttaccttgacttttgtcgctttttatacccaatgctacaagaatatgaatacagctcttctacctctttgtagatacttttctttctcattttccattacgtctaagacatccatcctca

SEQ ID NO: 686326 - DNA, 628 bp, Homo sapiens
aaaaattgtgttttttcccctccagatccactattatcattatttttgcattgcttccagtccaacgtccttcctttaatttttcttccagaacattccatcccctccagcctcttcctccattaaactgagaattgaatgactgaatgttcgtgaatttttagattcaccggtgctttcttccaatccctccaaacctctcatttttataaagaaacaaggaaaacatgaagcaccttacatcacaataccagtatcaacaacatatctttatcagctctcattccatattttaactaccttctaaatacagacccaaaccaaaaaattaatactttaagaaaggaaggatcagtgttctcttttcatttatcagtaagattagcagactgcaattagaatttctctcttcccccacggtctttcctccagtaaagacaaaatgctttcctcattcccatgattcaacaacaacagtaatttccttatcttcttgaacatactagctttaccttgactttygtcgctttttatacccaatgctacaagaatatgaatacagctcttctacctctttgtagatacttttctttctcattttccattacgtctaagacatccatcctca

SEQ ID NO: 686327 - DNA, 624 bp, Homo sapiens
ccttctctgtttccacccccgccccacgtggaggcattcccctaggtttggcggctttgcctgtctcccttccgctctcagcgctccccacatgggcaataactcagggctccaaggcctcatctctcctccccagtctgcatttctaattcccatctctctcctgagtgctggctgtgcttttccaaaaatgctggttatggattggtggctggacgtaccatgtagccaaacacatatttcaagttacatgtaattaaacccattaaagttacactggggtgtgagcttactttttattacatcttgcagaaatgatggcaagctgggtggtaaagtgaaagatggtgagtaaatcaacatttgctgtttcacagttaaagcgattcaacagatttcggttttccctctccccggtgataccagacgtgttaatacctcttattaattacctcagctccgtacggtagagcaggtggctgcagcaatggagagccrcttagaggaagaacgacccttcactgttcacatcccacagccttatatgaaaatgtgcccttttccccatttgagataaaagaacattatagataaaatagccattcaatttggtattatcagtga

SEQ ID NO: 686328 - DNA, 649 bp, Homo sapiens
tgattgttataattgtgccctatctgtcaagcagcctcctgttttgaaggaatttctaattctcatggatatacatttggtgtttggagaggtagatattcgagttataagacagatgaaaatttgacttaatttaacacatttgtggccatgaaatgaattaatactggacagcggttgatgcagtttcagctactgtcactctgattactgtatgagcgactccagtcatccatagacaataattcattcataactttctctctcagtcaccacacacacacgaactacactggtgaagatttatttttgccgcatacggacataatttgagaggcatggcctccacgactcttctgtgaaatgacaagttttgtcaggaagtttctaggcctttatcagaytaaaaatagaacatggctacaatttttccactgtaatacttactcagataaatcagttgaaagagattattaggctcagggccactaagggaaaactttagttcaactctggctgctgtgggggcagaatcctgtggatatgattgtacactcttagcattgacatgaggattgatgaatggatatacaccaaactataggtatgtcaaggtaggggctgttataaaaacatgctgggttagtca

SEQ ID NO: 686329 - DNA, 965 bp, Homo sapiens
ccacattaaaccctaattacacgcctacttgccggtttgcccaaccaccctgtgagcttctagacgtcagggaatacatcttactcatttttgtttttccagcacctggtaccatatccagcatttatgattcgttgaatgaagacttagttgatatactaaataagaaatctattcaataagttaccctttatttagttttcaggttctgcgtgactaaagtcaaggcaatagtcatcagacatttttagttgctcttttcttaagtgtatacgcatttctatccattttaacatgcattcaaataggtttcacgtttagtttgcgtacagcctatttattatggaaaacgatctcgtcaactgataaatataagaaaatttcaatatactgaagttagtattcaaaccattcagtaaataatgtacaagataatcatgtataaaattrtatgtgtatgtaatgttaataaacagaattattatgatttgagaagaatattctttaaacaacaccaaaaaaaccctcagttagctgcttttccgacacttgagtgctcacggaatggcaaataaacgaaggttctatggctctaacacttattttttctatttcagtgataattacatcaataaacctgattcagcactcactgctattcaattcattaattaaaacaattttactgctaccactgtgatttttcaaggatatcaaaaacacattcaaaaatcaaaatagcatacatcatcagttttggtacattcatagcatgcttcactttaatttcaactctacaactaaaagaacatttagaattgaaacagagatggcatatattctgtatactttaacaaaaacacttagaacacaaatcgagcttaatagaaatggcaatttccatgtgaagcatagcaaactgccaagctttctgaaaatcctcttagaacagaaaaatatgaatg

SEQ ID NO: 686330 - DNA, 965 bp, Homo sapiens
ccacattaaaccctaattacacgcctacttgccggtttgcccaaccaccctgtgagcttctagacgtcagggaatacatcttactcatttttgtttttccagcacctggtaccatatccagcatttatgattcgttgaatgaagacttagttgatatactaaataagaaatctattcaataagttaccctttatttagttttcaggttctgcgtgactaaagtcaaggcaatagtcatcagacatttttagttgctcttttcttaagtgtatacgcatttctatccattttaacatgcattcaaataggtttcacgtttagtttgcgtacagcctatttattatggaaaacgatctcgtcaactgataaatataagaaaatttcaatatactgaagttagtattcaaaccattcagtaaataatgtacaagataatcatgtataaaattatatgtgtatgtaatgttaataaacagaattattatgatttgagaagaatattctttaaacaacaccaaaaaaaccctcagttagctgcttttccgacacttgagtgctcacggaatggcaaataaacgaaggttctatggctctaacacttattttttctatttcagtgataattacatcaataaacctgattcagcactcactgctattcaattcattaattaaaacaattttactgctaccactgtgatttttcaaggatatcaaaaacacattcaaaaatcaaaatagcatacatcatcagttttggtacattcatagcatgcttcactttaatttcaactctacaactaaaagaacatttagaattgaaacagagatggcatatattctgtatactttaacaaaaacacttagaacacaaatcgagyttaatagaaatggcaatttccatgtgaagcatagcaaactgccaagctttctgaaaatcctcttagaacagaaaaatatgaatg

SEQ ID NO: 686331 - DNA, 625 bp, Homo sapiens
tttctcctcttcctgtgcaacctgaggaaaggaggacattctcttatgcctgaatgaggaatctcagtagatgacacccatttacaaacactacaaaataycagattgaagtccctgatttagaaccccttcccatcctccacctctatcctgctcccctaaaaaggcataaaccactctaacactctaattaccagattggatctttacagggtgcgtgttcataaagatgggtttaaactatattccatgtcattatagttcatatatagactctcctactggcaggggtgacccaaagtggagttgtaggccagacacagtgtgtgcctgaggctcttctcttctctgtggcctccttaagtccacttctctgaaagggctttcccatatctaattaaccaatagctgctctcagaaaaggatctcatgcatcattcctcgggaacataacactttagatcccaggatatcatttattgtcttgaaaaatgatgacaaacctcttgaaattcctggcctagatatcccttcattcttacagataaatacgtcatgtgtttatcaaaatatgctttatgtatatttatggatatcagttttggtatttatggtatcagttttg

SEQ ID NO: 686332 - DNA, 2827 bp, Homo sapiens
  misc_feature 1761, 1762, 1763, 1764, 1765, 1766, 1767, 1768, 1769, 1770,1771, 1772, 1773, 1774, 1775, 1776, 1777, 1778, 1779, 1780,1781, 1782, 1783, 1784, 1785, 1786, 1787, 1788, 1789, 1790,1791, 1792, 1793, 1794, 1795, 1796, 1797, 1798, 1799: n = A,T,C or G
  misc_feature 1800, 1801, 1802, 1803, 1804, 1805, 1806, 1807, 1808, 1809,1810, 1811, 1812, 1813, 1814, 1815, 1816, 1817, 1818, 1819,1820, 1821, 1822, 1823, 1824, 1825, 1826, 1827, 1828, 1829,1830, 1831, 1832, 1833, 1834, 1835, 1836, 1837, 1838: n = A,T,C or G
  misc_feature 1839, 1840, 1841, 1842, 1843, 1844, 1845, 1846, 1847, 1848,1849, 1850, 1851, 1852, 1853, 1854, 1855, 1856, 1857, 1858,1859, 1860: n = A,T,C or G
aagcatcttaaactctttgcaaaatgagtcagagcataaattaatcaatagagaaccactggacccaacagaaacagcagacaggcactgcaattttcccaggtacccccaaattgattgcccagaaagataaagtaacaaaaatgcatgtcatagcttttcacttatgtgttttcaccaagattcaatagctttcagggctttaacacacggaagcagaattgggaaattaacacattgacagccaacaaatatccatccaatttgccatgtccaatatatcctacaaagaagctttcctagcgtttcactgtatttttgtgacatgattgcaaagtagtttttattatctacagtttacagatgtgtaagtcagggctcaaagatatagagtgacataagactctttgttactgtttctgtagcaactgtcattgtggaaatgcaagattttctgaaatttttgacggtatagctgtcaatttgctgaacatttaatcagcaccctctatgtaaaaaggtattgtatacctggagatgtaagagaaaaaaagacaaatatgattatttgctccgcctacaactagtaaaatgtgagctaataaggaagaaatacttgatcatgaggattataggggagaatataaaaagctcaacagtacaaaggaaacaacccactagggagcagaggagcaagagagatatttttagagtaatgggagatctctgtgatcttcacagagatcacaatttgaaagaggcttgaagaacggataggatttttgttgctgttgctgtttattgaaacaacaactcacaggtaacattttcagagaggcctgtagtttggtttgacttttagagccctggaacgtgatgcatgctgaagaggatttttttttttaacatgtaaacacaaagtaatttttgctttgtgtctcaatggcagcttttaggctgcagagtgatgagcctcgaagcagaattacaggaagaaaactctagagtttacacagaggatggatttctctgactgaggaagccacccaaaggattaaaaccccaaaagtaccacatcttcttttcagcggataagatacttttcagggaattacatcccctaaagagagatattgaagtccctacctctggtgcctattaatgtgaccatatgtggaaattgggtcttagcagacgtaatcaagttaagatgaaatcattagggtgggccataatccaatatgactgttatctttataagaagaacatttggacacaggcacatctagaatagcacgcgatgacagaggcagagacaggagtcagcaccgcaggagccaaagaacaccaggattgctgtcagcctctgaagctgggagagggccatgggatggattctccctcagaggctgtaggaccaacctgctggccccttgattttggcttctaccgcccagaactatgaaacaatgaatgcctgctgttctgagccacgcggtctgtagtacttccttacaggagccccaggagacccactcggaagctgtgggctttttctcctcttgggatgacataccactccacaaactcaattattttccatctggtgaaagaaaaagaaagttatcttgaaacaggagaatgaatgggaaaatatgagtggctcagaaagcttctctttaattattgacagcaacaaaatagagtgaagatatcagaatgtgtgggcgagagatagactttaaatctgaattgaattcnnnnnnnnnnnnnnnnnnnnnnnnnnnnnnnnnnnnnnnnnnnnnnnnnnnnnnnnnnnnnnnnnnnnnnnnnnnnnnnnnnnnnnnnnnnnnnnnnnnntttctcctccatcaccctggactgaggcccacctcctgtgtcaccatgttttatctcaaggctcatccttttcattgattggcaatgagaccatcattcttttcagacaaagccttacccacttgaaggatgtgatctaacttatggccctaaaagacaataacacaatagtacaagatctataaatttcacaaggtttgtgttatcagacttgaagggtactgatgtgtcatgactacaattcattcaaacaaagacattttgagagtaaaatgaggagttattaattattatgcctggaaagtaaacaagaactaggatgtatgtttcacctacaaattcaaggtgttgacagtccagaacaagttccttgggttgcaccaagcttaagtccatttctttgtagggattcctcatctaagtttaaaaattaccagagtccagacttatttgggacacatcaggcatatgaccaaacaacttggttgcatatattttattatggaataatctacagcctggacaactatktgtagtttcgagatacttttgctcaagtaattttatttgcttgtccggagtatatctctatgaaataagtttgcagttagttgtgcaaagtcaataaacactatttagtcataaattttggcttttaatccttgtcagttatcttgttttggttgccaagagggatagatgtctgaaatgaggttgcttcagcatgaatatattgtgatcactggaaaaacaaaagttgggatttttatagagtgcccaatagacagtgctgaaggaatggctggtgtggctgtttaagagcataatgaagcaaccacaccacattagtagccaaactttagcatagtttaaaagtgacctcattgctgtttctaaaatataaagagcagtatggcctagtttcaggctcttatcactgtcacaaagttcgtaaatattgttcgac

SEQ ID NO: 686333 - DNA, 2827 bp, Homo sapiens
  misc_feature 1761, 1762, 1763, 1764, 1765, 1766, 1767, 1768, 1769, 1770,1771, 1772, 1773, 1774, 1775, 1776, 1777, 1778, 1779, 1780,1781, 1782, 1783, 1784, 1785, 1786, 1787, 1788, 1789, 1790,1791, 1792, 1793, 1794, 1795, 1796, 1797, 1798, 1799: n = A,T,C or G
  misc_feature 1800, 1801, 1802, 1803, 1804, 1805, 1806, 1807, 1808, 1809,1810, 1811, 1812, 1813, 1814, 1815, 1816, 1817, 1818, 1819,1820, 1821, 1822, 1823, 1824, 1825, 1826, 1827, 1828, 1829,1830, 1831, 1832, 1833, 1834, 1835, 1836, 1837, 1838: n = A,T,C or G
  misc_feature 1839, 1840, 1841, 1842, 1843, 1844, 1845, 1846, 1847, 1848,1849, 1850, 1851, 1852, 1853, 1854, 1855, 1856, 1857, 1858,1859, 1860: n = A,T,C or G
aagcatcttaaactctttgcaaaatgagtcagagcataaattaatcaatagagaaccactggacccaacagaaacagcagacaggcactgcaattttcccaggtacccccaaattgattgcccagaaagataaagtaacaaaaatgcatgtcatagcttttcacttatgtgttttcaccaagattcaatagctttcagggctttaacacacggaagcagaattgggaaattaacacattgacagccaacaaatatccatccaatttgccatgtccaatatatcctacaaagaagctttcctagcgtttcactgtatttttgtgacatgattgcaaagtagtttttattatctacagtttacagatgtgtaagtcagggctcaaagatatagagtgacataagactctttgttactgtttctgtagcaactgtcattgtggaaatgcaagattttctgaaatttttgacggtatagctgtcaatttgctgaacatttaatcagcaccctctatgtaaaaaggtattgtatacctggagatgtaagagaaaaaaagacaaatatgattatttgctccgcctacaactagtaaaatgtgagctaataaggaagaaatacttgatcatgaggattataggggagaatataaaaagctcaacagtacaaaggaaacaacccactagggagcagaggagcaagagagatatttttagagtaatgggagatctctgtgatcttcacagagatcacaatttgaaagaggcttgaagaacggataggatttttgttgctgttgctgtttattgaaacaacaactcacaggtaacattttcagagaggcctgtagtttggtttgacttttagagccctggaacgtgatgcatgctgaagaggatttttttttttaacatgtaaacacaaagtaatttttgctttgtgtctcaatggcagcttttaggctgcagagtgatgagcctcgaagcagaattacaggaagaaaactctagagtttacacagaggatggatttctctgactgaggaagccacccaaaggattaaaaccccaaaagtaccacatcttcttttcagcggataagatacttttcagggaattacatcccctaaagagagatattgaagtccctacctctggtgcctattaatgtgaccatatgtggaaattgggtcttagcagacgtaatcaagttaagatgaaatcattagggtgggccataatccaatatgactgttatctttataagaagaacatttggacacaggcacatctagaatagcacgcgatgacagaggcagagacaggagtcagcaccgcaggagccaaagaacaccaggattgctgtcagcctctgaagctgggagagggccatgggatggattctccctcagaggctgtaggaccaacctgctggccccttgattttggcttctaccgcccagaactatgaaacaatgaatgcctgctgttctgagccacgcggtctgtagtacttccttacaggagccccaggagacccactcggaagctgtgggctttttctcctcttgggatgacataccactccacaaactcaattattttccatctggtgaaagaaaaagaaagttatcttgaaacaggagaatgaatgggaaaatatgagtggctcagaaagcttctctttaattattgacagcaacaaaatagagtgaagatatcagaatgtgtgggcgagagatagactttaaatctgaattgaattcnnnnnnnnnnnnnnnnnnnnnnnnnnnnnnnnnnnnnnnnnnnnnnnnnnnnnnnnnnnnnnnnnnnnnnnnnnnnnnnnnnnnnnnnnnnnnnnnnnnntttctcctccatcaccctggactgaggcccacctcctgtgtcaccatgttttatctcaaggctcatccttttcattgattggcaatgagaccatcattcttttcagacaaagccttacccacttgaaggatgtgatctaacttatggccctaaaagacaataacacaatagtacaagatctataaatttcacaaggtttgtgttatcagacttgaagggtactgatgtgtcatgactacaattcattcaaacaaagacattttgagagtaaaatgaggagttattaattattatgcctggaaagtaaacaagaactaggatgtatgtttcacctacaaattcaaggtgttgacagtccagaacaagttccttgggttgcaccaagcttaagtccatttctttgtagggattcctcatctaagtttaaaaattaccagagtccagacttatttgggacacatcaggcatatgaccaaacaacttggttgcatatattttattatggaataatctacagcctggacaactatttgtagtttcgagatacttttgctcaagtaattttatttgcttgtccggagtatatctctatgarataagtttgcagttagttgtgcaaagtcaataaacactatttagtcataaattttggcttttaatccttgtcagttatcttgttttggttgccaagagggatagatgtctgaaatgaggttgcttcagcatgaatatattgtgatcactggaaaaacaaaagttgggatttttatagagtgcccaatagacagtgctgaaggaatggctggtgtggctgtttaagagcataatgaagcaaccacaccacattagtagccaaactttagcatagtttaaaagtgacctcattgctgtttctaaaatataaagagcagtatggcctagtttcaggctcttatcactgtcacaaagttcgtaaatattgttcgac

SEQ ID NO: 686334 - DNA, 1496 bp, Homo sapiens
caataatgtcaaaattatttatcgtatacaatatatttatttatcctatacaatgaatataataatttcaaaattaatatttcaacattagtactaacaaaactactgtcaaaatttcacattagactttcctttgtcttgagtatatacacagagttctgtgttaaaaagccacttgaaataattatgttctcttgtgattgggtaccaatttggcatacagttatattcatttattgtagttttttatttaaaataggtaaaatatctacatggctcaaaattgaaattaaataaaaaggttcacacaaaaaattatttctttccctagcctctctgcccatttttctttctacttagtaaccatttgtgtcagcttctgatttatactgccactgtttctttttgaaaaaataaacaaatacacatacgtaaacttacacatatttttcttatttttccctgtccttaccaaatgttgcacaccatatatatcattctacacagtattttttcttttaaaacgacttatccttgggatcattccaacaccgctgtctttgttcatcctcttctctggctgcatagtggatgggtgtgccactgtttattctaccagtaccctcgggatgaacccttgagttgtttcctggcttctcctattataaacaatgcctcctgtgccttatagtattttgtacttctagagatatgtcttcagggtaaatttctaccttgattaccagtatttttcaaagctctccaagtgattcctctacraagctgagttgaggcttcctggaataaacttaggattgtgaattggctcacttaaaagtcaggtgcttagaaccacaaagaagtttgtgtttcaggtatgacaggcccagaacatggagcaagtcaggacaggagcaagtcaggacgggagcagactagagttgggctatgtgaggtgggaggatgaggacagataaagggcagaagccaagtaaacagacaagacatttggaaaagccaaatacagagagctgaatagtccctgcaaagactgggccaaccaccagcaccagaaaaaatattatagaaaccaaaaaggcaagctaggtaaggagaaaagcagacaagaagctcggaacagctgaaaaggacctggggatcggaggcaaaacgtaggctcaggtgctcagaaagtgagtgacccctacctggctggcatgaggttcccaaggacaggggagtgggagcctgtctgcaggtggagtgaggggtagactgcattctgcagcgaaggccatgaccccaagcgggctgatcattcagtgttggtgctgcgaggtaaggtagggccgtgtggacctaagaggagcttaactgggcttttcttttcctactgtaataaagtacttgtatgtataacataatatttaccattttaaccactcttacctttaaaattcagtggcattagttacatttggaatatttggcaacca

SEQ ID NO: 686335 - DNA, 647 bp, Homo sapiens
tgctcttttagagcaagcagctctttataccttatgagaaagctcaagaacaaaaaagttagcttttcattttaaggtaccatggttgattttagacagttctcatatcttcaaattattatcctggggaaaattatgcaggacaaaagtgttttttagaaatatttagcaaaaatatatgaattactgccttttcataatgcagccaggacttgcatcggaatatttgattatcctatgaccaactcacttataccttccacagaatactatagcacaacgtgtagtatatacaagctccagaatgcttggagatgtacctcactttagcactaagtagctgtgtaactttgagcaagttgtttaacctgtgtctccattcctctcraggatcataatagtctttctcatggggtaaaataatacatgtggaacactcaacaagatgcatggcacacagtaagtactgtaataaaagtaatttagagaaacagaagatactttgcttaacccaagataccttgaggtaaatttaaaagtcacattttaaatacattcctattgtttttcatacaactatcacttctgtggtaatcaaatggtgtttaaataatctatgtttatgcctacttacataggttaacata

SEQ ID NO: 686336 - DNA, 1417 bp, Homo sapiens
gccctcgttttgttattagattgtatcctttgcaggtgttttgtggcagtaataatatgtttaagccttgctattaagccgacattctctctccttgtttaatcatcttaaatttctacctaacttcctgccctacatcttgattattgaaagggttttacagattaatgtactcaagagggaaatatctgtaaagaattggtaaacgttttttgggttgaagggatttgtgaatagaaacaccgctgaattttgtatagccccatgttctggggctgacttctgtttggagcgtagtacagagatcttaacacctgtgcttttagaaacatctactcatctttaaaaataatcgtttgtactgtaatttggttgtttggtacatgaactttaaaactttagtaaaattgttaaataacattttttcttaatcttataaaaataggggaccagtatagatatgtgggagagtagtaatatcacattctagaaagaacatttaacacatcaatgtattttctttttttctaaatgtattcaggcattgaaaaacgatagggattttactgtacatacagatttttaaggttccaaaattgtttagtttgctttccatttatactcagatgttatgattataaatttactaagtttactgctgtaattcctcagtgttaaaagtgcaaagttaaatgtgaaaacagtgattactgttaagttaaatgtaatttttaacaaaccaaagctattgcactttatacctcattaagkttttgcttttagttttcgtgttctttctctgtcttggttttttaaaaaagatttatagactttctaattacgttggattttgtactaaaaatagaagtaataaaacattttcattgtcttatgaactttgtaaagaacatttgaaataattttgatgtgtacaaatacaagattagaatagaatatggaatttaaagcctgtaattgatgaagtttttcaagatcttccttgaaatcagccatttcaaatattagcaaaagagctaagtgaaatttaaatgttaagaacatagtctttttcatgtcagtagtaccctcgtttgccagtcattgaaatgcattcactttaaaggtatgctagtgattaatcagtattggcttccccccaccatcacagcatttgtggagcagccaggagtatttgctgtgtacttattgagatcactcatgttaagatcctggtgaaaataataccagttttcttttagattatttctaaactcaggtgaaatttctgatgagagtaataggagacgagggttaagatgatggtccagtttataataggtatataaataacaaatttgtgaataatcagtgacttttctgattaaaaactgatttctaccctttaatatataaaaat

SEQ ID NO: 686337 - DNA, 588 bp, Homo sapiens
tttcaaaagcaggtgctacccacaggaaggcaaaggccagagatggggaatggggaccaggggagcagccaggtcatggctctgggrctgtctggtgaggaaagggacttggcacagtgtctcctgtcccctcatctgccccgccttttgccgcatatttatacaacacaagaagtccacacttctgttcttcccagttcacagataattaactccgggcacaaagacaactgatttgccaaagtcacccagccagcaagtggaaagccaggatttgaaccccagcagtttggctgtaaagcctgtgctcttccacacctcacagcacagggttccacatctcgaggcaccgtctatgggttgccagtgagttacctgggtcacagaagatatatgtgctcagccctggccctttagaatggctttctccccactccacgcagggcacatgggggctactaactctgagctctacattggtagcagctggcaagacgctaaagctactcttccctcttggagaattagatgcaattaggtttgctaaattctcccatcagccctgctcactaaattcctcactgactg

SEQ ID NO: 686338 - DNA, 658 bp, Homo sapiens
taggatatttgcagatgtaatcaagctaaaaatgagtcatcctacatctaattaatggtgtccttataaacagactgagatttgaaaacccagatgacagagggaaataggtcacttgatgaccaaggcggagattgcagtgattcaactgcaagccaaaaaatgccaaggattactggcaacaagcaaaagctaggaaggcacaaggaaagatattttcctacaatcctcagagggagcaygtgtctgtagatgccctgattttggacatctggcctccagagttgtgaggcaattaatttttcttaaggccacctagtttgtggtaatttgatatggcagcactaggacatttatatgatgcctcaggtggaaaaaataggccctatagttagaagtttccttgactaatcttgctcacttcggtgcctcatttctactttctttcagggagcatgagctctgacttggggaaggagtattctaagcttcctttcagagccagtaattttcttccagttaaaaatcatttaagctaaactaaccctttttgttcattcaggctgtgtgacaaaaatatcatagactgcgtgactgaaaaaacaaacatttatttctcacagttctggaggctgggatgtccaaggtcaagatgctg

SEQ ID NO: 686339 - DNA, 651 bp, Homo sapiens
cttgcaaatcaacccattcccttttctgggtaaaggtaggagctagggagtctctttctgatcatatggcactgcaccagtgtcaaggtctctggtgaaaagttgtcctcaatcttcctattggcttcaatgagtctgcttttgcaccccccaggaagcaggagactttcaattagttgctgattactccaaagctaatctgtccatgaattgttgtaaaatcattgtgtttgttgaggaaatgaaggtccagtacttcccattccactatgctgttgacgtgtctctgctatctcatgtttttgaacaaaaaactttaataacctctatcgtagatagtcgtcaaagtcaatcaaagaaacgtcttggcagggtgttctggatcacatctgcaatcctagcactttgggaggccaaggaaagagtatgcttgaggccaggagtccaataccagcctgggcaacatagtgagacctcatctgtacaaaaataaaaaataataaaaaatgagaaaagtcctatgggactttcgtccttgacacattctgtttaaaatattctgtaataaattraaaactacataaacaatatttcaaatgatactaccctttgatgaagaagaccaaatcaagacttcaaatttttgaacaa

SEQ ID NO: 686340 - DNA, 678 bp, Homo sapiens
  misc_feature 4, 5, 6, 7, 8, 9, 10, 11, 12, 13, 14, 15, 16, 17, 18, 19,20, 21, 22, 23, 24, 25, 26, 27, 28, 29, 30, 31, 32, 33,34, 35, 36, 37, 38, 39, 40, 41, 42, 43, 44, 45, 46, 47,48, 49, 50, 51, 52, 53, 54, 55, 56, 57, 58, 59, 60, 61,62, 63: n = A,T,C or G
  misc_feature 64, 65, 66, 67, 68, 69, 70, 71, 72, 73, 74, 75, 76, 77, 78,79, 80, 81, 82, 83, 84, 85, 86, 87, 88, 89, 90, 91, 92,93, 94, 95, 96, 97, 98, 99, 100, 101, 102, 103: n = A,T,C or G
tggnnnnnnnnnnnnnnnnnnnnnnnnnnnnnnnnnnnnnnnnnnnnnnnnnnnnnnnnnnnnnnnnnnnnnnnnnnnnnnnnnnnnnnnnnnnnnnnnnnnnttcagtgtatgcactatgaagctccaacaacaaatgtgtcattgtcagcaaatgtcaagaaacctggaactggccgcttacagatggtaatagttcaagtatttgatctccagtttacgtctgaggctcacactctggaagacagtgattgccagaacaaaaggattccagtctttatatttgaggtattccttccttctaaccgaggtctgaggaccagttacaccccctgagggtactgaaaactgtatgttaaaaaaatattagctttgttaactgcagaaattggcttcattaaacaaagcaaacaacaaaagttcattcaaatttaccaaacagagattaaaatgttacataacaacaaaaatacaaaccttcctaattatgaaaagaaatttcaaaatataaaagaacaaataagcatatcacataayacacataattctaaaagagattaggttgaatggaaagaaaattatcagccttattaaatgtgaatggggttagctcacttgttaaaaagaaaaaaaaatttcaatttcacttgcaaaaaagacaactatatgctgtatata

SEQ ID NO: 686341 - DNA, 807 bp, Homo sapiens
ttttaaagaaaacattggcaaaaagaaaaagtatatatcaaaataatacctgcactcaccttgtttatatgtgcccatcaacagtgaattggataaagaaaatgtagcatatataccccatggaatattaagaagccataaagaaggaatgaaatcttgtcctttgcagcaacgtggaggcagctggaggccactatcctaagtgaattattaatccagaaacaaaaccaaataccacatgttctcatttataagtgagagttaaatagtagatacacacagacataaagatgacaatgataggcactggggactccaaaaggggggaggtagagaagggaggggaacaaggttgaaaaattacctcttggatgctacattcactatatgggtgatgggttcaacagaaactcaaacctcagccttagtgaacaaatctgcacatatatcccttgaatctaaaacaaaacaaaatttaaaacattaaaatatttggcaaattctagttatcctttaggagaaargttgtctttgatagtaaaaggtcaaatgcaatgctggagatcaagaaggacagcatctcaagactatgggcattatttttttattaaagaaggaaatttttaatggctttattattctatatactcttctcagatcagtttgatttaggctaacaatggtcacatctcacttacctggcacaatgctggtaaacaattcagtcataaatagggaagaatggataatctaaatagttaagccatgcacggtggatcatgcctgtaaccccaacagtttgggagg

SEQ ID NO: 686342 - DNA, 1418 bp, Homo sapiens
gggtacatttttatagaaacagcaaagtgatagtctttatttttattgattcatagtaaaactaatgtggaaattttaaagtcataaaaaatgttctagacaacatgcacaaactctagaaaacaaaaatttaataaatttgggagtgagacagctataaatcattcacaaattgcaaattcttaatttagtattctttaaattttttaaagaaatgtcaatattagagatagctgttttagagcactgtaagatatgaaattctctgcttatgacctcaggatcattatgttagaaatgcaagagacatggaccgtcatgtccaacatttctcaaagttcattccatagctctcagtcacactctgaaaaaaaatattcactggctaatacatttgtgaaactcggaataatatacawctcctatagagatttatacaatagtcaacatatcaaagtaatgagaaatcttgtagtatgaaaagctatttaactttgaaagaaaatatagcatgatagttcaaaagatcatggatgctagaactagactgggtgggtttaaagcccggttttgcttcttagtagttctgtgagcttaagctacttatttaacctcactgtatctgtttgcttaaataaagaccaaaaaatgcctatttcaaacaatattcttggaataatttaaacaagtcaatatagagaaaaaatatagtatcgggcacatcataataactattatagaacattttagttggcacttctcaaatataactgaccatttgtgtgtgtacacctcttaatagcccaaagaacatgactttgtccaagctcatttttttttagatggagtcttgctacattgcccaggctggagtacaatggcaggatcttggctcactgtaacctctgcctcccaggttcaagcaattctcctgcctcagtttcctgagtagctggtattacaggcctgcaccaccactcctggctaatttttgtatttttagtagagactgggtttcaccatgctggccaggctggtctcgaactcccgacctcaggcgatccacccacctcagcctctcaaagtgctgggcttacaggcgtgagccattgtgcccagcccaagctcattttaagaaaagaaaaacaacactcacaaaggccaaattacattgacaggtgttgacagggagtaactaacaggtagaactagaacttagttctccttcatccctatccaatcctgtttcacagtggcattctacattttaactaggtgatctctagactaaagaatatttctgcatatatatttttctatattttatacgtagtcagtcagccattatgggtttcatcttcccttaaatcttaaaaccccgcatttttacctgtgggcaataccttgaagtttcagaa

SEQ ID NO: 686343 - DNA, 1568 bp, Homo sapiens
aagctgaattgccttgaaagttttatattataagctaaaatttcctgagcttcctaaatggactacctccatactttctttttattgtcagtattagcttaattcctcttgcccttgcacccttatgctgctcataaattgacccttctttcctgatcacaccctttcaccagattctctgcttccagccaaatgcagacatcagccaatttcagcagaagtagagcacgtgtttgtagtaaccctcttctctctccttttccatctggcagtgcctaggaatagccacgtgtcaaccttagaatatggacattcaaggaagatttctgagtttccatattaaccatcttaacctctgctcaaaattgaatctatggcaggcagcacttccttgaataacatagctgagcaaatagttttgtcttgacagttgggtctcttcagaatctagctcaacttgcccttctcacaccttattcacatacccataaatgtgtcactcctgaaggttctcaacatgaaaatgctgaattttgaatctagccatttcacactaataattcccacacatgaattagtaatgacacagttcaactagaacttaattcataatgtgcctacttgcattagagtcagaggttacatagataaacagtgattggccttgattggcatggtaactcatgaagaagtcagatgtataagattagtatagatgcaatgcagtcaatagaaagataaaggtctgtatggtgtgttatgtagcatggggcatccttatctaatttgtatgctccaggtagtatcatggaaacatatgtttattcatgaaaactaaataagacttagccaaataaagagaattgggaagggttttatccactgagaaaasagcatcaactataaagcaggcaaaactacagtttgttattactaacgcataatatgtaaagtctgtgcagaatgactgaaaacatggttgaagaacaagaaagtgtcttggaaggagtttgtgctaacgttaaagcttttggactttattcagtaagttataagacaacccttgaagcgttttaagcagagacgtgatctacttccacaaattctgcttagttttacatatgtcttgaaatggtttgtttgggtaaacctctgcttctaatttgctatttacatttgcacatcaaaagatatttttaatggaaaagtacatgtaaattatatgagaccagtgctgtaaatgtaactactctgaaaacattttgcaattactgctgtggaatatgttaaagcatatatgtttacattgaaatccagattcctaaatgttaacctatctctgaatgtttgcaatgattccatcttggcaaacacatagctcatttattgaggcttacattttactgacactggcttaacaaggcactagaggctttagcttacatttctccataaaatgctgttacaattatgcaggtctgttcctgcggctgccattgctctacctaattattttttccgtactcatttgagtgtttcgattcttttttttcaacatattatcggct

SEQ ID NO: 686344 - DNA, 1448 bp, Homo sapiens
tctctgccatgattgtgaggcctccccagccacgtggaactgtaagcccattaaacctcttttctttataaattacccagtctcaggtatgtctttatcagcagtgtgaaaacgaactaatacagccatgcaatagagacataaagtagaatgacagagtaaatgaaaagaagggagaaagaaaaagtgccatattaaaatcaaaatgagactctaaagagcaaagatttaagctgactctaaagaaaatcaaataagagaaacggatgagaaacatttttaaaatgtggagaacaataagtgaaaagatgtagaccataacacaaatatgtaaaaggaaagctaatacagtgggaacaaatgaataatcagtgtgctttatgaaggaaatgatattatggaacaaatcaatatttaaaatacaaaaaaattatgactgattagagacttcagtctacagattgaaagactcaagactcatgactcacacaccacctgaacaggacaaattaagtcaactggagtgatatgggattagaatcttaaaagaattttcacaaggcttcttttaattcaacactattgcagaatcacagtcagtttctctttctgcaagatatatcttttaactgggaagagtttatgtttttcaacgatcactgtgatatgacatgctacttctttaattagagaggtctgtagcagagacacttcacactctcaatcattaggcaaaagtggtcatttttctgagaatatcttcttttctggttccatttcaattattccatttccatgttaaagcaattttcttaccaaactttgaactcatttatttggctgcttttgatttagacataaaccaaaggcaatatgtttatatggcttttctgacacttttattgctcatctttaaagaaaaaaaactcagtgagttttacttttcaaaaatatttactctttttttcaaactattgcttttgaatttttgagcaatgttaagaaaaaaatgtagaataagaaatgttatggtgtagacctggtaatttattgaatctttattaaacaaaaattgacttatgccaggaccataggttttaacaactgtatagttagaacctgaactagggtcttgcatatcattccagtgaatttttaggaaaaggttttatttcttctctttaatcatgtattgaatttagaaaagcactacactcagattcaacgtctaatcctgtaagacaagcatgcytcagatatgttactaatgggaatcaatgaaagaaaagtaaaagactgaaagatcttaatcgatcacatcaaggtccaagtgtttttgctataaagtcaattgacactaaaccagaaatccaatattagatttcatttaaaatttgactgccttagaattatgatgagcttaatgagttactaagtgaaaatgtcaa

SEQ ID NO: 686345 - DNA, 663 bp, Homo sapiens
gggtaagtgtgtttaccttgatgggttaatgtgagaaatgaaataatgtattcagtattcaacacctactatgtaccaaggccctgtgctaagtgarggatacaatagtgattaagacagttcaatctttcttgtcttgaagcatatattctagcactactgtgaaaacattattcagtcaagttgaatattgacacattcatgcttcatttatgtttcaaggaataaggtgcttttatattttattttttaagtagataacaagtacaagcaccaaaactgtttttatgtcaagccatttttttgatacacatttttttttttttgagacggactcactctgtcgcccaggctggaatgcagtggtgcgatctcagcttgctgcaacctctgcctcccgggttcaagtgattctcctgcctcagcctcccgagtagctgggattacaggcgcctgccaccatgcctggctaattttttttttttttttgtatttttagtagagacagagttttaccatgttggccaggctggttttggactcctgacctcaagtgatctacctgccttagcctcccaaagtgctgggattacagatgtgagccaccgtgcctggccagcaattatatttctacattctattctgaatatctgttactgtgac

SEQ ID NO: 686346 - DNA, 663 bp, Homo sapiens
gggtaagtgtgtttaccttgatgggttaatgtgagaaatgaaataatgtattcagtattcaacacctactatgtaccaaggccctgtgctaagtgaaggatacaatagtgattaagacagttcaatctttcttgtcttgaagcatatattctagcactactgtgaaaacattattcagtcaagttgaatattgacacattcatgcttcatttatgtttcaaggaataaggtgcttttatattttattttttaagtagataacaagtacaagcaccaaaactgtttttatgtcaagccatttttttgatacacatttttttttttttgagacrgactcactctgtcgcccaggctggaatgcagtggtgcgatctcagcttgctgcaacctctgcctcccgggttcaagtgattctcctgcctcagcctcccgagtagctgggattacaggcgcctgccaccatgcctggctaattttttttttttttttgtatttttagtagagacagagttttaccatgttggccaggctggttttggactcctgacctcaagtgatctacctgccttagcctcccaaagtgctgggattacagatgtgagccaccgtgcctggccagcaattatatttctacattctattctgaatatctgttactgtgac

SEQ ID NO: 686347 - DNA, 1279 bp, Homo sapiens
caactatccccattaagctttttacctctctgaaaagccctaaacaagcccactttccccctaacatttcctacaggtagaaatttaaagccctatagaattggggagcagaagaggggagcagcagaggccagcagagaaattatcctgggcaagttggattcatctttcaccccaaaggcatccctctctccttaaatttctgaccagcctgtttctgaagatgtgccaacatatttgttgcttacactcttttcatagaaaaaaacagaaggaagattgtggccaggaacaataaatatgacaggcccagtttgaaaactaactttagggtaacactttaaaaaaaaatagcaaagattggagagcagataccagcatgcaaagtgtttgtcatttcctatttttaaaagttgaataggccgggtccagtggctcacacctgtaatcccagcattttgggaggccgatgcaggtggatcatgaagtcaggagttcaagaccagcctgaccaacatggtgaaaccccgtctgtactaaaaatacaaaaattagccaggtgtggtggcaagcacctgtaatcccagctactcaggaggctgaagcaggagaatcacttgaacccaggagacggagattgcagaaagcagagatcatgcctctgcactctagcctgggtgacagagtgagactgtctcaaacacacacacacacacacacacacacacacacacacacacacacacacatttaataaggcagggtgcagtggctcactcctgtaatcccagcactttgggaggttgaggtgggcagatcgcctgaggtcaggtgtttgagaccagcctagccaacgtggtgaaaccctgcctctactaaaaatacagaaattagtcaggcatggcagcrggcgcctataatcccagctactagggaggctgaggcaggagaattgcttgaacctaggaggcggaggttgcagtgagctgagattatgccattacactctagcctgggcaacaagagtaaaactctgtctcaaaaaaaaaaaaagtttaataacaggtcataaggccttgtattgcaccaactacctatcctaaaatatgtgtgttctaccatgaggaggaagtagaaaatatgtgtgtttgaaaaggaaatcttgagacccttcaggatcctcaaagtctctcattatatatttttttaattttgtcactttttagcaattatagctttaaaaataatataaacatatttggatcacagtcttctaaaa

SEQ ID NO: 686348 - DNA, 631 bp, Homo sapiens
cacaccaaatgttaaatgtcatatttcaacaatataacaaaattctcagacaaaatgtatccaaacctcaaaaccatgctctttccacmcaaagtactacctcctctgtggatacccttgatatactttatattctttttttttttttccatttcagggttaattatacttgttaggcacatttttactttttgttaaacataaaaatgtttgtaaatagataaaaatttaaatttcagaaagctactcctgcctggacgaggctatctgaagcacacatggatcgttggcgggttccaaagggcagtatttggggcaaatggaataaactctctaagctagttcagcctgagctggtggtgtggagtaagactttgggaaatgtgagggacgtcccctacagggagcaggatagacagatgtagggagcagagggaggacatcacagcagatccagaggctgatgttgtcttgtaatgaaataaaactggagacggactaggggcttcaaatcaacgaagaggagcctgagatgaagactcatggtatgaaatttgggagaaaacagcaaaaggccagttgaggacgcattccacaaccacgtgcccagtggcatggaagagcagatgtc

SEQ ID NO: 686349 - DNA, 641 bp, Homo sapiens
ataagaaaagttcagcatctgcctgctaaagaaattaaacagtaacattcagttccaagttaaatgctacrattcacaatctcattctaaggtaaaaaagagtttattagtgaattatttccaaaagtcacttgtcacttccagattatactaatgtgtaaagcattaaaggcagaggaatatgtaacttattagcggtatttaagagtgtctgagctgatttcattttatataaagagcaaagccctatctatagaccctcaagcctacccaaggacaaaaaaaaaaatggtgaattttgtgctgtctgaaagaatccttcaatgcgtacttcaacacaaaccaagtcacttaagcttcaattgcctaagaaacaaaatcaagaattaacaaatcaatttaggcatttgtaaaaattatctactttcatctgacaccaaatcgtaatcataattgtttatcttaagaacagatttactcggtatgatgaaacacaacactgtttgcttccattaaatattttaagttcctaaagctaatggctgatttacacacacacacattatataaaatataacatttaattttactttttaatgttttcattatcattgcacacagttctggcatagcaaaaatgg

SEQ ID NO: 686350 - DNA, 641 bp, Homo sapiens
ataagaaaagttcagcatctgcctgctaaagaaattaaacagtaacattcagttccaagttaaatgctacaattcacaatctcattctaaggtaaaaaagagtttattagtgaattatttccaaaagtcacttgtcacttccagattatactaatgtgtaaagcattaaaggcagaggaatatgtaacttattagcggtatttaagagtgtctgagctgatttcattttatataaagagcaaagccctatctatagaccctcaagcctacccaaggacaaaaaaaaaaatggtgaattttgtgctgtctgaaagaatccttcaaygcgtacttcaacacaaaccaagtcacttaagcttcaattgcctaagaaacaaaatcaagaattaacaaatcaatttaggcatttgtaaaaattatctactttcatctgacaccaaatcgtaatcataattgtttatcttaagaacagatttactcggtatgatgaaacacaacactgtttgcttccattaaatattttaagttcctaaagctaatggctgatttacacacacacacattatataaaatataacatttaattttactttttaatgttttcattatcattgcacacagttctggcatagcaaaaatgg

SEQ ID NO: 686351 - DNA, 2327 bp, Homo sapiens
gagtgggtcacgaccggcctcaaagacaccaggtggcattctgtgtgggaggagtgagtgctgttctgccgcgcagtattctaatgtacaagatcaccaaaggaaatgcatttcctaccagggattgaggtcaacacaattgaaagaccctggccagctacagctcagcaatactcggcgacactcagagttgtttttgaaatgcaacatgtaattccttctctgcagagcctggtaagtcttaggaatgttacctggttctgccaataaagagcttttcgtaggaacctttcaaagtccccagaattacattaggaaagagtattacacggatgacatcccatgtgcctccttgaaagataccaacttaattacgcttttctccctgagcttaccacagcagtaacgataatagtaaacaacattcacttatttagcgtttactatatattaggcattttgctaagtgccagaccctatattaaacgctaataaacactgttgtattaacctccacaaccctaagaggcagaaaaggagcatattttgaggggtccagtgaagaatggaaatgagggtccccttgttcaaaaattattaagaatttctagatggggaaagcagaacattaaatcaagtatgggtctttcccagtgagtagggggccctatgagatggcacagatttcaggctcatgaagccagtcagcccagccagtaggagtaaactacattttgcagtgatgaagtggagctgttcaaggtcagctgctggttggaggtcgcacgtctaacttttgtggaacagagacctgaaccctggccacctcactcatcaactctcttctgttatatccaccaaaagcatctggtgtcscagcaggtcactcgctgggagccccacgttccgtgggcaccttcacatttttataatcagctcttggtctatttgaactcaccatcccaggggttttgcacatcagatgtggttggattgccattatacataatggttagtgttctccttgtctcattgtgaaattgtgctgaaatggagtaattacgttagccttgacttcaactcttcagtagagagaacaatttttacttatctctatccaagcacttttcttatagtaggagtttgttaagtgtttgttgaattattctgtaaatgtccactttgtgttaattctagggcaaaagttcctctcagaagcccgtacctctttgagcctcactacttgagtattcaaagctggaggacagaaatgttggtgtttgatacgtctctgcgagcaacaacttctccgcagccttgtgatgaggaagaaacaatttagagcctcctctacccactgatccttgcctgctgaagacatcaagtctctaagggcctcattgacactatcggcaagtagccagcatttaccatgtttctttaaactgattgtgtagtgatgtggctaaattaatatgttctacaaggaggcccggcacagtggctcacaactgtaatcccagcactttgggaggccgaggcgggtggatcacgaggtcaagagatcgagaccatcctggccaacatggtgaaaccccatctctattaaaaatacaaaaattagctgggcatggtgatgggtgcctgtagtcccagctactctggaggctgaggcagaagaacctcttgaatccaggaggcagaggttgcagtgagccgagattgcgtcactgcactccagcctggcaacagagcaagactccatctcaaaaataaataaataaatacataaaaataaaaaaaccaaactcttctataaagaaacagaaaacagaaaccagctacagcagaaacgttcagagtctcaagcagatctctggtgttaggattcatgacttgtacaattgccacagaggaactgtctctcctctgaaacagtggaaatgacaataaatgcatcataattctaacacgcttaaatgatgatgtgcaaagaaacgctattagaataccaatgtttctgacatttgaatcattgccattctgagtggtgtgagatggtatctcattgtagtttggatttgcgcttctctaatgatcattgatcttgagctttttttcatgtttgttggctgcacaaatgtcttcttttgagaaggctctgttcatgtcctttgctcactttttgatggggttgtttgtttttttcttgtaaatttgtttaagttccttgtagattctggatattagactttgtcagatggctagattgcaagatttttctcccattctgtaggttgcctgctctctcataagtgggagttgaa

SEQ ID NO: 686352 - DNA, 2327 bp, Homo sapiens
gagtgggtcacgaccggcctcaaagacaccaggtggcattctgtgtgggaggagtgagtgctgttctgccgcgcagtattctaatgtacaagatcaccaaaggaaatgcatttcctaccagggattgaggtcaacacaattgaaagaccctggccagctacagctcagcaatactcggcgacactcagagttgtttttgaaatgcaacatgtaattccttctctgcagagcctggtaagtcttaggaatgttacctggttctgccaataaagagcttttcgtaggaacctttcaaagtccccagaattacattaggaaagagtattacacggatgacatcccatgtgcctccttgaaagataccaacttaattacgcttttctccctgagcttaccacagcagtaacgataatagtaaacaacattcacttatttagcgtttactatatattaggcattttgctaagtgccagaccctatattaaacgctaataaacactgttgtattaacctccacaaccctaagaggcagaaaaggagcatattttgaggggtccagtgaagaatggaaatgagggtccccttgttcaaaaattattaagaatttctagatggggaaagcagaacattaaatcaagtatgggtctttcccagtgagtagggggccctatgagatggcacagatttcaggctcatgaagccagtcagcccagccagtaggagtaaactacattttgcagtgatgaagtggagctgttcaaggtcagctgctggttggaggtcgcacgtctaacttttgtggaacagagacctgaaccctggccacctcactcatcaactctcttctgttatatccaccaaaagcatctggtgtcgcagcaggtcactcgcygggagccccacgttccgtgggcaccttcacatttttataatcagctcttggtctatttgaactcaccatcccaggggttttgcacatcagatgtggttggattgccattatacataatggttagtgttctccttgtctcattgtgaaattgtgctgaaatggagtaattacgttagccttgacttcaactcttcagtagagagaacaatttttacttatctctatccaagcacttttcttatagtaggagtttgttaagtgtttgttgaattattctgtaaatgtccactttgtgttaattctagggcaaaagttcctctcagaagcccgtacctctttgagcctcactacttgagtattcaaagctggaggacagaaatgttggtgtttgatacgtctctgcgagcaacaacttctccgcagccttgtgatgaggaagaaacaatttagagcctcctctacccactgatccttgcctgctgaagacatcaagtctctaagggcctcattgacactatcggcaagtagccagcatttaccatgtttctttaaactgattgtgtagtgatgtggctaaattaatatgttctacaaggaggcccggcacagtggctcacaactgtaatcccagcactttgggaggccgaggcgggtggatcacgaggtcaagagatcgagaccatcctggccaacatggtgaaaccccatctctattaaaaatacaaaaattagctgggcatggtgatgggtgcctgtagtcccagctactctggaggctgaggcagaagaacctcttgaatccaggaggcagaggttgcagtgagccgagattgcgtcactgcactccagcctggcaacagagcaagactccatctcaaaaataaataaataaatacataaaaataaaaaaaccaaactcttctataaagaaacagaaaacagaaaccagctacagcagaaacgttcagagtctcaagcagatctctggtgttaggattcatgacttgtacaattgccacagaggaactgtctctcctctgaaacagtggaaatgacaataaatgcatcataattctaacacgcttaaatgatgatgtgcaaagaaacgctattagaataccaatgtttctgacatttgaatcattgccattctgagtggtgtgagatggtatctcattgtagtttggatttgcgcttctctaatgatcattgatcttgagctttttttcatgtttgttggctgcacaaatgtcttcttttgagaaggctctgttcatgtcctttgctcactttttgatggggttgtttgtttttttcttgtaaatttgtttaagttccttgtagattctggatattagactttgtcagatggctagattgcaagatttttctcccattctgtaggttgcctgctctctcataagtgggagttgaa

SEQ ID NO: 686353 - DNA, 2327 bp, Homo sapiens
gagtgggtcacgaccggcctcaaagacaccaggtggcattctgtgtgggaggagtgagtgctgttctgccgcgcagtattctaatgtacaagatcaccaaaggaaatgcatttcctaccagggattgaggtcaacacaattgaaagaccctggccagctacagctcagcaatactcggcgacactcagagttgtttttgaaatgcaacatgtaattccttctctgcagagcctggtaagtcttaggaatgttacctggttctgccaataaagagcttttcgtaggaacctttcaaagtccccagaattacattaggaaagagtattacacggatgacatcccatgtgcctccttgaaagataccaacttaattacgcttttctccctgagcttaccacagcagtaacgataatagtaaacaacattcacttatttagcgtttactatatattaggcattttgctaagtgccagaccctatattaaacgctaataaacactgttgtattaacctccacaaccctaagaggcagaaaaggagcatattttgaggggtccagtgaagaatggaaatgagggtccccttgttcaaaaattattaagaatttctagatggggaaagcagaacattaaatcaagtatgggtctttcccagtgagtagggggccctatgagatggcacagatttcaggctcatgaagccagtcagcccagccagtaggagtaaactacattttgcagtgatgaagtggagctgttcaaggtcagctgctggttggaggtcgcacgtctaacttttgtggaacagagacctgaaccctggccacctcactcatcaactctcttctgttatatccaccaaaagcatctggtgtcgcagcaggtcactcgctgggagccccacgttccgtgggcaccttcacatttttataatcagctcytggtctatttgaactcaccatcccaggggttttgcacatcagatgtggttggattgccattatacataatggttagtgttctccttgtctcattgtgaaattgtgctgaaatggagtaattacgttagccttgacttcaactcttcagtagagagaacaatttttacttatctctatccaagcacttttcttatagtaggagtttgttaagtgtttgttgaattattctgtaaatgtccactttgtgttaattctagggcaaaagttcctctcagaagcccgtacctctttgagcctcactacttgagtattcaaagctggaggacagaaatgttggtgtttgatacgtctctgcgagcaacaacttctccgcagccttgtgatgaggaagaaacaatttagagcctcctctacccactgatccttgcctgctgaagacatcaagtctctaagggcctcattgacactatcggcaagtagccagcatttaccatgtttctttaaactgattgtgtagtgatgtggctaaattaatatgttctacaaggaggcccggcacagtggctcacaactgtaatcccagcactttgggaggccgaggcgggtggatcacgaggtcaagagatcgagaccatcctggccaacatggtgaaaccccatctctattaaaaatacaaaaattagctgggcatggtgatgggtgcctgtagtcccagctactctggaggctgaggcagaagaacctcttgaatccaggaggcagaggttgcagtgagccgagattgcgtcactgcactccagcctggcaacagagcaagactccatctcaaaaataaataaataaatacataaaaataaaaaaaccaaactcttctataaagaaacagaaaacagaaaccagctacagcagaaacgttcagagtctcaagcagatctctggtgttaggattcatgacttgtacaattgccacagaggaactgtctctcctctgaaacagtggaaatgacaataaatgcatcataattctaacacgcttaaatgatgatgtgcaaagaaacgctattagaataccaatgtttctgacatttgaatcattgccattctgagtggtgtgagatggtatctcattgtagtttggatttgcgcttctctaatgatcattgatcttgagctttttttcatgtttgttggctgcacaaatgtcttcttttgagaaggctctgttcatgtcctttgctcactttttgatggggttgtttgtttttttcttgtaaatttgtttaagttccttgtagattctggatattagactttgtcagatggctagattgcaagatttttctcccattctgtaggttgcctgctctctcataagtgggagttgaa

SEQ ID NO: 686354 - DNA, 2327 bp, Homo sapiens
gagtgggtcacgaccggcctcaaagacaccaggtggcattctgtgtgggaggagtgagtgctgttctgccgcgcagtattctaatgtacaagatcaccaaaggaaatgcatttcctaccagggattgaggtcaacacaattgaaagaccctggccagctacagctcagcaatactcggcgacactcagagttgtttttgaaatgcaacatgtaattccttctctgcagagcctggtaagtcttaggaatgttacctggttctgccaataaagagcttttcgtaggaacctttcaaagtccccagaattacattaggaaagagtattacacggatgacatcccatgtgcctccttgaaagataccaacttaattacgcttttctccctgagcttaccacagcagtaacgataatagtaaacaacattcacttatttagcgtttactatatattaggcattttgctaagtgccagaccctatattaaacgctaataaacactgttgtattaacctccacaaccctaagaggcagaaaaggagcatattttgaggggtccagtgaagaatggaaatgagggtccccttgttcaaaaattattaagaatttctagatggggaaagcagaacattaaatcaagtatgggtctttcccagtgagtagggggccctatgagatggcacagatttcaggctcatgaagccagtcagcccagccagtaggagtaaactacattttgcagtgatgaagtggagctgttcaaggtcagctgctggttggaggtcgcacgtctaacttttgtggaacagagacctgaaccctggccacctcactcatcaactctcttctgttatatccaccaaaagcatctggtgtcgcagcaggtcactcgctgggagccccacgttccgtgggcaccttcacatttttataatcagctcttggtctatttgaactcaccatcccaggggttttgcacatcagatgtggttggattgccattatacataatggttagtgttctccttgtctcattgtgaaattgtgctgaaatggagtaattacgttagccttgacttcaactcttcagtagagagaacaatttttacttatctctatccaagcacttttcttatagtaggagtttgttaagtgtttgttgaattattctgtaaatgtccactttgtgttaattctagggcaaaagttcctctcagaagcccgtacctctttgagcctcactacttgagtattcaaagctggaggacagaaatgttggtgtttgatacgtctctgcgagcaacaacttctccgcagccttgtgatgaggaagaaacaatttagagcctcctctacccactgatccttgcctgctgaagacatcaagtctctaagggcctcattgacactatcggcaagtagccagcatttaccatgtttctttaaactgattgtgtagtgatgtggctaaattaatatgttctacaaggaggcccggcacagtggctcacaactgtaatcccagcactttgggaggccgaggcgggtggatcacgaggtcaagagatcgagaccatcctggccaacatggtgaaaccccatctctattaaaaatacaaaaattagctgggcatggtgatgggtgcctgtagtcccagctactctggaggctgaggcagaagaacctcttgaatccaggaggcagaggttgcagtgagccgagattgcgtcactgcactccagcctggcaacagagcaagactccatctcaaaaataaataaataaatacataaaaataaaaaaaccaaactcttctataaagaaacagaaaacagaaaccagctacagcagaaacgttcagagtctcaagcagatctctggtgttaggattcatgacttgtacaattgccacagaggaactgtctctcctctgaaacagtggaaatgacaataaatgcatcataattctaacacgcttaaatgatgatgtgcaaagaaacgctattagaataccaatgtttctgacatttgaatcattgccattctgagtggtgtgagatggtatctcwttgtagtttggatttgcgcttctctaatgatcattgatcttgagctttttttcatgtttgttggctgcacaaatgtcttcttttgagaaggctctgttcatgtcctttgctcactttttgatggggttgtttgtttttttcttgtaaatttgtttaagttccttgtagattctggatattagactttgtcagatggctagattgcaagatttttctcccattctgtaggttgcctgctctctcataagtgggagttgaa

SEQ ID NO: 686355 - DNA, 1522 bp, Homo sapiens
atagctttatgttaaattcatttctcatctttcattggcccttgggaagacgtccagatcccttaacatagcttacgaaaccctctcaaactcagggcccacctttctctccaacttcattcccccagccccgacgtcatctgaggttcaagttcagtagcccctcttgatagctgagcacaggaagctcagggccctgcgttttgggcatttgaagggttccgctggtcgtggctttccccaccatctcctccgtttccacacgacttgctcctgcatacctcagcttcagtgccgctccgagaggcctttcctaatctctgaaccaggagaggcttcccaccacaagctcctctatgggattctggttaattaccagtgaaacgtccacctttccagcccgcctgtaagctaggccataataggggccgtagccctccttacagccgcgttcttgtcacctgcgcagtgtccagcgcacactcgcctcctacgtatttgccttgtgagggatcaatcggtgtcgtagagccgttcagagctattcctctattaagtgatttggataccatggtgactaagaagcatgctgtgatcgctggggtttatggaaatattktgtgctcctgagcgttcaaacaggtggaatatcaactttattaagcccaggtggtggtgcagtttaaatgcgatttcatcttttcttattttaatttacgaattgctcagttgatcatattagaaaagagtacccacattgtgcctgctggagccatatctttgtaaaaattctgaaagcaaggggaaatgttggagtaaaattatcacatttcctaacaatgtctgttttgactggaagctctaatgcataattttgtgtcaaccagaataaaagtaatctttttttttcctggtggtgctttatagttagattgtagggaatgttcataaaatatgccagccatgcacctttgattcaatattcatgtattctcccacatacggaatttcaaggccatgtttaaggggaatgaaacgaggcctcataaagaatggcagcttatgcagcttacttttaaaaagaggctctgagaaacctttagctttttcaaacttccaaattttaaccccaaatccactagagcccaaatacccacatttgtctctgaataatcgtttgcttttggttaaggatggttacactagcacaatttgtttttttttttgagatgaagtcttgctctgttgcccaggctggagtgcggtggcatgatctcggctcaccacaacctccacctcctgggttcaacaattcttgtgcctcagcctcctgagtagctgggactacaggcgagcaccatcacgcccagctaatttttgtatttttgttacagatgaggtttcaccatattggccaggatggtcttgatctcttgacctcatgatctgcccacctcggcccagtcacacatgtttccctacgcaagctccctattgattggaatgatgaatatttccaatg

SEQ ID NO: 686356 - DNA, 1522 bp, Homo sapiens
atagctttatgttaaattcatttctcatctttcattggcccttgggaagacgtccagatcccttaacatagcttacgaaaccctctcaaactcagggcccacctttctctccaacttcattcccccagccccgacgtcatctgaggttcaagttcagtagcccctcttgatagctgagcacaggaagctcagggccctgcgttttgggcatttgaagggttccgctggtcgtggctttccccaccatctcctccgtttccacacgacttgctcctgcatacctcagcttcagtgccgctccgagaggcctttcctaatctctgaaccaggagaggcttcccaccacaagctcctctatgggattctggttaattaccagtgaaacgtccacctttccagcccgcctgtaagctaggccataataggggccgtagccctccttacagccgcgttcttgtcacctgcgcagtgtccagcgcacactcgcctcctacgtatttgccttgtgagggatcaatcggtgtcgtagagccgttcagagctattcctctattaagtgatttggataccatggtgactaagaagcatgctgtgatcgctggggtttatggaaatattgtgtgctcctgagcgttcaarcaggtggaatatcaactttattaagcccaggtggtggtgcagtttaaatgcgatttcatcttttcttattttaatttacgaattgctcagttgatcatattagaaaagagtacccacattgtgcctgctggagccatatctttgtaaaaattctgaaagcaaggggaaatgttggagtaaaattatcacatttcctaacaatgtctgttttgactggaagctctaatgcataattttgtgtcaaccagaataaaagtaatctttttttttcctggtggtgctttatagttagattgtagggaatgttcataaaatatgccagccatgcacctttgattcaatattcatgtattctcccacatacggaatttcaaggccatgtttaaggggaatgaaacgaggcctcataaagaatggcagcttatgcagcttacttttaaaaagaggctctgagaaacctttagctttttcaaacttccaaattttaaccccaaatccactagagcccaaatacccacatttgtctctgaataatcgtttgcttttggttaaggatggttacactagcacaatttgtttttttttttgagatgaagtcttgctctgttgcccaggctggagtgcggtggcatgatctcggctcaccacaacctccacctcctgggttcaacaattcttgtgcctcagcctcctgagtagctgggactacaggcgagcaccatcacgcccagctaatttttgtatttttgttacagatgaggtttcaccatattggccaggatggtcttgatctcttgacctcatgatctgcccacctcggcccagtcacacatgtttccctacgcaagctccctattgattggaatgatgaatatttccaatg

SEQ ID NO: 686357 - DNA, 1522 bp, Homo sapiens
atagctttatgttaaattcatttctcatctttcattggcccttgggaagacgtccagatcccttaacatagcttacgaaaccctctcaaactcagggcccacctttctctccaacttcattcccccagccccgacgtcatctgaggttcaagttcagtagcccctcttgatagctgagcacaggaagctcagggccctgcgttttgggcatttgaagggttccgctggtcgtggctttccccaccatctcctccgtttccacacgacttgctcctgcatacctcagcttcagtgccgctccgagaggcctttcctaatctctgaaccaggagaggcttcccaccacaagctcctctatgggattctggttaattaccagtgaaacgtccacctttccagcccgcctgtaagctaggccataataggggccgtagccctccttacagccgcgttcttgtcacctgcgcagtgtccagcgcacactcgcctcctacgtatttgccttgtgagggatcaatcggtgtcgtagagccgttcagagctattcctctattaagtgatttggataccatggtgactaagaagcatgctgtgatcgctggggtttatggaaatattgtgtgctcctgagcgttcaaacaggtggaatatcaactttattaagcccaggtggtggtgcwgtttaaatgcgatttcatcttttcttattttaatttacgaattgctcagttgatcatattagaaaagagtacccacattgtgcctgctggagccatatctttgtaaaaattctgaaagcaaggggaaatgttggagtaaaattatcacatttcctaacaatgtctgttttgactggaagctctaatgcataattttgtgtcaaccagaataaaagtaatctttttttttcctggtggtgctttatagttagattgtagggaatgttcataaaatatgccagccatgcacctttgattcaatattcatgtattctcccacatacggaatttcaaggccatgtttaaggggaatgaaacgaggcctcataaagaatggcagcttatgcagcttacttttaaaaagaggctctgagaaacctttagctttttcaaacttccaaattttaaccccaaatccactagagcccaaatacccacatttgtctctgaataatcgtttgcttttggttaaggatggttacactagcacaatttgtttttttttttgagatgaagtcttgctctgttgcccaggctggagtgcggtggcatgatctcggctcaccacaacctccacctcctgggttcaacaattcttgtgcctcagcctcctgagtagctgggactacaggcgagcaccatcacgcccagctaatttttgtatttttgttacagatgaggtttcaccatattggccaggatggtcttgatctcttgacctcatgatctgcccacctcggcccagtcacacatgtttccctacgcaagctccctattgattggaatgatgaatatttccaatg

SEQ ID NO: 686358 - DNA, 1664 bp, Homo sapiens
tttatttaatgcaagtcataccctaggagaataaaagattactgagtcattgtccatgcaaagttgagtattatgttgagattttgagttttcaacaatagctaattttcagtgaagagattatgctgtaaaattgaaatgagtttggaaaggagtcagttaaagtttcacacagttatgatgtagaagtttgttattatcagtggttarcgctaattaacacaagaatgtgatttcagatgacattgaaggggtatgtaagtgccttttttgtgtctcttactgtttatggaagaaccaactcttgtggaaaatgtagactttgcagccattggaatataattatatgtgttttgtttgtttttatagaacagatgcaagacaaagaacatagtatgagatattggaatgtaatttcaaaacatatgtttccaaaattatggaaacgttctggatggtaaataaatcctttcagtctcagagggtacaggctgcaaggctgagggagagctgagtgttggatggggaagaacgtggtttaagtaacaggctgaatagtaagcacatcaaagccattaaagcataaacccccagatttaaaaacgtgagaggcgaaagattatgtagcatggtctggcggctttatagaacccgtttcaaatgaggtatagaacaaaagaatgtgtgattgaagctcttgaagagatttatttcaggagagaggcaaacattttgctctgataccaattaaccaggagaaagcaccacgtcataaatgccaatattaaaaatgtaaatcctacacccgagggtgtattgaagacaggtcaaaattctttgaagatggaatgcataaagagataacaggaagagagccttccagctgctcaggctacctgtttagttctgtgtcctgtctgctgatgagattttccacggggaagcgggctcttgtttggggtggtttggctacttgacctattatgcgggatttagatctccttcaagagaatttattatgggaactctagaagatcttgtttataatactcctttatctgtaatgacttggagatgttccagggtttttctagcatagtttggatagcatagttcacataatggatgtgtaaaggtatttacaaaatgcagagtgaaaaccatcaagtgctatgtatagcacttttatgccttttaaagtatgtttacttccattaacttggttgttcctctccataattctgtgcaaaaggaaaggcatacagagtcatagtctttagagcttgggatgaatttaggatgatttaacccagccctttcatagtagaaaagaggcccagggaagttgagagatttcatccccattagcctcttggggaaactaagcaaggagagatttaagcttcttggccaccaaaagcattgcatgttgaatcctggatttctgtcattggtaataaggcagcccagtcttctgggaaaggaaatacacaaaaaagtcaaacaaaaaggttgtctggaatagagatgtctgttgctacaaaaatattcaacttcttgtcactgaaccaggataataaatctctttaccttctgtattttggtgcattgaaacattatcttttatgatcataggtgttgcttcattatttaaagcatacttg

SEQ ID NO: 686359 - DNA, 1664 bp, Homo sapiens
tttatttaatgcaagtcataccctaggagaataaaagattactgagtcattgtccatgcaaagttgagtattatgttgagattttgagttttcaacaatagctaattttcagtgaagagattatgctgtaaaattgaaatgagtttggaaaggagtcagttaaagtttcacacagttatgatgtagaagtttgttattatcagtggttaacgctaattaacacaagaatgtgatttcagatgacattgaaggggtatgtaagtgccttttttgtgtctcttactgtttatggaagaaccaactcttgtggaaaatgtagactttgcagccattggaatataattatatgtgttttgtttgtttttatagaacagatgcaagacaaagaacatagtatgagatattggaatgtaatttcaaaacatatgtttccaaaattatggaaacgttctggatggtaaataaatcctttcagtctcagagggtacaggctgcaaggctgagggagagctgagtgttggatggggaagaacgtggtttaagtaacaggctgaatagtaagcacatcaaagccattaaagcataaacccccagatttaaaaacgtgagaggcgaaagattatgtagcatggtctggcggctttatagaacccgtttcaaatgaggkatagaacaaaagaatgtgtgattgaagctcttgaagagatttatttcaggagagaggcaaacattttgctctgataccaattaaccaggagaaagcaccacgtcataaatgccaatattaaaaatgtaaatcctacacccgagggtgtattgaagacaggtcaaaattctttgaagatggaatgcataaagagataacaggaagagagccttccagctgctcaggctacctgtttagttctgtgtcctgtctgctgatgagattttccacggggaagcgggctcttgtttggggtggtttggctacttgacctattatgcgggatttagatctccttcaagagaatttattatgggaactctagaagatcttgtttataatactcctttatctgtaatgacttggagatgttccagggtttttctagcatagtttggatagcatagttcacataatggatgtgtaaaggtatttacaaaatgcagagtgaaaaccatcaagtgctatgtatagcacttttatgccttttaaagtatgtttacttccattaacttggttgttcctctccataattctgtgcaaaaggaaaggcatacagagtcatagtctttagagcttgggatgaatttaggatgatttaacccagccctttcatagtagaaaagaggcccagggaagttgagagatttcatccccattagcctcttggggaaactaagcaaggagagatttaagcttcttggccaccaaaagcattgcatgttgaatcctggatttctgtcattggtaataaggcagcccagtcttctgggaaaggaaatacacaaaaaagtcaaacaaaaaggttgtctggaatagagatgtctgttgctacaaaaatattcaacttcttgtcactgaaccaggataataaatctctttaccttctgtattttggtgcattgaaacattatcttttatgatcataggtgttgcttcattatttaaagcatacttg

SEQ ID NO: 686360 - DNA, 600 bp, Homo sapiens
ccatctggggggtgggaggggggaaggataatggtgattcctaccctcctgccccccagggtggctgtggggacaatggaagccttgtaggcaagatgtgcctgggacagggcctggcaggcccatgcaaggctcagcgtgggggttgctggaggtcctgtttcgctcagcagtgggcagggctggtggggttggcgcatctcaccagcaggctctgcagcacgttgagcagatcattgaggcccgacaagtccctcaggtcccggaagacagccacgagcacggtgggcaggatggcgcaggagcgggtgaggaggacacgggcgaagcgtgaccaccgcagcctcaggaagccctggggtgggggtgarctccttggtgaggagtagacaggactggggattccagaggagagatcctctgtagtccctcaaccgatttatccctgggggcatgctctgtttttccactgttgaactgggacagctctgtccctaggtggcaagaggggatgggtggggagaaatggggagctcccatcccatagctggttgctgaagactaaacagttttggggaaaaggcttctgttagtcctggg

SEQ ID NO: 686361 - DNA, 439 bp, Homo sapiens
ttggagctcactgtactcttttgccagtagtaggaatccgatttctggtaagtactgtaggtgacagaaccaaggttgcttagaagatayggagttaggagaaaaatgaaaaggcataaatattttctacagcagtaaatcctaaggaagtaactagttccaagacactgtcaacattaaaaatccatagtgcaggctgagcacagtggctcacacctgtaatcgtagcactttgtgaggatgaggaaggaggattgcttgatcccgggagtttgagaccagcctgggtaacggtgagactccttctccatctctataaaaataaatctggctgggcacggtggctcacgcctgtaatcccagcactttgggaggccaatgcgggtggatcacctgaggtcaggagtttgagaccagcctggccaacatggtgaaaccc

SEQ ID NO: 686362 - DNA, 1278 bp, Homo sapiens
taccagtatggcctctgcactcccagcagctcagtctgcacgctctatgcagctgtgagatggagagggtgggttacaagcgagtaggatcatttctggctccaagctgcctatagtctaaagggagaaagatgtctggggaaggcgggcgctgtggcagarcccacctaggagattctcccagactgaatgtgtcctcccaaaacatggtcaagaagagaggtgcaaaaagagagggaaccctggggttagagaagccaggtgcccctctgagaagcagacaaggctagagaagacaggcagccagtgtatttcatggaattgatgccctggggctactgtggcctacccacttcccattcccacagcctgaggggccccaggtacacccacctcccagcgcgtatcttacctttcggataaaagtgtgtcgcactttccggtcatcccactctccaggcccgaagctatcactcactgctctctcctccccatcatagccatggcctgggcctagggacagatgacacttgactcagctggggacctgagacatgtggcgtcaatcccaaagcctccctgacaatctcaaagtctcagggatctccagccaaaagacaagtgttataacaggaactcttctcccaagctggggtcttctagacaccctcagagtgacccagagccggcctgtcacgagggggcttaggtgggaaacgttcctcacgtgcatctgtggagggctcctgtgtgcccagcccacgccactgggggttcactggggggtcacgatgtagtggggaagccaggcaggagcaggtatgggcatccactggggcagccagccagggcagaacaggggatggggacagagggtaggagaaaaggagggcggcagagcgcagtttgtgcagcagcagggatagaggtgaagacagggatctgcatcagcctcacagaggcaggtgtgcaaagggtgtgcgtgactgtgcaggacccatgcgcagatccgcaccagcgcacatgtccaggtgagagctggctgacacccctctggggttcagagatgctgcagggctgcaaacattccctgaatgcctgaatgcctgaatgcctctttgggaactacttttaaaatccacgcttgagccacccaggaagactcactgcactctaacttcacctcatttcctttttttttttttttttttttttgagatggagtttcggtcttgttgcccaagctggagtgcaaaggcgtgatctcggctcaccgca

SEQ ID NO: 686363 - DNA, 1278 bp, Homo sapiens
taccagtatggcctctgcactcccagcagctcagtctgcacgctctatgcagctgtgagatggagagggtgggttacaagcgagtaggatcatttctggctccaagctgcctatagtctaaagggagaaagatgtctggggaaggcgggcgctgtggcagaacccacctaggagattctcccagactgaatgtgtcctcccaaaacatggtcaagaagagaggtgcaaaaagagagggaaccctggggttagagaagccaggtgcccctctgagaagcagacaaggctagagaagacaggcagccagtgtatttcatggaattgatgccctggggctactgtggcctacccacttcccattcccacagcctgaggggccccaggtacacccacctcccagcgcgtatcttacctttcggataaaagtgtgtcgcactttccggtcatcccactctccaggcccgaagctatcactcacygctctctcctccccatcatagccatggcctgggcctagggacagatgacacttgactcagctggggacctgagacatgtggcgtcaatcccaaagcctccctgacaatctcaaagtctcagggatctccagccaaaagacaagtgttataacaggaactcttctcccaagctggggtcttctagacaccctcagagtgacccagagccggcctgtcacgagggggcttaggtgggaaacgttcctcacgtgcatctgtggagggctcctgtgtgcccagcccacgccactgggggttcactggggggtcacgatgtagtggggaagccaggcaggagcaggtatgggcatccactggggcagccagccagggcagaacaggggatggggacagagggtaggagaaaaggagggcggcagagcgcagtttgtgcagcagcagggatagaggtgaagacagggatctgcatcagcctcacagaggcaggtgtgcaaagggtgtgcgtgactgtgcaggacccatgcgcagatccgcaccagcgcacatgtccaggtgagagctggctgacacccctctggggttcagagatgctgcagggctgcaaacattccctgaatgcctgaatgcctgaatgcctctttgggaactacttttaaaatccacgcttgagccacccaggaagactcactgcactctaacttcacctcatttcctttttttttttttttttttttttgagatggagtttcggtcttgttgcccaagctggagtgcaaaggcgtgatctcggctcaccgca

SEQ ID NO: 686364 - DNA, 896 bp, Homo sapiens
catgaagttgtttctcacataggcaattattaagtagattttactcatactgcactatgctagattgcttgcaaaacccacaattagaaaatgagtcatggaatctgccaccagcagcatgcaagtaagataaaacagatgattattctacaagaaattatgttatacacttaccaaagactacatatcatagagcagatagcaaagattttagagtcaggcagaccagggtttgctgaccatctaattgtgggtagttgtctaaattcctgagtctcctttacctcccctgtaaaatcggtgtgataacagtacctacatctcataacgtggaatcaagataaaatggctcatgctgtgtgctacacctggcacagaaaaaggcctccatacacacctgttctctctctttgcatccttttgccctattatgcccttgtcaagaccaaattacagagcacataatcccatcatttgctaaaaattgtggatgtcattagctgcttggttttctctctatttgggggccaccttgatgtgtggttcattaacatgaaatcttcaaggaatgaggtatgagtttgacttcattttttaaaaaattttagttccaggatacatgcacagaacatcaggtttgttacataggtatacatgtgccatgatggtttgctgcacctatcaacctgccatctaggttttaagccacacattctttaggtatttgtcctaatgctctccctcctcttgcccccaactccctgacaggccctggtgtgtgatgttcccctccctgtgtccatgtgttctctttgttcaactcccacttagragtgagaacatgtggtgtttggtgttctgttcctgtgttagtttgttgagaatgatggcttcca

SEQ ID NO: 686365 - DNA, 891 bp, Homo sapiens
aaaaggaaaccactgtgtaatgaatgctggagagtgtggcataagataattttgatggcagtgttggggctggatcataagctatgccaaaagattttgtattttatttaaagtgcaataagaagctactggagtgtttaagcatggcatttatgtttttaaaagatttttctagctggatgggaaaaacagattgctgcggagcagaagtgtaagtgtagataagtagtaaaaggttattgctgttatcaagacaaaacacaaggagagaagatggtagaaatggagagtagaggactgatttgaggtatttttttaggaagaaataagagcccttgttcatggactagatgggaagaatcagaaagaagaaataagtgataattttcaagttgctggcttgagcaatacagaagataatggagacatatatggaagggcagctgaaaaatcaaatttatattttgaagcaggcaaatttgagatgctcggagaacacgcagcataaaaaacaagtcacatgtacaaatccagaaytaaaaagacactgtagtttgtcaaatgatggccccagaaagagatatattcacatcatagcctctgaaacctataaatttgaaagcatttgaaacaagtgtctttgcatatgtaattaagttaacaatctccagatgagatcattctgacttatctgggtggactgtaaattcaacaacaaatatgttccaaagagaaaaaggagaagatcatgtgaaaatggaggcagagattggagccatgcagccacgagctaaggaatgcctggagccaccagaaaccagagaggcaagaaaggaatctcccttagagcctgcagagggaggattgctctgccaaagtcttgatttagga

SEQ ID NO: 686366 - DNA, 1122 bp, Homo sapiens
cagaataaagtgattctgttaggtcctttgatttggtcattgtactgctattaatgtagactaaaaacacactttttttttgtaggagacagaatttgatgattgttcaaaatccattaatccaccaaatatgtctacttttcctattttaagaatttttataagcattcctgctaagaggcatccctttctatttgagcatctgacttttggaaagaatgaaatctcagagcttttttgtttgtatctgtcactgtggtctaattatgtgtttttgaatttttattctggtcatgtgatgaattagctctatttagttttgtatctgattagttttgtaccatgtttataacttttcccctctgatttgactttaagttttcttgtaaacagagaccttaaattatgcatatttggccaggtgcaatggctcatgcctgtaattccagcattttgggaggctgaagtgggcagatcacctgaggtcaggagttcaagaccagcctggccaacatggtgaaaccctgtctctactaaacatacaaattagccggccatggtggcatgtgcctataatyccagctacttgggaggctgaggcaggagaatcactgaacccaggagctggaggttgcagagagctgggatcgcaccactgtactccagcctggtagagagaacaagactctctattaaaaaaaaaaaagcctgtttgccaagacacatagtataatattttgtaatattagattcttaatttgtcccgatttggttgtcaaagtgatacaaaattatgttgcagcaggattatcctttactaatttgaaatcaggtaaggctggctggccacatgttgctaataaaagagggaagtgttgaaagagaacatgggcagcagttgttacgatgacagcatagaattgtgaagaattaaagtccaagatgtaggtaaaattccagtctggaacagctagttctggtggactagcatattctgaaaaagacctgtctacatggtctttgtacagagaatatttgaatattagactcattggacttctgtgcctatgagtactttctttttttcctgtagcatctctaacccaaagactagcctatgca

SEQ ID NO: 686367 - DNA, 594 bp, Homo sapiens
gaacctggtgaaaagaaaccatgactagggagatgtttacttctaaaatgtattttaaacttttatgtgaaatatccaaacacattgttgtgatagttgttatggcataacaattattcaactgcctaagaactgtcatggtttagcccaaatcctagcaagtggttagggagatcagcatgcaaagcatgaatgggtgatgtaagacttgaagttgagaattgattcagagggttgctgactgtataacctttgaaataatgtattcctatattttataatgcctgtcaatgttaagaatattgtcttacaagctagcatatttgttttgttaataagtttttttcttgtctatgctcgtggattcattttgtgtcagcatactaaaaagttttaccatgtactgcagtcaaattaattcagaaaacattagtctgtaacatatattctcacacaggattattcatcaaccaacaattatgaacttagaatctaatatgtatttatagctacactagatacacaggaaggtaaaagatttcctattttgttgggagcagcaaatattgttctycacttgtcttttacccatac

SEQ ID NO: 686368 - DNA, 1037 bp, Homo sapiens
tttataaaagtcaagaattcggtggcatagatatgagagaaagtagaaatgaagaaaaatgcaaataagacacttaaccataaatatatatacctgtagatataaggaaaataactcagtgattcatcttaatcttataattagagaaaataaagttttgaaaaacttaaaaattttgatttatcactaatagaatttactgatataaaagtgcaaattgggagtctggattatccaagcaataaaatcatactaaaggcttttttttccaagtgattcctcattttttaatcgtgccattattattaaatcatgctgtgctgtcatgggtgatacataggggtgttatgatctgacagagtatatttaactaactgctgatatccacagcagcctgattcataagatatacaaaactaaaaatacataatggatatttcgatggcatttaaaattttaatattctcaaaaagttcatgctataaacatcacttttaattaggatagatttcagatatacacttagaaatggacatttggaaaaaatggcacagcaaaccgaagcacgtagctgtgacgggtctctaaaactgagatattgcatcaatgccttacacttcatttgctacaaatgctgttataaaaaattcttttgataagtaattttgcaaaaaccctctctgtagtacaaaatagaaatactaaaaaagtacattatgaataaaagttcttgccatttttaaataaagtagcatatattttaacttgaaatttttgaagaaaacagaaaataaaagatatttattacctgaaatatatactaayttatataattattttccatttcagataaactcagatatttttagtggatacaaaaggatggcctttccatatactttagttgatattgatgaaatgtgtaatgatttagttgaataagcatgatcatggaataacttataatgtaaccttattttcatctagcaaagtaccttaaaattgattttatttgtgcagactttcctgctacttgg

SEQ ID NO: 686369 - DNA, 1037 bp, Homo sapiens
tttataaaagtcaagaattcggtggcatagatatgagagaaagtagaaatgaagaaaaatgcaaataagacacttaaccataaatatatatacctgtagatataaggaaaataactcagtgattcatcttaatcttataattagagaaaataaagttttgaaaaacttaaaaattttgatttatcactaatagaatttactgatataaaagtgcaaattgggagtctggattatccaagcaataaaatcatactaaaggcttttttttccaagtgattcctcattttttaatcgtgccattattattaaatcatgctgtgctgtcatgggtgatacataggggtgttatgatctgacagagtatatttaactaactgctgatatccacagcagcctgattcataagatatacaaaactaaaaatacataatggatatttcgatggcatttaaaattttaatattctcaaaaagttcatgctataaacatcacttttaattaggatagatttcagatatacacttagaaatggacatttggaaaaaatggcacagcaaaccgaagcacgtagctgtgacgggtctctaaaactgagatattgcatcaatgccttacacttcatttgctacaaatgctgttataaaaaattcttttgataagtaattttgcaaaaaccctctctgtagtacaaaatagaaatactaaaaaagtacattatgaataaaagttcttgccatttttaaataaagtagcatatattttaacttgaaatttttgaagaaaacagaaaataaaagatatttattacctgaaatatatactaatttatataattattttccatttcagataaactcagatatttttagtggatacaaaaggatggcctttccatatactttagttgatattgatgawatgtgtaatgatttagttgaataagcatgatcatggaataacttataatgtaaccttattttcatctagcaaagtaccttaaaattgattttatttgtgcagactttcctgctacttgg

SEQ ID NO: 686370 - DNA, 883 bp, Homo sapiens
caaggtttacgcatttgtgttgggcaacatgcagaccgtgggccacaggttggacaagcttgatttaaactttatgcatatgattccatttaattttatataattgctgtatttttattggaaaaaaatagattaccagcctctgttctgtacatttcctgtcaccctgagatccrcagctatgacctgcctcccaatagcatgacacacacacacacagacacacacacacaccctctcacccataatttaattacattatatgatttgtcattgtcccaaaatcaatgcatttgctttcgatctactcagatttgctatttgttattccattttcttaagatgtccgatcctctccatttgatcactgttgggaagagttggtttaaatgcattatctctgtaaaactttttccagtccctgcagacagaatgaatcatttcctcttttgacttcctgtggtactctgtttagttctcttcttactgctttccttaaatcatgttcaagttatttatctgacttgctcctttgtccctgtcctcacaccatgaatacggaggtatcaactcttgtttatctcttttaattcctacttctgctctagcatgtaataagcgtttagaaaattatttaagctgaagaagacaagtgaagattaatgcaaaatttgaagtatattatcaagttatttgttgcatttaacacaaaaatcatcattatttacagagaaaaacttataaaatccagaaacagtatagttaggataagaaaaagtatacaacaatcatataatggcaaaaaccagagttctctgacaaaaataatgagggaggttaaagatacatgatcataatcttagaagacagataacttgaaaag

SEQ ID NO: 686371 - DNA, 883 bp, Homo sapiens
caaggtttacgcatttgtgttgggcaacatgcagaccgtgggccacaggttggacaagcttgatttaaactttatgcatatgattccatttaattttatataattgctgtatttttattggaaaaaaatagattaccagcctctgttctgtacatttcctgtcaccctgagatccacagctatgacctgcctcccaatagcatgacacacacacacacagacacacacacacaccctctcacccataatttaattacattatatgatttgtcattgtcccaaaatcaatgcatttgctttcgatctactcagatttgctatttgttattccattttcttaagatgtccgatcctctccatttgatcactgttgggaagagttggtttaaatgcattatctctgtaaaactttttccagtccctgcagacagaatgaatcatttcctcttttgacttcctgtggtactctgtttagttctcttcttactgctttccttaaatcatgttcaagttatttatctgacttgctcctttgtccctgtcctcacaccatgaatacggaggtatcaactcttgtttatctcttttaattcctacttctgctctagcatgtaataagcgtttagaaaattatttaagctgaagaagacaartgaagattaatgcaaaatttgaagtatattatcaagttatttgttgcatttaacacaaaaatcatcattatttacagagaaaaacttataaaatccagaaacagtatagttaggataagaaaaagtatacaacaatcatataatggcaaaaaccagagttctctgacaaaaataatgagggaggttaaagatacatgatcataatcttagaagacagataacttgaaaag

SEQ ID NO: 686372 - DNA, 2311 bp, Homo sapiens
atccgtggattttggtgtcttagggtgggaatgggagggtgattcctggaaccaatcccccatggatattgaggaactattgtaaatttactgctttctctctcgttatttttcagatttacctgtctactccagcatatcattgcagagtaccagatttaattttaacaattcataataaagtctaaaacatttttaaagctgatcaataaattttaaaaatttgttaatcccataaaatggggagagttggcaccaatataatattactctgataaacaattctggggcaggaatatttccatgcctctatgctaaataaaacttagaacaagcaaacatagttgtatgcttgctttaggaaaatctcactcttgatggtgaaacaactaaaatagcttatttatcaagactgatttcccaaaaagacttgcttcaggacttcccatttcatcattcttaccaatccaaaactattttgtcagttctaaccaggttctcaccttgaaaaatgctgattaaagtggtccagcccacccaaccctaaaaccttgtaaatatccttctctgtctttcctcttcttgttcttcctcactgaagtcagtctgctaaacttagctttgctagatgagtgaggttttttaatgttgtttggagagttgacagtatataagctagttatgctgaataatatatggggaagaaatcaagaattcagaatcttaactttcttttcttattttttaactgtctgctagtttatctgtatggacatgcatgtctgaccaagctatgaaatctccattcttagattgaacttctttccttctcgcctccatttatttttctcatctacccccaccccaagtcatgggatagggagagttgtcctattccttttctgtctcctaaagtagtttacccttatagaagtcttgaaaccagattcatattttatctcattttagtaactagtatccaaatcccaccaagtttacataagaaatagcaaaacaaaaggaaccaactgggtatttatctaccaatgaagatactttaaatagcaatacatacaaggtaatgatctaactttgtatgttttgacatagaaaagtaaacaccgtgaaagtaggtgaaagagtatatatattacctcatttttaaatgctttcgtgcataaacaaaatctgaaagtctgtgtgcctcaggaaagaagtagataatcactttattttttttaaataaatatcttttattacctctgcaattaaaagtattacacatttttaaggatgaaacaatgagagacacaatgatgacatacatctgccaagtagatgctgattttagagaagacttttttcccagtttgttgaaaagtatgagtaggtaggtagttaactgaaggtaactgaaggtagttactgaaacttttaaaaaattaaattcttaaagtctttgtaccgtcttttcccagaatatggaatatgtctttctacttgaacttctgagattcctaaagcaatactgtttaaacacttacattgtcactaacaatggatttaagtgaaaaaaaaaaaaaatctctgcccttcaaactttggcctgtgagctaaataaataaatacaaatacataaagaatgtgttttgccagagaggcttacttttgtttaaaactgatgttattaaaagaattactacactagttgatacctgatgttggatttatccaattaaagttaaaatgttcatgttaagaacagccaattttaacagactaaaatgaagctggtcaagcaatttcactagaaactragtcttaaagggtgaaataaaaagtgacattgatgctttgtgatgacagtctcctaatatcttcgttaataccttctgtggtactgtgagcctaatggtagtccctaaatataatgcaaaatgaaatggtgctagattgctcctgtcttaatttaaaaagcaggtttgaatatggactatctacttcacacttcctaccccatattaagctttagatttctgaaagtatataactaagaacataaccctcttcaggagaatgtaggtcatctggttctttagacggaagaacatggggcagagacctttaaaaaaaactacgtggtccttttgttttatggtctgaaaatttggtagtgagggtgagaaagttaaggatagttagatttagcttataagattaatataagtcatcaactctactagaattttgataattttgatagctttatttagaaagttaccctctttatttgtggaatacaatattaagt

SEQ ID NO: 686373 - DNA, 602 bp, Homo sapiens
ccaatttgtatttaaatatcaggaactgggaagtgtcattgctggtaactctgtgcatgcatctgggacttcttgatcctcatattatattttaaaataaatgggaggaaaaccatctgttttactggagaccttttaaatgtggccttccatcttctggattattgttggaacctctcatcagctgatggttctacttccattctctttgctgataaaggattgctcctggctttattcctatactagaacrgtaatgaggtcctgagaaggataagaaacaaatgactgtgctaagtctgttatcttgaaccagtaagctatgttttcaacaggttaaaattttttttgtggttaaatactatacatttctaatcttttatttgacaaataagaagtttgtgttgataacctcatttgatttgattatagtaaacccataagatgtgtagcacaatagtaggtgatgagatcgaactatttctaagaagtgccatactttggtctccagcatctatatttagcttcatatgactgaacagagaacagcccgagaatctaatgtcacccgaatggcagctaattgatttaccctagaaagt

SEQ ID NO: 686374 - DNA, 1331 bp, Homo sapiens
tggaatcattctggattcattcctggaaagttgttttctatactaagccttctgttttgagaataatccttgttgacatgtgaagctgtagttcatcagcacttcttatagaatgacattgcatgaatcaaacaaaatatctttacccaatcttttaggaacatgtaaacaaggctcctttgaatattgttttagatgtttcttggtcatcaatagatgccaaagagcttatggtcacactaaaggtggggtcacttagtctgtggagctgcagggttctttttgggaggtgggaggaagggagatgagttttgttattttggggttttcaagtattgaaaccaaaggccaaataataaacagcctttacattttaaagtaaaattcattttatttgcagcatacacttgtatggtagactgtgaacgacaattttatgacatttatacacagtataatggctacatctgctatttgtctttaaaataaaaaaagaaagaaaagcccaactttgaatacatggccaagataaagaccatgaattggtcattcctaaaaatgcaacagataggctgctagattacgttgtttgcactttttttatgggcattttaaaatcagtatttaaactgaagacgttgtcatgttttatcaatttaatgaatttgaaagtgactgctctgtacatcatgaccttaacaatgttgatgctataagtgaaagttcactgtcgtctatatactaaatttatgggtgcttctaacttaaaattatgactgcagattatcccccacagccttagtccagggatgtggctctatgcaggtgcagtacgcagttatgtggaaccttgctttctagtgctggggaaaaaaagatgtctctaattactggtttcaataaacacgaatccagactgcttacaatttttggtggctttctttatggtaaatcatctgactggagatagattaaattgtctgcgaatcgtatggggtatctgatcatataactaaaaatgtttacctctctcacttgaaattatcagaaattctggaaagaataacattgtaaagccatatttattttttattttactttttggagacaggagttgccgaggctggtcttaaactcctggcctcaaatagttctcccgccttggcctcccgaagtgctggacttataggtgtgaggaccacacacagcctggctttttgtttttttgagtttcttcacattacagctgwcatcgtgagtgtgaaggtggtaggtatcccagtgactaatgatgttaaggagcatcttatgatgtgcttactggccattta

SEQ ID NO: 686375 - DNA, 2171 bp, Homo sapiens
  misc_feature 1075, 1078, 1097: n = A,T,C or G
agggattgcaatattaacctaaaatataaaattatttaataattcagtcttttcattgtttgtcttgctgactctctggatgggtatttatattccacaagaatatacttttgcatgagggaaaaaagactctcccttctgatctaaatgaaatcatgattaaatgttaataaaattcataacaaaggagcatttattttaatgttagatcattgattccgttgtttctttaaatgttttataaaaaaggaatttatgcattcccatttttaaacattgtatggaaaccaaaaaataaggaaaaattttgaagtacaaattatttcaaaattaattttttcaaatctgagaacagattgcctactccaaggccagaggttgcataaagcttaagatttgacagtttgaggagggtgcccctaaaatcaagatttctggatcttacaatggtagttagccctctaataataggcaaagatgctaaacacttcaatttctactaatctaaaaaaatgcamgtaggaggatacttcagaggcatcacaaacttttctagttggttaaaaagcacagcttttatttccgtttgaagagaaaggtagaggagttaaaagggaaagggggataaaggaaacacaaaaactctgaatcaaaaggatgttcatagtattcaaaagcatctaacaataatctgaatgtccaaccatgagataattgttaagtaacttatggcagagccacacaacaaaatataattgagtcatcctttaagataaagaaaaacgatatatgatgtaatgttactcatgcaaagttgattttacagtatgctttctgctatataaaaaacagactagaaggaaacagaccactatttcatggtggctatttctggatggcagaaatatgggtgactttctgttctctgctattttttggtccctaagcatctagagactcttttccaggactctccaaaatcttgagttatctaatatgcctaaccagactccttgagttcagtgttctttcagtagggcaggaattaccactgtggtctgcttgcccatctacntgngatttaataagaacaccgnagtaaaccttccagcagcaactcatagcactcagataaaactccaactccttagcttggtatccaagctcaggcccttgctcacttctcctacccagcccctcgctcgctgtgtccagccaactggccaagttcattccctcctaagagtgtttaaacacactgttctctctgcctagaactcttttccccagaacttcctatgaatggctcaaaattacactaaatgcctcaaaatgccacctccttacaaaggccttccctgacactgattcccatttagctgcctctcccccagccccatataagtttgagggtttttcttttcatctatagaagcattttctgctatgtacccaaataagttttatcacagcagtcttagcacagggtgatagctcttatcatcatgtgaatccgtttttttttaacttgttatctgctctaagtacccctccccccagattataatcatgagagcaggtgcctcatctgtcttgttcaatattatcctagtacctggaacagtgtgtgaaaatagtaggcgctcaataaacagctgttgaaggaattaatggatatcactgaaggtgttaacacagagaagaaatgaaaagaaaccagaggtgctttagtaacacaaaggaaatcatgtggaagcctgttttcttttctcctatttgtcaaaagcagccaagtatcaccttcatttgcatgtacaggggtgctattaaaacctacactattacagtgttagcaactacactgacagtcaccaaattattgtcatctgcagcccaaaccatacttgctaagtctatgcttccccacaaaaccaccaaaccacaacaaaggttgtaactctgcagatcctggaagctgccttgggaactgactgctagctcctctggctagcagaataaacttgggtgcatctttacctccgtttaggctgaatgacaccagctagcccaactaatttacctaacatgggtaaagctaaagctcttggctttatatgctatcccactgaaaactcacagccaccccgcaaggcagttattacatttcacag

SEQ ID NO: 686376 - DNA, 584 bp, Homo sapiens
ggtcctttgaagaatggaattgaacatttactaaaaataacactaaacttttaaataaattcataattaatcagacatttctcaaaataactgatccttttagtgaagaatactattgagagatcgctgtatgggttttggggttgcttagttttattatgttattgattttaggagtttttagtggaaagaaccagggactatatattttggagggaaaaaaaaatcatcattgatttttttttttaacctagctgaagttaagatagtatttttatttaaattctgattttacatttgtaactgttgtctttyctactgaaaatcattcttaagaacaatattataattatttgctatatcctataatacataaaaatagtttcaaaataataaaactagaattactaacaataagcctactgaatgagatttaaatttctgggcagctttctttgatattaatatattccactatgtatgcagtcaagatgtatatttctaaaatatcttgaaatacttgtttctctgtgtgtttgcgtcaccaaattataatgcagttaggtttgtttcaatttcttttc

SEQ ID NO: 686377 - DNA, 584 bp, Homo sapiens
ggtcctttgaagaatggaattgaacatttactaaaaataacactaaacttttaaataaattcataattaatcagacatttctcaaaataactgatccttttagtgaagaatactattgagagatcgctgtatgggttttggggttgcttagttttattatgttattgattttaggagtttttagtggaaagaaccagggactatatattttggagggaaaaaaaaatcatcattgatttttttttttaacctagctgaagttaagatagtatttttatttaaattctgattttacatttgtaactgttgtctttcctactgaaaatcattcttaagaacaatattataattatttgctatatcctataatacataaaaatagtttcaaaataataaaactagaattactaacaataagcctactgaatgaratttaaatttctgggcagctttctttgatattaatatattccactatgtatgcagtcaagatgtatatttctaaaatatcttgaaatacttgtttctctgtgtgtttgcgtcaccaaattataatgcagttaggtttgtttcaatttcttttc

SEQ ID NO: 686378 - DNA, 656 bp, Homo sapiens
tcaaactcagccagtctggctctatagcctgtgctcttaaccactcagcctcattgcctttagagtggataagtcacattcacaagtgtatgcgaatactctccaagactgatggattcagaggaggaaacactatgcactgcatcttaaagatgaggtaggatttgaacacatggagtgcatggaggagagcagaagaaggacaggttggaaagaggataggggccctgaccatttgcttgaagtgtttgggctttagaccttggaaagccactgaaggtctctgagccatggggaaacctaagcaaagctggctttggggaaaattcatctggcaatagcatgaaagatggactgaagcggggagatgggacaaatgaggagagtgacatgtagctgctataatgagtgaaggaaggggtcacagggcttaagccaggacaatggaaaaagaagcatcaagggcaaatccataggacgtgcctcctaccaggatgtaatatgtctcccygagtttcccaccaaaactttcacatcagaaacaagttccaaggagcactcactgggcactttcgtggccatccagagtggcacatgggtgctctatagcactgctttcctcaaaggaaacatggggtcatcttgagcagctggaa

SEQ ID NO: 686379 - DNA, 656 bp, Homo sapiens
tcaaactcagccagtctggctctatagcctgtgctcttaaccactcagcctcattgcctttagagtggataagtcacattcacaagtgtatgcgaatactctccaagactgatggattcagaggaggaaacactatgcactgcatcttaaagatgaggtaggatttgaacacatggagtgcatggaggagagcagaagaaggacaggttggaaagaggataggggccctgaccatttgcttgaagtgtttgggctttagaccttggaaagccactgaaggtctctgagccatggggaaacctaagcaaagctggctttggggaaaattcatctggcaatagcatgaaagatggactgaagcggggagatgggacaaatgaggagagtgacatgtagctgctataatgagtgaaggaaggggtcacagggcttaagccaggacaatggaaaaagaagcatcaagggcaaatccataggacgtgcctcctaccaggatgtaatatgtctccccgagtttcccaccaaaactttcacatcagaaacaagttccaargagcactcactgggcactttcgtggccatccagagtggcacatgggtgctctatagcactgctttcctcaaaggaaacatggggtcatcttgagcagctggaa

SEQ ID NO: 686380 - DNA, 1031 bp, Homo sapiens
ggattagttcccattcacaaaaccattgaagtataaaatatcctcagctgatagtgtcagtaccattatctccttacataggaagcagaagctagtatttgcctcactaagatttcctttttgctttcctacctaatttaaaggaattataaatgagaagaggcaaaaggggttctgaaacttcaatagagagaaactgataaatttatatttattatcaggctactgttttcaagtataacctacaaattaaaatcataaacatagaatggatgtgattaaagataagtaaacatctctggaggaagtaaggtattgattcaatcatgtatttattcattgatcatttcttagacacaaatttcagagaggatcacatgtataaggcaaagtcgaaggacttgggatagggcagagtgaagaagtggtgctggggagtaatgtaaaggtcaatgmgacatgttacttgttctcagagaggtcatgggttaagctgaagtgcagagaggcagcatattattcatattataatatgataaatgctataatagaacatgtagtacatgtttccacctctaggacactccttttgggtgtggcccctctcaggtaaacaggaaaacatagtaacaataaacatcagtatagattataagttcataaagtaagatgttgactgcaacaccataagcatagctttgggtggtaagtgttagagacatttgccataaagcccatgactagacaagtaagtctctgccagcctactcccattatggttggccctattctcatcatggaacaacctgcaaccacaaaacagtactggtccttctctcagtttcttgtatgcacagtctgaactattagcactggaagattccccatctggtaagtggttggtcttgcctatccaggtgtaggagcagaaaaactccacctccatcctcttagggtcctggaattaaattgacattgtaacagattaacaggagaaaagcatagtacaagtcttatgtggcacagaagcc

SEQ ID NO: 686381 - DNA, 1159 bp, Homo sapiens
ttttggctttggacttatctttttatgtattcttaaaatgcaaatactgcttatattataatggttccattgtttcagtagccactgtatctttgcagtaggttttaacccttcaacatcaattgtggttgcaaaattgaactcaacatatgatttatacttccaaatgaaataaatatgaactctttgggtctttatgtatttaaaatcgtgttcacaattatcatgtgatttatcactagtaatacaactgtcaaaaatgtatctttgttttttaaacaaggaatttccaagcctggccaacacagggagaccacatccctacaaagagatgataagaaaataaaaaaaaaattagcctggcatggtggtgcacacctgtagtcccagctccttgggaggctgaggcaggaggatcacttgagcccaggaggctgtgctatgatggtaccactgcacctccagcctagacaacagagtgagaccatatctcaaaaaaaaataagaagaagaagaaagaaagaaatttccagtgaagcatgttttgccatctgcaaattaaaaataaataatataaagttatactttattaattttgcaaataaaactacaaattgaaaagcaatttttgctaaaaattkttaaatgaatgctaaaagttacaaaaacaaatgaatgcattttaaagacttttacgcttaatagttaattgtgaaggtgatcttaatgtattagtggttttttttaaattatactttaagttttagggtacatgtgcacaacatgcaggtttgttacatatgtatacatgtgccatgttggtgtgctgcacccattaactcatcatttacatcaggtatatctcctaatgctacccctcccccttccccccactcgacaacaggccccagtgtgtgatgttccccttcctgtgtccaagtgttctcattgttcaattcccacctatgagtgagaacatgtggggtttggttttttgtccttgtgatagttcactgagaatgatggtttccatcttcatccatgtccctacaaaggacatgaactcatccttttttatggctgcatagtattccatggtgtatatgtgccacattttcttaatccagtctatcattgttggacatttgggttggttcca

SEQ ID NO: 686382 - DNA, 1766 bp, Homo sapiens
gaatacctgaggctgggtaatttataaagaaaagaggtttatctggtttatagttctgcagcctgtacaagaagcatggcaccacaatctacttctggtgaggcctcaggaagtttccaatcatggaggaaggtggaggagcaggcatgtcacatggtgagagagggagcaagagagatgccaggttcttttaaaccaccagctcctgtgtgaactaatagagtgagactcactcattaccataaggagaccatcaagccattcatgagggatcccctgccatgacccaaacacctcctgctaggtgccacctccaacattggagagcatgctttaatatgagattgggasgggacaaacatccaaacaatatcaccctccaagctgagaggggacaggtagatagaagtaagccaggagaagtatgcaccttctgggagcagaataggagcagagcctctgggccaaacaaaggcaggtacaaaggcctcatgataggaaaagtggcctggtgccattgaggaatgaaggctgtgtgacagacagccataagaagctgggggtggcaggaacaggactgagaggaagatgaatccagttgagaattttgaacttcatcctgagtgtaactagaagtcgctgatgagttagggagaaaaaaacacaggcgatcagagccgagcttttaaaagctctctctgacgcactacagagacaggttttgagagcagcctgagtgtatgggcaggacaactggagttcattgtgggtgcccaggcaagagatggtaggttggaacagaccagcaaaaactggaacgatgctttaggggagaatctctagaccttcactgagccacagactcaaggggccatgtgtcccctgaacactctttcaggtatcagtcctgcctcgccaacaaggctttgggcttcccagatccttaggaatgatgattactcacctcttccctctctcttttcttaaaaaagggggaattttaccagtcttgcatgcactacactgtagatgcccaatttcctattcagggccaaatttcttttacccaaagcctgtgctggttctagttctggcaatgtgttctcactgcctgcccgaaagtcagtttcctaaagatcttccattcaatggctgcttcttagcctccacttctaggcatttgacatattgcttcttgtattccttcctgtaattatctcctcccattaaaacaacagcaaaacaccatgatttgcttatcagatttgcagaaaattaaaaagataaaatgtcaagtcttggtaagaaggtgggaaaaagagcactgcccaagcctattgatggaagtataaactggtgaaatcttctagaaatcaattcagtagcttctcccaatacttcaagtgtgggccaaaactgaaatcaatatgaagaaggtaaatcattttaaaaattgtagtgataactaggtgcccatctggaaaaaaaagaaaacataacttttgttccatacttataccttactccagaataaatttctggtgaacccaagatttaaacattaaaaatgaaactacaaagatactaaaagaaaccatggagaaaatttttgtatactaattgtgatatgaaactcagaagccataaataaacatattgataaattcatctctatacaattttaaaaattggcatgacagaaatagccatgagcaaatttaaaagggaggaaaaaagaaaacctgatagaaaaaaagtatttgtta

SEQ ID NO: 686383 - DNA, 605 bp, Homo sapiens
gagaagaatccgttttttgtttttttttgagacagagtctctctctgtctcccaggctggagtgcagtggtgtgatctcggctcactgcaacctccgcctcccaggttcaagtgattctcctgcctcggcctcccgagtagctgggattacaggcgcatgccactacatccagcaatttttttgtatttttagtagagacggggtttcaccatgttggtcaggctggtctcaaactcctgactttgtgatccacctgcctcggactcccaaagtgctgggataacaggcgtgaaccaccacgcccggccaaatccgttcttattcaaaatgacagagccaacctaagctacattcacagaccaggaggaccttccctgtgctcttcaactcctctcaatctcttcatgcttagagagccttactccagaggttagtcaggactttctcagctttaagtgccagaaaactaacttaaactaatttaagcctacccctgctccccaccccccaccaaaaaaaaaaaaaaraaaagaaaagcaggagaggaatgtatttggctctcagtattagagcgcctaaacttcaggcggggcaggggtgacgg

SEQ ID NO: 686384 - DNA, 2563 bp, Homo sapiens
acattgatacagggacttcaactttatctgtaatgtttcattccttctttttgtttttaaggtctagagaacatatgactaagtgttaacatttgttcattttgaatggagagtgttgagtcttatattaccctcattctttttcgttttttgtgaacatttttttaaagtcccctggaattggccgggcatggtggctcatgcctgtaatcccagcactttgagaggctgaggtgagtggattgcctgaggtcaggagttcgagaccagcctggccaacatggtgaaaccctgtctctactaaaaatacaaaaattagccaggtgtggtggcagatgcctgtaatcccagctactcgggaggctgaggcaggagaattgcttgaactcgggaggcagaggttgcagtgagtccagatggcgccactgcactccagcctgggcaacagagcgagactctgtctcaaacaaaaacaaaaacaaaaacaaaaacaaaacaaaacaaacaacaacaaaacaccaattctgatatgcatgttcttcatgttaagccatctcaaacctcttcagaaaacaaaagtgataaagtgtgaatcctctgtcacgtcatctccttttcagggcctccgccctgactatgcttcatttctcctacagcaaggggacctcggctgcaggggaaacctgctcatcagtccttaacacggccactgcgctacgtaaaagcctagtgtgagcagggtgagcctgtaacgtgggattggtcctgacctctcacgttggtataataaaggagggctctctgtggaaagagagctttgtgtctacttcgtatttgtaaaacagatgcttccatgacttccttttcttcccacacagtattttatattaaatatctaaatgagaaacacagagtcaagatcgctgaaatggctcagcaatacacctcacctataaatcaaagcaaaggaacgcttcagcagtgaaaaacagtctgtcccaagagacaggatacttctcttctatttgtgggtatgctattgtcctgccatgtgacctggcctctgtaggacttcacgtcctttctgtataatatgacatttctcctaacactaactttctatcaacactttcattttaaaaattagaagttattattttcttgtattatttttaagtcctcaaaattaaaaaaaaagaaaaattacgaattaaaaaaataacttggccggggggcagtggctcacacctgtaatcccagcactttgggaggccgaggcaggcggataacctgaggtcaggagttcaagaccagcctgaccaacatggagaaaacccgtctctactaaaaatacaaaattagctgggtgtggcggtgtgtgcttgcaatcccagctacttgggaggctgagacaggagaattgcttgaacacgggaggtggaggttgcgatgagccaagattgcaccattgcactccagcctgggcaacaagagcaaaactccatctcacaaataaaataaaatgaaataacttaagaaccaaatagagttgaaatattacacattagtaagtatgtgatcaaaggcaggcagttccccaggcgtgtagcaacaagtgatacaggaatgaaatcctagtccccagggtgggactagggtgatatgggggtagaatgatttcggacatgggatttgtttttggttttgtttttggtttagcattccaaaagcagctttcttttataacataaagaaatyagaagaaggctttcaagacagtatgatcaactaagacgctatttccccaactagtgctctgagggaccctatctttagagttcctaagtaggtatacttaatgctcacatgtggaaaattatgtatgctctatctccctcggagaatcatcatgcatgttatcttatgaaagactgagaaatcctacagaaaaaaaaaacccacctattttaactttgtttcatccggcgttcacaaatgcatctgtgcatggatcacttttttgctcactgccatcaccaccttccacgtcaacacggggagtgctgcgccaaggcagcgtcttggcctgtgaatcacaagccacggactcttttgtgtgtttctgccacagcattgctgagtaacctggtcagccctctgttggggtcttgatttctccacctgaaaaacgaggacgataacacttgtccacacttaagagagatgagctagataatgtccatgagggctttgaccctttaaagcaggttctatagaaacaatgttattatctcaaccacacaagcacgatgggataacaagtcacatcattagattctattatacacacccggaccccgcagaggcaccacacttagctttctgtcctggtccctgagggctttacatacatttcatatgctccagtaagcaaacccattccatgctggttcctgctgcaaacagaccaaaaaggaaagaaaggaaatacagagaagcagacaaagtgcagaaatagagaatgcaggaacagcaatggttaacagtgactgagtacttacta

SEQ ID NO: 686385 - DNA, 993 bp, Homo sapiens
tgggaattcactttgtgactgtgtgagtcaatctccttaataaactctctttcgtatatacatatatcttcttaggtctgtccctctagagaactctagctaatacaccattcttattctagtatataatgtctactattccagcttcactccttacactctcccgtatggaagcaatgatgatattaccaatatttcctagatggttttcattttatcctccaaattttaagtgtatactattcctactttctccttcaaaaaagatgaggaggaatggcccatattttcttgtttttcacccatgacamctatcatttcctctgggcggcttctcaggtaaagttaattgttatatctatttgtcctatggactatatagataactgtatctattacttaggatattatactgacgttatttgtttgtaggtccatcttgcctttggaggaaatagtacaaactgagacctggatttgaattttagcctttcatattatcatgtaagttctatgaaagtttatttcatcatttgtcaaatgggagaacagtagtctttatgtatggccgttcatgattaaatgatatgatgtctaaggaaactaacaaatgatggatattatcagtagctagcaatcattgagtgcttgctcaacaatagacactatcctaagtatcttctaaatttttaaaacaatcctaagcactttattatcttaatcttaaaaatgaggacctgaagcagagagaggctaaataatttgctatcatatttattaaagtatatttgtcaggattcgaacccaaaggcagtatgactaaagaagagcatatgctcatccagtaaactcttaaatgttggctgctcaatattggtatattaatatcagtttaattatgtaggtttaattagtataggtttactaatataggtttattcatttttcagcccatcttttcaccagatatatatatgtgtgtatttatataca

SEQ ID NO: 686386 - DNA, 614 bp, Homo sapiens
gcagtaagtgtgaaaggattaagtttttcgtagcagcagatgggaaatgatctctctatgtactttattttttctgtgttaaaacctctatattatgggacaccgccattaaaaatggatattcaatttaatrtatgcgtgtatggaactggatattttttgaatttatgtttgttcattgatttaaatgtgtcaacctctttagtgggaggttgagtgtgaaaatgctttacaatttgttagatttttgcttggtttctcacatctaaatgaagtataatatatgagaaatatggaaaagtaagtttgcaatatgacaccaatttggttaatgagaataaattaaagttgaaaggcaatcaattaaaaaaattagcattaatcacagaaatgcaacattgtaaagcaatggtaaggggctgaatttacaacaggatgcatctgaagcaaaatcaaacagctttaaaatatggaattaaagtgtatatgatcttgtgcttcataattttatatatataggtaatttaaaataaaaatatatatatataaatagggaaaaaactccttgatattggtcttggcagtgatatcttaaatatcacactaaaagttca

SEQ ID NO: 686387 - DNA, 645 bp, Homo sapiens
tgaaaaattgatttagcttatagctattaaagttaatgtattatttccttcacaggtctcatgaaacagtgtcctgctgttttaaaggtaaaaaacaaagtcttatgggcaattttcactttcccacaaaaccaggtttgctttttatcacctcttccaaccatctggctctaattctgaatttacatacagtcacagctaagacagcctgaaataaaaatctacaagggaattatgactatactctagaaataaagatgacaaatgttcatagtatttgaggggagaaaagcttattttcaaactcttggctcttttgaattacaagtacaccagctgaaaatactttgccaacagtaaatcccttttcctctctctgggttcttatacttagctctatagtttggtccagtgtgagaaattccctcactaccaaatgcttgctaagataaagccttttccagagaccacgtataacttgttacccttgaaatttacattgacttacattctgtagaagactcataaccatggcaaagtcaaatcaaggttgggtatgcaagggattccttgatatagattkaccaattttactttacagaaatgcattttttattcaaaaatataaacagcatttaatattac

SEQ ID NO: 686388 - DNA, 632 bp, Homo sapiens
aaaaaaaagagaagaatagagggggagggtccctcagataaattggaggaaaagaagattattcaatgaagtgtgctgggtaatttaataatcatttagaaatcaatcgatcagttaatatccttactctgtacgttacaccaaataatttctattacatttaaaatagaatttaaatttttacatttaaaatttttaaatgtaaaaaattawagaaaaatacaggtgaatatttatataatcttgagaggaaaactctgtctaatcatgaacctaagggcagaaaccatacaagaaaatgccactgagttaaccaggtatacatttaaaagttttgttttcaaaactaccaattcatttataaaagaacttgggagaatatctacaatatatgtggtaaaaatgtgttgctattcttaatatgaaagttcctaaaaattaataagcaaaagataaatgccctaaaggaaaaatggactaagaatgtttctagaggagagatttatctgccctgtgagaaattcatcagtttcactgctaatcaagaaatgcaaagtcaaaaaaattagcatattctatctttcaactggcaaagatgaaaacagaatggaaaaagtgaaatcccgttcctt

SEQ ID NO: 686389 - DNA, 632 bp, Homo sapiens
aaaaaaaagagaagaatagagggggagggtccctcagataaattggaggaaaagaagattattcaatgaagtgtgctgggtaatttaataatcatttagaaatcaatcgatcagttaatatccttactctgtacgttacaccaaataatttctattacatttaaaatagaatttaaatttttacatttaaaatttttaaatgtaaaaaattatagaaaaatacaggtgaatatttatataatcttgagaggaaaactctgtctaatcatgaacctaagggcagaaaccatacaagaaaatgccactgagttaaccaggtatacatttaaaagttttgttttcaaaactaccaattcatttataaaagaayttgggagaatatctacaatatatgtggtaaaaatgtgttgctattcttaatatgaaagttcctaaaaattaataagcaaaagataaatgccctaaaggaaaaatggactaagaatgtttctagaggagagatttatctgccctgtgagaaattcatcagtttcactgctaatcaagaaatgcaaagtcaaaaaaattagcatattctatctttcaactggcaaagatgaaaacagaatggaaaaagtgaaatcccgttcctt

SEQ ID NO: 686390 - DNA, 771 bp, Homo sapiens
tccacagactagctttaccgttcacgtacttcaggggccatgctctggaggacagcgcctctgatcttgcctcttcacatcagcacattratgacatgacacatggacgttgaggactcccgtgctactgcaagatggcccacagaaactttactgcacgtggcagtgtctgcaagccacatgcatgcatttctctaaacctaaactaaatctatcccaatctcagtttccccttagaacctcccagagatgcccatagccattccaacatcacctacctccagggaatatgtgatataaagaaagttggagaaagttttaactgcagctaaaatcatttaattgatcacattttagaaaaccacatgaccatgtgggaatgagaactcctgatgctcctgagactttaatctgaggatactccatctctgtactcctaggtgcaaggttcaggctggataattggatgccagtgttgactaaggcagctgtggatgattccctttcaaaggacctggacatcctatggcagagaggaggtgtgggctgagttttgctagtgtctctgtccattactgtttgggtgatctgggggctgtttgcatttactatgactcagtttctcatgtgtaaaatggggataataagaacatcttagattacaggtttatcttgatgattattgagttaatccatatgacactaagaaaaatgcttgactgcctagcaagtgctcaacaaatataagtcattgttattattgcttttata

SEQ ID NO: 686391 - DNA, 633 bp, Homo sapiens
actagtgtgaaatatatgaaagagttaagtcagctggaactgaagggcacaagttttatttgcagtaagatcctaaaatgatttggtaatattttattattttattttattttttgagaggagtctccccctatcgcccaggctggagtgcagtggcgcgatctcagctcactgcaagttccgcctcttgggttcacgccattctcctgcctcagcctcctgagtagctggactacaggcacccgccaccatgcccggctaattttttgtagttttagtagagacggggtttcaccatgttagccaggatggtctcgatctcctgacctcgttatccacccgcctcggcctcccaaagtgtggggattacaggcatgagccaccacgcccggcctcatgatttggtatattttaattgcacacaaaaacataaatacagagcatcttttgctgaatctggtgtttgaaggtaatggaaaaataatttttttagaaaacaaagtaaatgtaaatgtgtttttacatattgtgtttcagcccaaagggagagctaccaataacagaatcaaaagtctagaaactcatgaccagccaatactgaagtatttggaakgttcttgcatggattccatt

SEQ ID NO: 686392 - DNA, 1167 bp, Homo sapiens
  misc_feature 190, 322, 323, 337, 344, 351, 468, 469, 478, 480, 481, 490,494, 498, 500, 501, 540, 541: n = A,T,C or G
cattttcttccgtggctcttcagctgatgtttttcttgactaacagaatctaagctccatgcaggctaaacagaccatgtctatttgttcaccatccccttcaagggcacagctcagaataggtacataatgcatgaatgcattaatgcagttttgaaataccaagtttacaaatataaagacctttagntgggtctcttttctgaagcagtgacttaaataggacatactcaccatttttctctacattgtgtgcagtatagcatatcttcatggtacccccagcccactgggaataagtaccaatattgcagactggttnnttgagcatggatcngttgggnttccccnttgggggggaaaatttgaaatcctggctaattaatataatcagtatcttaactctccaccactccaaaatgttatttcaaagtgatttggacaagaacaagaacagtatagtacttnntcaaaaaanannaactgggcntaantacntnngagtaggatatggagcaactggaattctcatattctgcnntattgggaatctaaattagtaaaattttacaaagcaattcagcagtgtctgttaaagatgaggatgcacatactctaaaacataataaatacacttccatgtatacattaccccagagaaattttcatatataagtacttctcatggagagtcatgtcaagatattaactttggtttataacagcaaaatcctggaaccaatttaaatgaatgaacatatttaatataataaattataaataaataaataaatcagtaagttcctacagcaaaatgctatgtagtcattcaattgagtgaactagatcttcaygtagcaacaaaactgggcctcaaaaatacaatgttgaatgacaaaagcagtatatagaatggcagtttcagtataaaagaaagcaaaaggctgggcacagtgatgtgcacctgtagtcccagctacttaggaggctaaggtgcaagggtcacttgagccctggagttcaaagatgtaaagcaccatgattgcatctgtgaatagccactgcactccagcctgggcaacatagcaagaccgggtctctgaaaaagaaagaaagaaagaatatgcagacatggcactggacactgcacacagcctgcagcatggt

SEQ ID NO: 686393 - DNA, 2694 bp, Homo sapiens
aatactcttctattcccacagtgtcattctgaagctaggagtgccagagccaattcaagaccacaaccctctctaggacaaagggcaccttgaaaaaaatcctgaaatagtcattattgttagctcctgggaacagcagagggaagtgatgaatgacctcagctctcggaagaagagtgcaggctcagctatgtgctactggggcttggtaagtcccataaatgaagggttcccagtgactgtggatggtaccagggcgaaatcacagactacttctctactttgtgtcctaactggtcacaggatgatgacacaagctccaatggcatcttcaaactggtaggagcttttgctgtcattacgactctgtggaaataaatgcataagtaaaaacaagcttcatgctctcctttcttctcttccatctcttctcatctaccagtctgagaattgcccagtctgcgggagacaggaaatcggattagcactcttaaggagagctgctcagccataggatgggacaccttcccatctggaaatggattagacagaggcagtagttgccacacctatggaatcacggggatacttttataggttttccatttttgtcatactggtacaccagcatcttgatgcagtgtgagtttgccggcgagatccaggggctacttgttatggaaaagttatgattggtgtagaactgtacaggttgcttctggcacttgaagaaagccttgagcgtggcggctgccatggtgcggaaccgcttgctgatgaagcagtagaggaagaagttgatggctgtgttcagaagggctagcatgttggcaatgtcggacatgatgtgtaccagccagcggttctggatgggcgccccatagaggtggtaaagaatcatgatgatgcggggggcccaaagtgtggcaaagatggaggtaatggtgaacaagatggcggtggtcttccccgtggagtagccacggagacgaaaattgctcttcctcctgagcttgtacacaatgattgagttcaagatgaagaagatggagcagggcaccaggtagacggtgaagcagtggatccagatgaggacgtgatgcacagaggtgctgatgtagtcttcagtccagatgttgggccaccagtaataggggatgctggtcaggaagcaggtgatgtaaacacttacaatgactttccgggtgcgggctgggtatgagaccgtgtggtacttgagcgggtggcagacagcgatatacctgtcaatggttaacggtacagtaatccatatggaggtgtggatggatgagaattccagcacttctatgatcttgtcggggacctgaggcatctgcatgttcaagatgaaatcttccaacaggaagtccacaaacactatgaaaaagaggaccaagatgtcggcagcagcgagtgccaagagatagttgtaggaggacttctgtcttcttgccaccagctgggagaggatgatcactgtcaagatatttgctgtggagagaagaaaaactggtttagctctgaagcaaagatgacttcgttggctcctatgggggccctaggcatatgtttattttgcactcccatggaagtgaaaatgattgaatcaatgcttttgagggacaacctcagcattacaaatagcacctcatacaattagtggatactattttaaagttatgcttatattctaacacaaccatgagaggtggtgcctccattctcctcatcttagaagtgaaactggggctctgagagcctcacacagccatgagaggtggtgccgccattctcctcacacaaccatgagtggtgttgccgccattctcctcacacaacaatgagaggtggtgccaccattctcctcacacaaccgtgagaggcgatgctgccattatcctcatcttaggaatgaagctggggctctgagagcctcacacaaccgtgggaggtggtgttgccattctcctcacacaaccatggaaggtggtgttgccattctcctcacacaaccatgagaggtgatgccgccattctcttcacacaaccgtgagaggtggtgccgccattctcctcacacaaccgtgagaggcgatgctgccattatcctcatcttaggaatgaagctggggctctgagagcctcacacaaccatgagagttggtgttgccattctcctcatcttagaaatgaaactggggctctgagagcttaagcaacttgcttagagctacacagttaataattcatggtgataggatcccctgatcccaaatctcatgctttttcttttgttcagttgcatgaagaatatggggctgaggtggcatttcctgctatatgtgttcaggaaagagacgggactatataacctcttaagaacctcttcagagcttggattttaggacctttcctttttaagtagatttaaaattggaggtgcagagaagatcatgaccttcagattaatttaaaagtaaattacatttgtttttggaataggtaatctacgtacatgctacatawtcaaaaataatagcaaggaaaagtacattttccttctactcttattctccaatcatcaaagttcccctccctcagggaaattacagttaataaataatctatgcttatatatgtccatatagtgtgcctgcattaggttggtgcaaa

SEQ ID NO: 686394 - DNA, 628 bp, Homo sapiens
aaggagaagggtcgggaaagataggggagggaaagaccagaaggtggggaagaagactggaaaaggggtgaaggtaagaaaaggatggggagggaggagggaagagggttgggggaaagaagaatggagtggaaagcggcgaagacgaccttggggaaagagatggagaggggaaaaagattggtgggagagaagaggatgaggcagggaacgaggtggggaggggaagagaaaggcagaaagacgggctgagaagagtgctgggagaagaagggggagcggagggagggagaagggaagcggggaaagacgatgggagaaggtggsgggggagaagaaggcagtgtgggagaagagttgagggaaaaagaaacaatagtgatgctaatgttaaacgtcgtcgtcttggagcaaaagaagcaagtgctgctttagactcccggcctaactttgttcaataaatccccacttccaaatatcttgtgattgcagtgtgggtcatttttagtacttagatccagagcagtctctgattgttagtgacagtgctgtcaaattgcatgctgttcaccagctataaacgaaaacatcacatttccttgaagtgcactttaacgtgtaattcaaa

SEQ ID NO: 686395 - DNA, 606 bp, Homo sapiens
aatactcatgaaaaatagtccctaatttttccatgtttagaaatgcttatgtattgcagttatacatgttagtttgatgtgttcccctgctaaaatgtactctatttaataaagacaggaatattttacatttttctcactgatgtatctcccagtaccaagaacagtacctggcacatagttgttacactgaaaatagttgttaaatgagcaacatattatacaaaggaaacatacaaaagagctcttgggttggtctttttccccgagaactttgtaggcattgctcctcaagtgctaaatggtagagaaggttgaggctagatttccatgcccactgctatttatttttggtttttagtaatttgactctgacatgcctaggtgtggttttctttgtttaccctacttagagcttgttgaatttcttgaatctgtgggttattttccatcaaagttgaaaacraagccaatttttattaacgtttttcatgtgcactcttaaaaaattatattctccactgggtaaaaggatctagttttatataccatatcaagcttattcatgtgattattcaaatcctctataaacttgctcctttcatc

SEQ ID NO: 686396 - DNA, 606 bp, Homo sapiens
aatactcatgaaaaatagtccctaatttttccatgtttagaaatgcttatgtattgcagttatacatgttagtttgatgtgttcccctgctaaaatgtactctatttaataaagacaggaatattttacatttttctcactgatgtatctcccagtaccaagaacagtacctggcacatagttgttacactgaaaatagttgttaaatgagcaacatattatacaaaggaaacatacaaaagagctcttgggttggtctttttccccgagaactttgtaggcattgctcctcaagtgctaaatggtagagaaggttgaggctagatttccatgcccactgctatttatttttggtttttagtaatttgactctgacatgcctaggtgtggttttctttgtttaccctacttagagcttgttgaatttcttgaatctgtgggttattttccatcaaagttgaaaacgaagccaatttttattaacgtttttcatgtgcactcttaaaaaattatattctccaytgggtaaaaggatctagttttatataccatatcaagcttattcatgtgattattcaaatcctctataaacttgctcctttcatc

SEQ ID NO: 686397 - DNA, 606 bp, Homo sapiens
aatactcatgaaaaatagtccctaatttttccatgtttagaaatgcttatgtattgcagttatacatgttagtttgatgtgttcccctgctaaaatgtactctatttaataaagacaggaatattttacatttttctcactgatgtatctcccagtaccaagaacagtacctggcacatagttgttacactgaaaatagttgttaaatgagcaacatattatacaaaggaaacatacaaaagagctcttgggttggtctttttccccgagaactttgtaggcattgctcctcaagtgctaaatggtagagaaggttgaggctagatttccatgcccactgctatttatttttggtttttagtaatttgactctgacatgcctaggtgtggttttctttgtttaccctacttagagcttgttgaatttcttgaatctgtgggttattttccatcaaagttgaaaacgaagccaatttttattaacgtttttcatgtgcactcttaaaaaattatattctccactgggtaaaaggatctagttttatataccatatcaagcttattcatgtgattattcaaatcctctatawacttgctcctttcatc

SEQ ID NO: 686398 - DNA, 666 bp, Homo sapiens
ttctccctgccatcaccgagtcctcagcatctccacccagatgcctcccttcctccagcctcctgattcctcaatttccagggaatgatttcacagaaacccatgtctcatcttagtcctctaactagaatgtgttcatgtgttccccactgtcaacaaaacagggtacagataggacctggctttcaacacctctgtgctgagcccaaccctgacctctgacatcgcatcatgcacggctgttctgtctgcacatagtgggagaacaagccaaactcttgcccacttccaagcctcctcatcttggcctgctttacttacttgctggatgatacaagactgtccctctcgccaatgctgcccaagccagaagtctggggatctcctagataccacccctctctgtcattctctacatcagattgttctcccttatcctaaacatctctcagacatacccctctctccttccccacagccctcatctttattgatgaggaaattgtgatagcctcctccactgtttctctgccttcaccttactgctttgtcaagccttaagtaatgcaaacactcctgagtcctttygaaaccactgtccatggaggcaaggcaagggatgccacccttgctcatctcacatattttccccttagcaggaaaaaa

SEQ ID NO: 686399 - DNA, 2898 bp, Homo sapiens
tttgccccaaaactgtgatggaacataataaaactggagatatggtttttaacactgcaaaaaggaaaaagcatcaagtttctacttctggctggaaagcaaaaccaatctcagctgacaaggctgggcaaactaagttttcctgagcccattttcctttgagccctgacctagcctggccttacctcattaaggtttggttaaagcagtggaaaggaggaggaggcaggggtggatgggggtgtggggaggggatgagcactctgcagccgattaatctgttggtaggggcccagcttcttgggagtgcttattcagcccaagagtggaggctgtttacagcgagccctggagatggcagcttgtctccagctggggaggggtcaggcccctaaattgaagaccactttggtagcagaactgtagggactggtgagtcaactcacagattctgcagcagctgctccacccacaataaagcaaacgccgacaggctagaccccagattgcaggggctgccacctacaaggtgggaccacaggctgcctcaccgggattgtctgccactaaatagctggagtcacagattgagataaatgccaccttcaaggttgcagtgaaaagcataatcctatgtgatgaatttatatgtgttattttttaaaaagctattttattactgcatgttcccgtcccgtcttgtgaatgtgagtccccgccaccacgtgaggtgcagtcgttgcagcggctggtgcaggagtgcagctggcgcgtgtgtgatagcatctcgtaggtgttgctgcacaagagttaaccagagtcaatgccaaacacatagtatgagaagtgtactttttaagaaattaatttatttgagttcaaatatttttgaaatataaaaattggttgtattttttaaagctataattcttgtagacattctgtggttaaaaatttgattgtgcttattaaaaatggtcatctatgttttgcacttcagctacgtgaaaataaaatttctttgggaaggtgacatttggcttcctgattacgggagggagttggttatctcaggtggagcaggaaagcctggttgattctcacaccaggatgggactgggacttcccaggatggagggaggaggccatttctacaccatactttragctactgacagcaaaaccctcccaccatactgggtgcatcttgtttactcttgactaacatacacttctgatttacagcagaagcctcagaagctaattcagttctcctttggcatgccactggataacaagatagtgagggggcagtgtgtacaagctgtggacatgggcatttcctctctgttgcagcaaggcggaggaaagcccagggagagtaaaacgctacaatctttctaacagctttgccctacaccaccatctaaatgattatgaccaagtggcgacatagtattttattttcctagaattatgtccagctgtgagaaagccaggttcaaatttaaatcctttaataacctgtcccagaattactaacaatgagacttaaacaaattttgatttgtgaagaaaacatgaaaaaagtccaaaagaaaccccctcaaagggcccgagtgtcaacagttcccctttggagcagctcatccatctctcaggtgggggtcctccggcaggcagcttcctctgtggcgccaggtgggtccagagtgggcccgctcctttagaagtcaggcaggccaggcagagggaagagagaggcgaagctctcaacctcctcccggagagcctgcacggccgcctggtacttatcccctgccagtctctccttgaactctttcagggtggctctgacaccagtgtcgctctggatctgcagggtcagctctatccctgtgccacaagacacaaatgagtcaccccacactacacaccaaagggggtacaatggctgggggccgaggcacaaatgtcagaatgtcccccagctggggagtgtggcagggcacaaggtctccatgcttacctcaattactctgagatgcacccacccttggacagatgtcctgggcagcccaaatttataaccctctcagacaaggtgatttacatgtgttttttgctgtctcccaccccaacactcagccttggtgcagaattgtctttcagtggcagggtctcagctactcatcacaatcagaaactaaatacacacaataagatgtggcaacttccaaacttttatccttacctctgtgaataaagtgggctactttttggaagtctttttccaaaagtccacgggacgtcagtgctggggtccccagccgcagtccactgggccgcagagcgcttctgtcacctacaagataaacggggctctgtccctaagtcacattgtcaccactgtgatggtggtgcatttaaaaagggacatgtgggcaaaagagaactggcctgaggatactggctgtccctagcaaggagtacaactgattcagaaactaaagtagaacccaaggcacaaggaggcacaaccacgtttggccactctgacttaattactagtacacaaagtggtctgatgtgccccttgctcctaaaaatgagggtaacatctgtctgggtctgagatgcgtcatcaatattttgttaacaacccacagagaaatgcagcctctggattccggaggccctgacctccctcatctgatgaatgtaccacctccaacagctctacatcagtctttttgctccctggcagggtcagggccaagtacaaaggcacagccaagagacagccaaggtatggtccctgcccccgctccattttttgtttttgtttttgtttttttgagacggagtctcactgtcgcctaagctggagtgcagtgg

SEQ ID NO: 686400 - DNA, 786 bp, Homo sapiens
cacagggttgccaccaaccttcagtttgtaaaaaaataatatctgcaaagtgcaataaagcaaacacaataaaatttggtaggcccgtacgtgagatttctttgtattatttctttttgtttttctttgtagagatggggtctcactgtcacccaggctggagtgcagtggcaccatcacagctcactacatctttgaactcctgggcttcaagggatcctcccgcctcagcctcccaggtaactggaatcacaggcataagccaccacacccggcctctctgtattatttcttacaactgcatgcaaatctataattaactcaaaacaaaaagttaaacatttattaagtgttgaccaatgtaccaaatgacaataacaaaaacccaattccaacttagattaaatataaagctacataccttaagtagtatacaactgtgaagcagcattttaaaaatcagataaccatgtagaaatacatttctatctaaataaactcaaggcatcagactagaaagaaatgtaaaattacaaagccaagcatttcacacaaatcgtcagaaagccagccaggtacacttcatcatttccactatctgctttctataagatctgaagatataatagcatttgtcttgtatctgttctcaaccmcagaggtcagaaccaaactagctaataaactagtctaactactatactttagttagaaaataaactcattataatttgtactcaaagacaatgttcctgaggaattggagttgagatggactctaaggaa

SEQ ID NO: 686401 - DNA, 860 bp, Homo sapiens
aactatttgttgtaagtggcagcttctctacagaacaattttgacttcagattgtgtaagaatgactagatcagaaaaaatgaaatacttttaaaaatatattcatatatttaatatattttttaatattcttttttttaatttttgaaacagagtttygctctgtcgcccaggctggagtgcagtggcatgatcttggctcactgcaacctttgcctcccaggttcaagtgattctcttacctcagccatccgagtagctgagattacaggcacctgctatggtgcttgactaattttttgtatttttagtagagatgcggtttcgccatgttggccaaactggtcttgaactcctggcctcaagtgatccacccgccttggcctcccaaagtgctgggattacaggcttatgtttatcttttcataagcttgttaaaaaatatatttttcacatacgtttgtgattccaaatgtttatagaataataggtcatgagtattttgtatttttatacaatggagtcccattcagccattaaggtgatgtcagtgaatacctacagggtgtgccatcatgatcatgacacattatatggtaatgtggaaaggttattgacaacatgatgacccaatttttataaaaaccgatttaaatagaacccagccacatgttaacaggagttagaggagaagccgtgtgaatgtagatggtttcattatttccttcagcttatctgcctttcctaacttgttctatattgaacttgcattgttttggttataaaataaaggggaaaagtcagcacactgcccctcaggaccgtgctgcctccgtggggctgtgaagctggtcaggagc

SEQ ID NO: 686402 - DNA, 618 bp, Homo sapiens
tattgggatattttgggccatcagaaatttttttgagaagcaactcatgttttctggtgtgttgatactgatataagcattgttttagaacagtttcaacagttgtatttggttaacaaagtcatgtgacagtaggtttaaataaacttggcatttataaaatgaagggaaataacagtcatggaggctttctgtgacactacatttatcacaaacatcacacagagcaaggcaatacatttacaaaatgggatagtgttgggcatgtccaacatccatgaaaatagataaaatattgatgtcttrcagtcatcctcgtgttgatgccgtagttattgtcttgagaaaatcccatttgtatagaataaatgttctatagtgaggcactataagaaaattgtaacttgacaagctttttgttacatgaagactaaaaacaggtcagaagataactgtaaagctgaatcacttttcttcctgctagagttcgtagaaaattgacttctaggttttattcacaccaccaatggcttactaattggaaaagacgtgatagtggcttggatgttattctctgttgtggtaagccagaacatttggttttgtagttagaattta

SEQ ID NO: 686403 - DNA, 618 bp, Homo sapiens
tattgggatattttgggccatcagaaatttttttgagaagcaactcatgttttctggtgtgttgatactgatataagcattgttttagaacagtttcaacagttgtatttggttaacaaagtcatgtgacagtaggtttaaataaacttggcatttataaaatgaagggaaataacagtcatggaggctttctgtgacactacatttatcacaaacatcacacagagcaaggcaatacatttacaaaatgggatagtgttgggcatgtccaacatccatgaaaatagataaaatattgatgtcttacagtcatcctcgtgttgatgccgtagttattgtcttgagaaaatcccatttgtatagaataaatgttctatagtgaggcactataagaaarttgtaacttgacaagctttttgttacatgaagactaaaaacaggtcagaagataactgtaaagctgaatcacttttcttcctgctagagttcgtagaaaattgacttctaggttttattcacaccaccaatggcttactaattggaaaagacgtgatagtggcttggatgttattctctgttgtggtaagccagaacatttggttttgtagttagaattta

SEQ ID NO: 686404 - DNA, 618 bp, Homo sapiens
tattgggatattttgggccatcagaaatttttttgagaagcaactcatgttttctggtgtgttgatactgatataagcattgttttagaacagtttcaacagttgtatttggttaacaaagtcatgtgacagtaggtttaaataaacttggcatttataaaatgaagggaaataacagtcatggaggctttctgtgacactacatttatcacaaacatcacacagagcaaggcaatacatttacaaaatgggatagtgttgggcatgtccaacatccatgaaaatagataaaatattgatgtcttacagtcatcctcgtgttgatgccgtagttattgtcttgagaaaatcccatttgtatagaataaatgttctatagtgaggcactataagaaaattgtaacttgacaagctttttgttacatgaagactaaaaacaggtcagaagataactgtaaagctgaatcacttttcttcctgctagagttcgtagaaaattgacttctaggttttattcacaccaccaatggcttactaattggaaaagacgtgatagtggcttggatgttattctctgttgtggtaagccagarcatttggttttgtagttagaattta

SEQ ID NO: 686405 - DNA, 593 bp, Homo sapiens
agttccacttcccaggttcacgacattctcctgcctcagcctcccgagtagctgggactacaggtgcccgccaccatgcctggctaattttttgtatttttagtagagacggggttttaccgtgttagccaggatggtctcgatctcctgacctcgtgatccgctggcctcggcctcccaaagtgctgggattacaggcgtgagccaccgtgcccggcccataaataactcttttgcttcatacagaagggttttacagtcatttaactgtattctttttgtaactatattcccattttacagaggagaacatgtactttgcccaaggccacacaatgaagcatagaactggggttatgctcttaattatgctatgccaagtgaggtctccacctaggtaccccagcaacacacgaaagtcacttcgtttagggcacttaatttcatggtgtcaaggtctgttttttttgttttttgtttttttagagacagggtctagttytgtcacccagtctggagtgcagtggtttgattatagctcactgcagccttgaactcctgggctgaaatgatcctcccactacggccttcca

SEQ ID NO: 686406 - DNA, 586 bp, Homo sapiens
gtttggcaagatgctgcaggtttattgtgtgcatttactgctctagacctggagtcagccatttctcccaggagccctagttccttttagtgagaagtgsctccacaacctttgtcaaaatagcatgtaaaacaaaatataaaaaaaggaaaatagaattaaaaaaaaaacacaacttgggtaccaggggtgcacagtactgctgtggtcagtacttcctcctcctcctcttcctcttcctcttcttcttttttgagacagtctccctctgttgtccaggttggagtgcagtggcacgatctccacttactgcaacctctgcctctcaggttccaacaattctctggcttcaacctcccgagtagctgggattacaggtgtgcagtaccacacctggctaagttttgttttgttagtagagatggagttttaccatgttggcctggctggtcttgaattcctgacctcaagtgatctgcccacctcggcctctcaaagtgttgggattacaggattgagccaccacgcccaacctgtggtcagtatttctacatcattaaatcataatgatacttcctattcaaat
